United States Patent Application Publication US 2015/0376612 A1 - sequence listing, part 54

SEQ ID NO: 127568 - DNA, 1033 bp, Homo sapiens
tggttttaaattgtcagatttgactgtgaattatttttgaatttcattcttaccgttgaaaattttatgttatattcagttatccattcaggacactaggccctgtcacacatttttaaacaccgtagctacattctttataatactgaacatttttcattaatcctcgtataattaagagaatccagttataatgctgttgatttgaatgtaccggttttgacctatatgcccatgttcaactacttgtttatattgtcttggtcataatattttgagcatgagtttaaacttaaaacctgagtgtgcattaattcgtgttctagtgcatttactaaattatgaagtcagatttaatagccttatttttttcccacagtggcttaaagaatgattataacaaagaaacattcaccttgaagcataaaattgatgaacagatgttcccttgtcgattcattaaaataggtaagattttagcattctgaaatagaaacaaattcttgatatcatcagtcagcaaactatagcccatagaccaaatcctgcaggcctcttgtttttttaaatacaattttatgggaatattgctgcgctggtttgtttacatattgtctgtatctgcttttgtgctacaaaagtagacttgagtagttgcaagagaccacagagccccttaaatttactctttggtcctttacaggagaagtttgctgacttctgctttatataaattcattactaagtggcagttatttcaagtggaatcttttccaaatgttttctcatttgaaagttttcttagattttatgggatctagtgatttgattgccttaattttatggaaggtttatcacttatactaaaacaataatattctaaaaccaaatactgataaaatccttaaggcagtatattatggttattatcagttgtgttcttttattttatttatttattttttttagttaaatgctggtcaaacccattaaattgatttaatgacccatcgataggttgcaaatcactgtt

SEQ ID NO: 127569 - DNA, 1326 bp, Homo sapiens
tttcccagtaggtttaatttttaaggtttttgatgctttttaaaaaaatctaaggaaattttttattgccttatattgcttatatattgagggtttaaaaataataatgtatttaagtcatcaaatgtgttttttcttttattttgttaacgtggtagattatattaatatagctcctattatttattgaaccatcatctttccattcctggaatgagatctgtttggttacaatgaaaatctgatagaattttttgcaacttttctccttttaatttgtatttaaatatgtattcatagctgtgattggccttaagtcttttttcttctgatttggatttcagggttgtgccactgataaataatttcagtctctttcagtgttctgatgtagactaaattctaaagtaattttttgctgcttgtacatttgataaaatttacctgttaaatcatctaattctggtggcatttatttgggggtagacatgtgcacatttttaatttatcttacagtgtttttattaactaaggaaatcttatggtggcatgggtcatctgtttcgttttactgttgtagccttagcaccatgctagtcatataaaagatgcccagaaaattcgttgaatgaatccttataaggttgaatagtgcttttactttgctaaagttttatttgaactgtgttaatatttttcttcttctttttgttttttctccttaaagttccactcttgtcctggggacccagctttaactttagcatctggtatgttgaacttagtggcattgatgatcctgatatagtacaaccttgtctcaactggtatagcaaggtaggactgtgttttaaatcctgactttaatgcctataaaaggagaaatatgtcaatctcttatcttcattgagaataatttaaaatattcaaaataataataacaacagttagctaacattttattaagcacttccagtctgccagcttttaaggaatcctgataactcacttagtcattatcactctatgagacaggtgcacttattatccccattagtttatagatgaagaaatgaagaacagagagattaaatagtttgcctaggatcacacaattgtaaagtgtttgagccagtatatgaattcaggcagtttggctccacagtctgcttttatgttattatacccatttgactctgaattttgttttttcacttgtattcatataaatacttaaaacatagtttttagtgggatagttttgcagcctaatggaaaatttaagatgtggatgtgatttagactcctaaagtagtcaacagggtt

SEQ ID NO: 127570 - DNA, 1047 bp, Homo sapiens
ttaaaagagccaaataatgatacctaatgaatcaggttagtaaactgcttggcacatagtgttaataaatgctcagtgtagattagttatttttactgttgttattgtttcctacagtatcatctaaccaaatctcttctttccatacttactctgtgttctagtagtaccgtgaacaggaagctattcgcctttgcctaaaacacttcagacaacacaactatacagaagcttttgagtcactgcaaaagaaaaccaagattgcactggaacatcccatgttaacagatattcatgacaagctggtgttgaagggtgattttgatgcttgcgaagagttgattgaaaaggctgtaaatggtatgaaacttagattggttattagggtaaattcaagtacatacgggaaactttttctcaaaaataatataggcttatgccagttattactgtaattttttttcttggttttttactcggttaaagattgttatctctttggattagggacttctttcatgtaaaatagatccatgatgtaatgagacttaaaaaattgaaatgtacttgaactcacatataaatttaagttgtcatcttgggaaaccatgcacttacaaatgattaactagcattaaactgtatcagaaataatattttgatattggtagccaatattcattaacagtgtagttttgaggagaaggggggctagataataaaaaatgttattagtaaacaattatatataaggaacaaggagatttgtattgaaaacaacttccttgtggtgtgaatgctatataattgctgattttcttgtgtgacctgtagtctggctttgaaagaaatgtgaatagttgaacatctgtattatctcccagggtattggctttggagggtaacactcatttggatttttaaggtctgatgtgttttgttatttaaactaaaaagggactctgttgttgcttatagtatgacttttttttttaatcttcctcagtaactttcatagtgacaaacaacagaatagttgcacaatat

SEQ ID NO: 127571 - DNA, 1293 bp, Homo sapiens
tttataaatttaaagttaacttaaaatgaattgctttgagctccactttttgaaatatgacaaatctgcttctaagccttgtgcattgttattgcttacttgattgatgatgatacttgcaaataaatgataggtatgtttgaaattgagtatattttggagtataaacaaacaaataactaatctcttaacagactttaaaatgctaccaataaaaaaaaaatatatatatatatatatatatgccatttctaggagtgaattctgtgggttttttttaacctcataagatgagggaggcataggtaattttagggcttttttgtttgtttcagatatttatcagtaaggcatttgataccattttgtgaagggaaagcaaaacaacagccacaggcaactctacagttaataagctaaaaacagttatattttaaaggtctctttagtgacgtactcagttggttaagattagctgataaaaatcttgtgcagttttgatatctacagagacttaacttatcctttggctctagaaaggaaccaagtttagagaaattagtagttgctcaattcttgaaacttacagccacatcatagtttttgtactgtgaatactatgggctttctaaactggcctggaacactgttagttaataaacattcctttcagggttgttctctttgcttctgatctcattgatgatgatttgttggacaaataaggaagtaaacagtgcagagttttttggcttctgctctattaaaaacatagcagagaaggacaagaagttcctgcctgctaaataggaagatctagggaatcaaaagagtctctgtcaagcttcttgtaatggaggatacaaaagctacttttagtatttttagtatattacttagtatgatctttaagtattttctgtattttaagaaagtgtaaggctctatttatttctgtaataggctttttgtttgtctagaaacatcactgtatttacatttcattttattagaggtgattttggaaccaataattgctactacctctttgcccatgcaggatccagtgatgataggcaaaagtaatcacctagggacaggaatgttttactcagacatgtagagattgtactgaaatccaccctttgctgagcttatcttatttgctatagaaagaaaaattttcttttgtgagataagggaaggataaagtttaataaggtagtcataaagtttcaacctgaaatctctacctttctccctttgtctttccctgcttctttcttttttctg

SEQ ID NO: 127572 - DNA, 1078 bp, Homo sapiens
attaaatgatatttttctaggaattgtctataattgtctataatcaaaaatttcaaatttatgggtattaaggtatacctaatatcttactgtttgtttagtgtttgcaggatttcttgagatgccccttttttgttacttatcttgaatatatatatatttttccatcagcacatgtttatcaagtgcactagtctcttgagagaaccaatttttggtttgttcatcttttctgcaggatttcttgagatgccccttttttgttacttatcttgaatatatatatatttttccatcagcacatgtttatcaagtgcactagtctcttgagagaaccaatttttggtttgttcatcttttctgttatttcctgtgtccttgacttatgctctgtttactgttgtcttccttctctttttgagattaatttgctgtctttttataacaactttttaagccagatgcttagctcattagttttcagactttgaaaatttcccttatatacatttaaatatataaaatttcctcctcttgttctttagttgtgctatgaagtatttttatttttgttcagtttagtattttcattatgaaatgaaatggctctttggaagaactgtggtttttaatttacaaatttgtggcgatttactacttgttttctttgttagtgatttctggcataattgcataggggccagagtgcatatcctgtatgtttccagtcctttgaaatttaatgagacttgctatataacccagcttattcaatttttataaacatatcatatatatttgaacagaatgtgaattctttagttgttggagcagtgttgtatatttgttcagttggtcagagttgctaatcatattgcacaaatctttatcaataagaattttctgtctgattctcattactgagaaagatgttaacactttccactatgatcatcgaattatatgtttcctatagttggtccaattttactttatacattttgatgccatgtttttaattgaaaacaaattttaaattattttgaattaaatcttttattatgaagtgcctttttat

SEQ ID NO: 127573 - DNA, 1044 bp, Homo sapiens
atgattagtttagaaattgcaagtatgcatgattaccttaacaaaattgatcagtgccttttctctcttcccatgtgaggatttagtagactttcagcttcatattctcaccttctaattcattattctattgttgtcaattgctctattgttgtcatttattttgataccatgttcaaagaccctataaaatatttgtcttatacagcaattgttcattaattttacccaaatatttactgggttttttttctcttcattattgtttgcgtctttaatcttatgtctaggattgtgttcattccctgtgccgtaagcccatcctttagaatttcttctataatgcagctcaactctctcagaattgatggcctgaaaattttgtctcctttataggagggtatttttgctagatgtagaattccagattgacacttactttcttgaaatacattttgaatatcattcgactgttattaaccagcttccttgttgctgttgagaggtgtgctatcattttcaactgccattttttaatataatctttttccctctgactgtttaaatattttatatttgttttagattattttgtagttacattaacaaggctgtccgaaactccagtgtggcagccctgttaactattgtctattttggttttctttcaattaaatatatgttgcctttgtctatcatttattttctcctttatcttttttaactgcacatttctgtttaatattttaagcttctctaaaccctttatcccatttccactactatattatttttagtgtctctttcttacactttgaccttcagttctgtgatattttcaattttttcattcctcttttctctcatttctaacaattccatttttgtttcctttggttgtcttgccatttcttttccaactatttagatgtctactttccaactgcttatatctctaatctgtactcatgtttcatagagagagttgcttttttttatttgtggaataaatttgtggaaaggtatttggctactttcatctat

SEQ ID NO: 127574 - DNA, 2728 bp, Homo sapiens
tataaatacatacaactaggcagcagtactataatctatgtggatttttttggttttgttttctttttaattctgggcaagagatttgaaattttttccccttttggtgaaagcttcctaaatcatgttttttaaatcatgttgtatgtgtatgtgggcatgtgtgtgcaggcaggatttctgtgttgcccagactggttttgaactcctggccttgaatgatcctcctgccttagcctcccaaaaccctaggattacaggtgtgagccaccaggctgggccatcatgtgcttttttaagagagtatccactattattggagaaaagaacagcttgtgctcagtgaggactgtatgaaatatatttattatagtcataattataggagaaaaaatgaagtgatattggacctggagactctagttaaatagtttaaaaattattaacaactagttcttagtgtgctttctcctagtgatattttaatttcttttggatagttttaattttatctgactgttctgatctcttgctttagatttttgtcaaaaatagacttacagaaatattagcaactgcctgacttcttctttaaacagaaataatttttgaactcacatggttcacaggcatctttaaatttcttatttactaatttgtttctaagattttcaaacagtgtaatggatgtcatatttttatagatgagaatatcattgtttcaatagagaggctgacttttgctgaattatatatctaaagcaagcctaccaaggcaaaaggccttattagcaagcgtttgcaagaattagaaataatagggagcatggagattatttgggatgcagaggtgtcaactctttgtttttaggttgcgaaagttgcaggaagttcttttacattaaaacaaggtagtaaaagcaatgcatttttttaacctttaccctgctttagtatttgcagtatttactgactttttgcaagaattttgaaaagtctcaaaggcaaagaagaaaggaaatttggtgagcgtgcctgtaggatggaggtttccagttaaagccagctgaaaagtcttgaaagcgaaagggttggttacaactgagcttcataattacccagaaaagaaagattagggggagtgctctaaattggttggtctctggtgaatatataaatcgcagaaaacagttttacttttaaattgagtcacatgacagagtttaatagtaaaagtaactttataaattatgatctatttgggtgcatgtaaaagctagggtttctagcttaaaaagtaaggaaatgttattgtagcacatagcaagaagtccagaggtaaggcagatttcatggttggttgattcagtgatcatttctttctttctctgtgctgtatcatcattatagaattgactgcattcttgtacttcgacaaatttgctttaatatttgtatacattacatgcagatattccagaggaataaaagtagatttttttttctgtatgtctctttagaagtaaggaaaaattgcctagaagtctcccagaagattcctcatgtttcattagccaaaattgggttccatactgttcttaaactaatctttgttgagggccatgggagtagggcttcataattatttaggtgtgtatgtggggggatgtatgtagggagttcagtctccataccattacagtaactagtgtaacaacttaagtagattatgagtttatcaatacagcagaatcaggagtaaggaaaacatggtagaactttagtaccagccccaccatttaagagctgtgtgattttggttaagtttcttactttttttaaatacaaatttctggatttataaaacggagatgataatgtgtagttcataggattgtttttagaattaaatgagatgagacagcataaattctaacatttggtaagtgttccataagtatagttttattactgctgttagtacttttatctttatgtagttttgtactcaaaactgtataataatggaattcacatgttaaagttagtgttcccttttcctgaaaatgtatcaaggacctagaccaaaattattggagctctattttcttctctagttctcttggatatgggtggcaaaaagtactggcacaaagcactgttgggggaaagagattaggatccaatgaatccatgtcattataggatgtaaagattaagaatttcatagttgaaataaagacaagtggtgggagatcacaaaaagaaaatataattctcctaatctttagttatcctttcctcttcttaattatatttatgataatgatagaaatgattttttaaagatatataagatcttttttcaatgaagtagaacatttattcagattatttatttttattttctcctgcttctattttgcagccttaaattgtcttatgactttttttcccctcccagttcactcccttttccttctttcaaggtctctaaccctctgataatgtcacatacgtgtccgttgaatgcaacagtgactttgtatctaatacatacagtgatgatgagaaacatagtacgtttaatatgagcttcccctaaagcaatttgtttgcatggttgtgtcaattaatattttactatttatatttgaggtagcatgaagtgaaattgaagtgatgcatattttatgaaaatgtgcttttgtattagtgacatattagt

SEQ ID NO: 127575 - DNA, 1051 bp, Homo sapiens
gggggaggttttgtcacttcttcatctgtactcactgctttgccagataattaacatagtggaaagtgtagcaatttcttaatgcaactgtttgtgttaaaggaaggcagttctatggatactgagcttttttcattgtggtcttcatatattactaaggacttctctttagttgtgagaaagctttctcctgatagtattgcatattaatatgcaggggaaaattgcttaagaacctccataattgatgttacatgaacatcattctcctattttatcagtcatgtatgaggtaattttcttcaaagacacacatattatagcaaacagacagtaattgtgtatttgcaaactaatggattcaacatataaaatacaaacatactgaaaatgaattcattttagtgctttcttttttccctcagacctctcaggggtgaatatgctttctaaatctattcttaaagatggcgatacggtactgactgatgagggaaggaaagaagaaaagggcaaagcttcaatgataataaattgcacaatctaaaggcttaactattaggataaaggatttggagggaacttctggatgattagccgctgaatacagtagtaatgaaaagcttcagttttgtatcttattttctgtatataagaactgacatttcagtcattttcatagcacccttgtaaaattagtataaaattggatattctcaattttacattaggagaaagccaatacagggaaacttattagccaaagtaatatatttcaactaataggagaattatgaagaaagccttaggctttctagttcatatcaagtaagacattagaatcttacaaccttttgaactactgaaattaatttataacttttttttttttgagatggagtcttactctcgttgcccagccggagtgcagtggtgcaaactcggttcattgcaacctccgcctcctgagttcaagtgattctcctgcctcagcctcctgagtagctgggattacaggcacccaccaccatgcccggctaatttttgtatt

SEQ ID NO: 127576 - DNA, 1079 bp, Homo sapiens
aataacaggataaagactttgaacttgactccacacagacagtggagaagccacagaagatcttaggcagaggggtagcaaggtaacatctgaacttgcagcatacaggactgactgaaggagttgagaatgacagggattggaggtaaagtggcctatgttcgaaacggcaaacaaatttcattctaaaacactgagtcaatcaccaatcaatctatttttcattacttaggccacaaaaactaaaattcaaccacattctttggtatagtacatgtaccaatttggtaccagtataaaacaaaccctggagctaccgactaccagtagtaccaatctacacatcttatatgcactaaaaataatgtagaaatgtaaggtatataaagacatctcagtgtctttttgcacaatggaataggctttttatttttagtgcccaagtgcaatatctgtcttctactttgatttttaggataaatcagactgtgctgattgcataatcctccacaagatggcacactacttttgtaattaaatcagtttttccactctgacactgtataggatgtgtatactacgcattgacatagcctgggcccaaaacttagacaaaattcatgtatcaaaaagaagaggcaggggaagggttaacaggctggtgaaagaagttaccttaattcttagttaagacaccgagagaaaaaaattttttaaaaaaaggttttaagaaacaaatttatctttaagatagaaataaaactctataatatttagatagagtctgaatgcttctaaaagtgaagttcagtaagacttaaattaacatgacaatttttgaagacagaaatatttttgaattttttgaagaggggaaaaatattttatatgctctttacctttcccttcttaagccatccccttgaagtatcatgacccagcagatcatcaactgaattcactgcctccctttttaaatagaactgtattcttacataaagctatgattacaacactatctaaatcttttgggtgaattcaacatacagttactttccttactaaaaggctgaattgtt

SEQ ID NO: 127577 - DNA, 1572 bp, Homo sapiens
gtcggtagctccagggtttgttttatactggtaccaaattggtacatgtactataccaaagaatgtggttgaattttagtttttgtggcctaagtaatgaaaaatagattgattggtgattgactcagtgttttagaatgaaatttgtttgccgtttcgaacataggccactttacctccaatccctgtcattctcaactccttcagtcagtcctgtatgctgcaagttcagatgttaccttgctacccctctgcctaagatcttctgtggcttctccactgtctgtgtggagtcaagttcaaagtctttatcctgttatttaatcccttccatgatctggacacacctgtcttttaacctcctctccacctcctacctatgtgttcttttaaatcaaacagtgtatttattcatcacacagtttaaccatttaacatgcattatttaatttaatttaattctcacagcagctttatgggatagatactgtatcacatcttagagattaagaaaccaatagttaaggaactgtgtggtggtcacatagctgtggtgatagagccaggattgtagccaagatctgcctgactagagtacatgttcattaaaacacttttgacgtgtttttctgtctctatacttttgctattctttttactctgtttgaaaagccctcttttttttttgttctgtatcctgccttcctgctggtgcataggtcaaataccactgttaccatgaaatctcttctgagtcccctcagccagatatactgtcttccctcttttgaaccctcatggtgctttttaccttgtttatctttcttatgacatttagtctgccctgcgttatgttgctctatttgccttttgatattcttggctagattgtaagttccttgaggatagggactggggactatgtcttctttcttttgaattctctaaagtgctttgcgaattctcagtactcaaaaagtgttgaataaacattcctcaaagtgctgggagaaatggatagacactatagcctatatcccattcagaaaaaatatagagaaggggtgaaggggttgctccttgaagaggatcgtactaccccagatgtacatgaattattatagaacctataagcatgagaatgggcttccataaaccaatctactaccctactgcaaatattaatgctttcttttttctttctacttccttctctctacagttctctccaattatatccataatttttaaaggtctttgatatcctttgtgcattaaataataccttttctggtgtctgtttctggataatagttcttctttgcatgacttaaataattagatgaattaattaaaatttttgttacgcattttcattcaggtatgtcagaaggctcagtttccatccgattcatttaattttactattaaacttcagctgggaccacaaagctttcatggataggaatgacatcttggcttaattccattaggatgcttactgcgtgccagattttattttgctcagctatcaatgaggctgttgtggaaatgtgggttttctttgctgtg

SEQ ID NO: 127578 - DNA, 1031 bp, Homo sapiens
ttcattattcactgaagaagaaaatcagttttgtcagcggtaaagtctgtgaatataatagacatttcagagtcagaagaaaccaaattctcaagatacttagaatgacttaaaggataatttctgatgagttaaatgtaccacaatatatctggaaaaatttctcccagtttttataggaatatcaaagctgtggatcactttttcttaagatatctaattttaacttaaagctagttttaaccattgtttttgatatagcaatagagagaaattgcctttaatatgacttttttcaaaaacagctaaatgttcttatgctgtacttttacactatatattcctctgggggttttattttttagaatctgaattaaaaaattccatagtggataaaaagtggctgcattattaaaaagctggtaaatgtaaagttttcaaggccaaacacagaaactccaaaccagctgcacgttaaatttttctgggatactttacaaatacagacccatttttacccattgaaaacctgtggaatcagaatcttgggacatgcctcctagttatctgtatttttataaatctctcaaaataatggttctgcagcatccttttcatatattcatgcctaggaaatattagtctagtatatatttgagaaagttaccaggttaaaatttttattttaaaatttatttagatgtagcttcttaagtggccttagaaacagctggctaggtttgggtgcttatgcttattttgtccttttttttttacacatatttttctgattttcatagagactgtttatttgtttggtggctgggatggaacacaagatcttgctgacttctgggcgtacagtgtgaaggagaaccagtggacatgtatctctagagacactgaaaaagaggcaagttctcagacttttcatacatctatattacagaaggggcgtagatgtgcacttgtttttcggcatgattatattcttcactaatgtctgtcagcagtagtagcaatagaatttg

SEQ ID NO: 127579 - DNA, 1080 bp, Homo sapiens
gcactctccatttaaactgtttcaggatataaagtgacaaatgagctataacaaaacagtaggagcctcaaatgaaaaggagataaaacggcctaattcataacccactgattttgatctaggaaggccatttccaaagatctagtgctgtgtcgttaatcctggggaactaggttcttgcttactctgaaattatgttaataaaaactgtccagggattaatcactggacagtttttattttttcaaatagatgttgaaattctgatttacttttcttaccccgggaaagtatgtgtaagtggccttcctgtttcagtattgaagtactgttctctgaaatgattatttctgtcttcaacaacaaaagacaaatcttaaattaaaaaaaaaactaacttttttctactaaagtattgtaaatctaaggcgatgacatctgtaattattcttgtgttaagcctaggtttcatcctaaaatcctccctcttcttcagtgaatgtgtctaattagtgcctaagatccaacagttctccaagtgcctggcatgatccaacaggtcatccaataccacatttcaaatgtcttttcctctccattccttttagcagttttttcaactttatggtttcttacgctttttatatctccattgttgacctattctgtgttcaccaacacagtctttaaaaagcatatttgggctcggtgtggtggctcacacctataatcacagtactttgggaggtcaaggcaggaggactgcttgaggattggaggtggagactgcagtgagccattacagtgtcattgcctccagcctcggtgacagagcaagaccctgtctcaaaacaaaaacaaggccgggcacagtggctcatgcctgtaatcccagcacttcgggagagcgaggccagcagatcacctgagctcagtagtttgagaccagcctgtgaccaacatggtggaaccccatctgcactaaaaatagaaactagctgggcatggtagcaggtgcctgtaatcctagctagctgggaggctgaggcaggagaatcccttgaacccaggaggcggagg

SEQ ID NO: 127580 - DNA, 1077 bp, Homo sapiens
aattgtaaataacaacaacaataataaaacaatttatttatctcacttccttttgcttagagtaaaaactcgaaatttctcatcaagatttgctactcaattacttttccagcctcatctcccatgtgccagttaaagttgctggaattattcaactttctcgcctgtgtcctttggcaatgttgttttccttgtttggaattaacagagggaggctctccccctaactttacctaataaatacccacttattctttaaaactcagttcagacttcactttctctgtaaagcctttcttgaacttgccaagcagaattaaaagcttcctttgatgtgctcacttaaccccttttaatacttggatggcttactataatgattggtttatattcatgtttccctatctgaattccttaaaggcgtgaatcatattctttaaaatgtatgtattttaaggatgtgcacgttcttactctttagtgagtaagtaggtgaggtaagttaaatgagaaattaatactagagaaaagggaacgataaatacaaaatccagagagggtagggggtttaaaggtaatattaaatgttattcttctaaagcttggtatgggtagataacttcattccgttatttttttataccatatacatatgttgtaagtaatatttataatgcaataagtaattattttaaaactcatgctggaaaaatatagagattattttgatgagaacactttctgttagttcaaagtcagtacagatgagtaaagtggtgattcagtactggagctcagatttattatagttaattaatagactcataaaaacctccgcctcccgggttcaagcaattctcctgcctcagcctcccgagtagctgggattacaggtgcctgccaccacgcctggctaatttttgtatttttagtagagacagggtttcatcatgttgaccaggatggtctcgatctcttgacctcgtaatccactggcctcggcctccgaaagtgctgggattgcaggcatgagccaccgcgcctggccctcaagtggcatttttgtatagttttcta

SEQ ID NO: 127581 - DNA, 1002 bp, Homo sapiens
tctctcagcaaaaccaagagctagagtaaacctataactcccaatgccttgtaagtttagccagaaacaactaaaatactcagaacttttgttgaagcccacaacagtataatagggagacctgggaaagcaaagggagcctagcagttgtatgtcacagtgagaagtgtcagggacagggcacaaattgcacccagggcagccactagaagaatcagtgaattaacatgtgtaaagtacccagaaatatccagaggtgatatgtgtcagaaagcattattttgtaaaagtgaaggaaacacagtgggaatgatggctccttttgcaatggccagtaagaaacctggggagctcaaagcttgagatcagccctgtaagccagatgagagtcatagaattagagaaggtatggcttcaccggaagtgccatattttgaaggagccattcaattcagtagcaacagaggaaggagttcttgagcgagaacatccaccttctatagaaatcctctgtgaagttatctggtccagggaaattcaactcaattacatatgaaaaactaaaaagcaataaataacaaagctttagagagacattctaaagaaaaacaataaaaagaaaaataacaataaatgaaagttatatcccagtacattacccctttcagaaatgaagacttatctacaaagagcgtaaagaagaataggtaatgatcatatagcataggaataagataaaacaaagaggtaaaaatgattaaccagggaaggtaggcagaggagagccaacatatatatatataactggagactttaaagaagaaagccaaaacaatggaaaaaacaaatatttatcaattgaattcaggaacattttcctgaagaaagattttactccgcatgtcaaatgggcatactatattcagaaaaagttgacccaaatacttaactctaagacatatattaataacactgactataaaagataagagatcattttat

SEQ ID NO: 127582 - DNA, 1014 bp, Homo sapiens
aagggttttataaaaataaatgcagagaggtgaatttagcttcaccactcttatttgcatatctgatcgcttagtaaatggtagtaatattaataggatgcttgcctagaatgaaagaagggaatttttataaggagggtatgatcactattcacccagaatataagtattcactcttacatataaatcaacgcctcatgtatcattggttgattttgataaaaattatgcaatttcaagaaagcagaaagctctttattccaacatgtttttaccctcactgacaaaaatgacaacttgaaaaattatttagaaacttgcatatgataatcaggggtggtatttagtgtcattagggacaaagtttagggtttttttgagaatgtaaaactgtacatgttggttttgttttagcacatatgacaggaacaaactaaaactattcaatctgttgccttgttctgatagatgtgtatggactcagaaaaacatatgatctacacttttggtggtagaattttgacttgtaatggcagcgtagatgacagcagagccagtgaaccacaattcagtggcttgtttgctttcaactgtcaatgtcaaacctggaaacttcttcgagaggactcctgtaatgctgggcctgaggacatccagtctcgaataggacactgcatgttattccactcagtaagaacattccgtacattgcgtaaatgttattttgtcatgtatatctagataggaaaagaagtggtgaaatctaattctttaggaagagattagtgtagcaatgacagagaaagacaaaacttctttaacagtgaactgtttgctaattatgagactcttcccatcaacctggtaattcctaaatagttactacctggctaccaacctgggcaatcttatgactaatttcactgcttatgtagattttgtagctatgttcctttcttatgcctttccacttacgtctcttagtaattagaaggacaatttcttactctgttc

SEQ ID NO: 127583 - DNA, 1243 bp, Homo sapiens
ctaggactacaggtgtgagccaccatgcctggcctatttttgtgtcttttaaggttaaaatcctgcttcataacattagttgctttgtctgtctataatagctttcacagtaaagaaaactaacaacagaatcactgagtgctgtttaacgttgctttctgattatttttctgtttaggatttagacttctagggatgggtagtcaaaaagtatgtattaaaatcattagaaatactatttctgtgtctgagtatatctttatatacagataggtttatttgttggattttttttgcccaaattttagattttttttttgagttaattttgtcttctaattaaataaaagcatatacattgttctaaagtcaaaaccatacatcaaggtattatttttggagaggtcttcctgctctgttcctgccactataggtaactgtcttttattaggttttggtttatccttcctttgtttttcaaaaaaagaagcaatctctattctcgctctcgcttgcgtgctctctctctcacttttcccctctctcacattctctttccctctctccctctctttttgtctgatgcacagatattccttcttctccattcctacacaaaggaagaaggaacctgtatatattattctgcaccttgcttttcttctttaacaggatgtcctagagatccccttttagcaatatgtagagagcttcctctttcccttttattccagcatagtactccattgggatctgttataaaattacttttgtagaggtttaagtttttaaaggatcattctgagttcttcatggaagtgataagttactcctttctttttttttttcttctttttcagaaaaatcgttgcttatatgtatttggtggccagcgatcaaagacctatttgaatgatttctttagttatgatgtggactctgatcatgtagacataatatcagatggcaccaagaaagactctgggatgggtaagggcattgagtgatttcttctctcatgtcttaactactttaggtagaaaactgcagttcattctcttttctttctaatcatttttcaccctttctttatttctttaattgagtaattccaagtaagagaaagaaaattctaccagcttattcagttctatctatttttaaatatgggaattactatttccttcaagcagaaaatatgtgaatttctaaatgaattgtgtgtgtgcttgttggggggcgg

SEQ ID NO: 127584 - DNA, 1085 bp, Homo sapiens
cctcatcttctctctattcccattgctgcttcactatgaactagtttgggctaacatcacctatttggcctctgtctctagacttcctctccctatgtacccctccctgcaacccattctccacactgcaagcaggatacagctattctgtgttaccagtaaagaatagaaccatatgccttaacatttatagagcagatattttttggtcacctactaggtgccagacaataagctacgcactaggagtacaactgtgaatgagggccctatcttcatggagttatggttgtacacagagaggaaaaataaagtgacagccttacctttagattagtgctagtgaagaaaagaacatatttttaaaaatacaaacctagtgggttttcttcctcactttaaatcttttaatggtttctccctgccctcaggattaagtctaaacttaacataattcacagactcttttatgatgtgccccattttagttctccagtcctagtcttggtgtctgtactcttcttgccaccaactctgtttcacgaccaccgaatattaaatctttatagatagtgtgttttaacttgcctttgagagttgcccatgctattcctcctacctgaatcactttcctctcccctccaaaatctagctaacttgtactgcttacctctcagatcttagcttgtagatcgttgtcgcccaaaattctctaatgccttaagcccaggttagaaatataaaaacatgtggctctagccatcattgttaacgcaattctaggtattcatctggctgtaaaatcttgactgtgcttttcaaaacctatacaaagatcagctgaaatacacagacttgttcatgatttcttaaagagcattcagtggtttcagtactctagatctcctaaaagtcttttactgaactaaattagactgttcagaaaacctcacatcagaaccatggtatattatattgtcctcccatagaattattttacctcacttttaaaaagtacatttttttctctcttactagatttttattgtaagcagtgaaaagtacttttaagaaggcagaatact

SEQ ID NO: 127585 - DNA, 1067 bp, Homo sapiens
ggtcctggcatttagttgagctttttagcagttgaatcttaaagtttttaaaatcgtttatgttgcaggtcttttgtccttccctcctcccccgcaaatatacccattagaaactgttaaattggccaggcatggtggctcttgcctgtaatcccaacactttgggaggccgaggcaggcgaatcacctgaggtcaggagttcaagatcagcctggccaacatagtgaaaccccggctgtactaaaaataaaaaagttagcctggtgtggtgatgcacgcctgttgtcccacctactcaggaggctgaggcaggataattgctggaacttgggaggcagaggttgcagtgaactgaattcacattattgcattccagcctgagtgacagagtgagactctgtctccaaaccaaaaaaaaaagagaaaagaaactgttaaaaattgaaaagatagccttgttttcatcttgcaaagaaaatcagtacagaaaactattaatagttttgccatattagaatgaaagctgctttcttggttttgacctttagttttttttgttttttgataatgccgtttttatttaaccagccttcatttttattattataattattataaaagtaatgcagttcacatgatcaataaagcaaaactcaaataacatagaatgctataaaatgaaaagtacttctgccaaagtagcaaactgacacaggctgctgattcccttccccagaatcaacccagagaaataaaattgagagcagctggattccagaaactccttaaataagactgaaggctcactctcccccagattacccttcagttaatttttaccctttcactatagaaactagcagcggtagcctagcccactagtgtcagaattcggtgggcaaacattatgtcagtgcagaaaccctgctggagttcagagttgatgaaaacatgtggactgaccatctgttctcaatagttcatttcttcttctcttctccctttgtccagggagactgccttctccttcctctttaaacccttgcctgaagggtttaaaggtaca

SEQ ID NO: 127586 - DNA, 2192 bp, Homo sapiens
tgtgttagaagttaagtatgtggacacataaagcagaataaaggtgtattgatcttttcaagagaaactagtaggggctggatgtggtggctcacctgtaacaccagcactttgggaagatgaggcaggaatattgcttaaggccaggagtttgagaccagcctgggcaacatagcaagaccccatctctacaaaaaataaaaaaattagctgagtgtggtggtgcatgcttgtagtcccagctacttgggaggctggggcaggaggatcctttgagcccaggagttctaggctgcagtgagtcatggttgtgcctcactgcacttcagcttgggcaacagagtgaaatgctgttctttaaaaaaagaaagaaaagaaaggaaggaaggaaggaaatactaatctatctaatgtgaatattttcatcttatttttttctttaatttgtagttccaatgacaggatttacacagagagcaactattgatccagaactgaatgaaatacacgtcttatctggactcagcaaagataaggaaaagagggaagaaaatgttagaaattcattctggatttatgacattgtgaggaatagttggtaaggaactcttgtctctgctgcaatcccaatgtaataattatttgaggttgttggtttattcaaaaaagagagaaatgagagtattacgttaatttgtgacattgtatatttaaaagtcagtattggaaaaaaatcaatatcggtacctatgtatacaatgatgttcagtgaatggattttacctctgtgtttttcaagtagtagatggttcctggcctgggactcaagagaattgtattttagtctaggttccgttctcaagtagatgtgtgaacttgagaacagtgctgtttctttaatgttcccagatcttagttttcataaaacgaagaggcttgactatagcaaggaggggacagtattacttagcatttccaaaccatgacttttgtgtcatagagcatcccacagaactggtgctgcacattttgctttgggaaaacatggatccagctctgacattctgtgattgctccataagtgaatattgtgcagaacagaagcacttcagagagcttctccattcataatggggaatagtgctctgcagctaaggaatttattattttctaaataggacatttatttacagtcaaatgacagcaatgtatactgtacatttttattgtgcatacatagacaagatagcatctctttcagtctttagtttgagctttcatgtatgctgtttgtatttcataacaaaaagtaggatatgtgagctatttactggacatcaaaagaactttagaactcagttctaacaaattccgattgttttatgaataactagaactttaagatacgatgtgaacgcatttctaaaattttttgttagtaattagacatgcagttaatttgcttgctacagttgtattatctttgctgctaattctctagaatgccttaaaagcaatgtcttgcaggtcttgtgtctataagaatgatcaagctgcaaaggataatccaactaaaagtcttcaggaagaagaaccatgtccaaggtttgcccatcagcttgtatacgatgagctacacaaggtatcctaactacattgacctgtaaactttccatggcctactatctgaaacaatccccaaatatatctttgattgttttaaattggatttgagtaaaaagttaaaatacatagtagacattcaatagaataacaaacacccaatatcacttctccctaaaattccttaagagaataagcatttttacgtagtctgtaattcttggtacttttccttttttgaaaatagtcagtggcagcttcttagctgtatagatctagatacatgacatagcctattgtttctacaatgtgactatccaagtaaaatatgtacagttgtcagcatttaggtaccttgttccgtgatataacatggtttttggttttagattttcctattgtgtgcgaagtctttttaatcttaattttcctgatatactagtgatacctcttttaaatcagccttgtgaaatggtcctctgttgtgaatttttagtgtcatagtgttgagagttctttctttatttctgtcttaaacttaaccatgtacttaagtgattggacttaga

SEQ ID NO: 127587 - DNA, 1122 bp, Homo sapiens
cctgcctcggcctcccaaagtgctgggattacaggcgtgagccaccgcgcctggcctaaaatttttttaaagtttctagttgacctgttgactgttaacttttagtgattcagcatttatgtcagaatttttaagatatttgttatatgatcaatattgtgattaattttatccccattatttgttgtcctcagcaaataatatcttggattaacttcttcctatcattgtttttgtttcataccttccactgtcattgtagttatggtaatataactcactttggcatatgtgcagttttttaaagtagccatggtgctttaaagcaaaatagaaatgagaaaaatcaagagaagcttttggtaaaaatgcagtataatttttaatttttttatttgaatgggctcaggaagttaacctgttatgcactgctactagaatatcttgggtatgcatgcatttttaaaaatctggcttattttgcttattataggttcattacttatttggtgggaatccaggaaaatcttgctctccaaagatgagattagatgacttctggtcactgaagttgtgtagaccttcaaaagattatttactgaggcattgcaagtacctcataagaaaacacaggtatgaaaataattcactgaaaacatttaattaacattatcagctatatttctcttggcaaatttaataatgagacagtgtaaatactatgaagatcatgaattttgtaaatgccctgttattccacttatttttgctttcgtttttcaaaagaagatacaaaatacagatattgatgctaaaaatttataaatacagaacaagtgaaattttgcagctgttaaaaaaatggaaaataatttctgtgaaggtgacatgcctacattgaagtaactaaaagctaactacaaattagatcagttctaacttaatgacacgtgcctgagcttttgataactctcttaactgtgaatgtagtgatatagttgactataccatatcttcctaatttgatgtgtcacaatacaatttcaaagcttgtagttttatgtcacctttattattaaattgcaaaatcatttaatcaaacattttcatatatatacatat

SEQ ID NO: 127588 - DNA, 1049 bp, Homo sapiens
aagtaatcagtgttaatgatattcatttaaaaataccctgcttatttcagtttccaaggtatctgttaagcatctccattagaaaatacacaaatctaagcaagtgtttttatttttatgtctacttgttttggatgaaacacattgggattttctgaagttctgttttataaaatacgtagtatattcactttgtttggtagttggtttagtgctaccttgtagttttaagagaagataggaaatgctcctacccagtctctagcaccacagctgcctgtgaccacctggcattaccattacatttccaagaactccacaactacactatctacctggcagtattgttaattctggattcctaaactgacattttctaaatatccagaacaactcctcatactcagtataacagtgtattttattccaggtctgaaagacatttctgatattttctcataactccagataattatccttgtgtacattttctaggtttgaagaaaaggcccaagtggatccccttagtgctctgaaatatttacaaaatgatctttatataactgtggatcattcagacccagaagagacaaaagaggtaaagaaaggtggtaataaatttcagaaattaagtatttttaaatgtcttcctaacttatatttaatgattttgctcttgagtgtgtaaaggaaaacgaagaaaatatgatgacatcagtaatctttaaaatgtcacagagcaggtgaaataaaaattgaataggcatgttttcgtgtgataagattcaagtcaccaaaaacccttggtccattcagaaaaggattatcaggtataaagttttaacttagttttgtgttttggaaagcaaatagaaatttttactttgtccatagtcccatgattattttacttaaggattacataatggttcaatataaacttttctgtggatagttaagatcccccaagagaggaaagaaaactcccctgttgcttagggagaaaatgaagagaggttggtgggagttagaatccttggtgccttaat

SEQ ID NO: 127589 - DNA, 1033 bp, Homo sapiens
agagcaagattccatctcaaaaaaaaaaaaaaaaaagaaaaaaaaacaccatgccctcaccctaaggttctcctctgtctgctcttaaagaacagaaaatagaaaacattcctgacattgagaattactggtccatagtattaatattttgttttaaaatttgtgaacatatttaacttttaaaatgttttatatccaacagtctgtttggggggaagaaatcctctggtaacagttcacatgtatactcacgatatttgtcagtgagacatgtagatctcattgtaggaaatcattccactcattgagaaggggcttactgttcttcattttctatagtaacttgtttttgttctgtttatatgttttacagacatttaatgttattaaatgactttctcatttaagtctcaaaacacaaaaagtgttttttagattttttttttcacagttgttatgatcatcatcattgtgcctgttgtcaggacattgacagctgactatcaactatataacaaaaaaatgttattggcttcctccagtcttcagaacatgggttctgaattggtgatgaacttacaataaatcttataaaaaatgatatttttttctagaaaagccatgagaaaaggatgcctaatcaattataccactttcagagaagacttctataatagagaaggaatgagaataagttttcagctacaataacacattttatattcattacacttctgcggagtttccagagtgctggtgtcattcatttaacagttgtgtatcgattccccataataggtcaggcattctaggcagaggagctgtatcagcaaacccaacaagatccctgcccaggaggtacttacattttagtggagaaagacaataaacattaaagaagcaaattatatagtacattagaattgaataagtactgggccgggcacagtggttcacgcctgtaatccccgcacttcaggaggctgaggtgggtggatcacctgaggtcaggagttcaagaccagcctggcca

SEQ ID NO: 127590 - DNA, 1408 bp, Homo sapiens
tgaaagaaacgactcaaaggttttggcctgaaaaactggaaggatggagttactatcaactgaagtgagaaagttctgtggggaactggtttgtggggactcctgactggcattcaggagtttaaatttggaaatgttcagtttgagatatctatgagacagccaacttaagatgttgaggtgactgttggatatttgaatccagagtttgggaaagaggtctgtaatatcccttggtatgtgttaaaatccttaggccagtacatacagttcacttatttaatcagattgttaagataatagttttctccttatcctatatgtagagccaatacaatttatttttcaccttaggagttagaaaagaggaacaaattcaaccccaaataagtaggaaataagaaattcatgaaataggaaacaaacaatggagaaattttaaaagtgaaaagttggccttttgaaaaggtaaataaattgataaaccccaagcaagacttaccaagtgtattagcctgttctcacactgttgtaaagaactacctgagactgggtaatttatgaagaaaagagatttaattgactcacaggcccacaggcttaacaggaagcatgactgggagtcctcagtaaacttacagtcatggcagaaggtgaagggcaagcaagcacctttttcacatgatggcaggagagagagtgacaatgaggggggaaatgccacacatgtttaaaccatcagatctcatgagaactcactatcacaagaacagcaagggggaaattggcccctgtgatccaatggtcccccaccaaacccctcccccaattcaacatgagatttgggcaaggatgcaaatccaaactatatcaccaagaaaaaaagtgaaaacataaattatccacatcacaaatgaaaagagggcatcagtttagaccctacatatattaaaagtaaagtgggtatggaaaacttcattgacaagccgcaacttgatgaaattgacaaatactttaaaagacacagtttaccaaaactgacacaagaagaaatagaaaatcttaaggaactccatatctactacagagattgaatttgtaataaaaaattttctaacaaaaaaaactctaggcccataatagcagtaaattttatcaaccattcaaagaaggaagaaaaaaatacaattttacatagactctcagaaattagaggaaggcaatacttcttaaatccttttataagccaggttaactttgatataaaatcccaacagaagctgggcgtggtggctcacgcttgtaatcacagcattttgggaggctgaggggtggatcgcctgagcccatgagtttgagaccagcttgggcaacatagcaaaaacctgtctctacaaaaacatgcaaa

SEQ ID NO: 127591 - DNA, 3326 bp, Homo sapiens
cccaactactcgggaggctgaggcagaattgcttgaacccaggagggggaggttgcagtgagccaagatcgtgccattgcactccagcctgggcgacagaggaagactccatctcaaaaaaaaaaaaaaaaaaaaataccaagactgtaataaagtgggtggtctctagaacccagacctttacttgggtgaattttcaagggcattttcatcaggataacttatgatagcttcattttttaccaagataatcgtcttgaagtatggaaattcccagctttcctctggtcagtgaatgcatattaatcccattgatgctggtgcagttattatttgccttagagttgagcaatagtattgaaattttccattgtatgtaatataaatactattttttatgtttggaataaaataacactttgggatatcaatttagtttcttcattatttgaccttttatctcttgaaagtgaactgtacctcaaagaaaaaagagtatatataattctggtgcttttcactgggatgaaaaaatagaggtgttcttgaggtcttgccctttatccatagcgagtgattgaggcttctcgactgatcaaggcaactccagtcctaagttctaactccagaatatgtaggattcctcaggactagactgagcagactgctataaacgtgactccagaaggttctcctaagaatttagataatgatttaccactattcatacactcgagttgaagaccttaggctactagaaatccccagtctgtgagctggagaacctaggtgtaaacattattttggaaagttcatgcccttctgaattctagcatttgaaacagatgtactgatacatgaattgggggtctggcatatattctgtttaaatgattatgtgccttatgtctgataccacagcccaggcccattattttatttattagtgcatagcactaaactatctctaactgacttatttttagcctttagaacaagaatttcttggcagcaatttaaatatatcaattagggtggtgtcagcaaatattttaccttcagcttaactcctttcttttgactctgacctattcactgccaactaatatattttgtcaggaatagtttgttttatttggattctaaacaaacctcagatatactgagaacaatacaaacacaaaaagagaaaaatacaagcaggggaaattcctgtgggatgttgtttcctgtcttgtctgaggggaggtattatatagcctagtgattaggaggttggaatgtgagatggtggttgagagtcaggatctcttttaaaagtgatcttgagcaagttatttaaactttctaattatcagtttctttatctgtaaaatggaggtaatgggaatacttacctcaaattgctgagagaattaaatgaaataattctgcaagatagttatcacagtaaagcagtaaatgctccattcagggtaccattactattgactgccttaaaaatttaatcttctagccaggtgcgataactcatgcttgtaatctcaacacttttggaggccgaggtgagatgatcatcttgagcccgagagttcaagattaaccagagtaacatagcaggatcttgtctctatttttttaaaaaagtcacctttgtaacactggtgaatttggataaggagcaaattcagattgtatgctaattttaataatgagaaatttgatttagtatttataaacaagaagtacttttcataaggtttcatgcctatttagagttcctggttcttgttcttattaattttctgtcagactgttctatctttgtgccaattagaatagaaataaaatgggttatttactgtacctttcattgtataaatgaatatttcattttctaaggtctgcaaaaaaaaaaaaaaaaaaacctcagccgaactttctgaatgacttcctccagaaataatccaatttatgttcatcccttagtgagaattaaataaaagtattaatattgtatgtaaaattttaaagaatcagaaagatggaaggtgacattatcttagttttggaaaaatgagtgatctcggagaaaatctccaaggatcttgattttagagcttctggtggctataggcacttttaaggttgaactcagtcactttgctaagtttaagagctatatcttatttctagaaagtatgaattggagcaattaaacttattttcagcagggtatgtgacaagtaggaaaaatctggtctgtaaagcatgttgcctatttatttatttattcattcattcattcagacaggatcttgctctgatacttaggctggagtgcagtggtgcagtcatggctcactgcagcctggacttcctgggctcaagcaatccttctgcctcagcctcccgagtagctgggactgctggcatgcacaaccatgctgagctaatttttttttccttttttacattttttgtagagatgagatctcactgtattgcccaggtttgtccttttttggtcctcacaactctttttagaagtttacagtccaaatataaagtttagtgttagaaataagaagtgtacatttaataatgtgtatgctaggaaaaaaatgagaattcatgttatttctcctttaccacaagtaggaaaatccagctacgtgtaggatgttaagttaaaagtatattcctagccaggcatggtggtgtgagatggaagaatctcttgagcccaggagtttgaatccagcctgggcaatgtagcaagactccatctctaaaaacaaaaaattactcctaataggtcactttctttttagagcagtcattgtcatcagtcatactactagtgatatgctgatagctaattaatatttattgagcacttactgtggggccaagtgctcttctaagcactttgcatgtcttaacgcatgattatccccacagtagccctatgaagtagctactgtatgatccccttttgtatatgaagaaactaggttacagagaggctaaactaacttgcccaggcatagtgctagtgaatggcaaaccaggattaaaaccctgtcagtatggcttcagagcgccttttctaaaccactaaatatgctacctctcactgagctttaccagtttccactgctcaaatggttacttcctctttccattttactttatttatgaaaataaagtaagataaacatagtgattaggagcatgaggtttagaatcaatatcatcacctttttgtcctagcagtgccatttaagtagttgtggtactgttgatgagtttcctagatcccc

SEQ ID NO: 127592 - DNA, 1685 bp, Homo sapiens
gttgaaaaagaagcaatttggaaatttcaaaaaaaaaaaaagcataaaataggaagactctaatctcaccgttcagagataacctttgttaatattttggagtatttctttccattcatttccatgatccgatagtgggctttgttaaactcaagctcatctcaagtaaacattctccctcaaacttaaaacaatatatttttaaaaaataaaaaggaatgtgctgttcttgaggtattgtttattttccttccaggaaactggtatccttggcaatgttatggtctattcctgttcttttacaagactaaaacaggttggacctaaaatggtactctaagttgaatgaaaagcagtctgatctgaagtcactttcactgaacaccatggcatatataactcttgatggctctgtttctgtttctcatggcatttagcagcgctctcatgtctcagctatttcagggataggggaaattatttattttattttatcacttaaatatctcatttgtatgtaagaaatctgaagcagctgagataaaccaattgatgaagacagcatctcactgaatattcctttagctggaatgaacttgataattgaatgtttattagaggttaagggaaaaatcctttagattaacagtccctaccttttaaaaatgtcatatgctttctaatgtgtatcaggataaaagtagttcattgccttattcctcacataatgtgtgcctagcatagggcctggtacatagtagcataaaggtatagtgttatgtgcagataccattctgcatattgtacatgtatctccctcagtcgtctctgttaccactcagttccctgagactacttccagctgtctcagagacattaatgattttagactaatttctaaagacctctttcattttgattttattatatttttgttactaaaaaacttttttagtggttcagaagcattaacaagtcagaaaagacaagtggaatttcctcagtggaccagcagagaaaagacctaataaggaaaaaaagagagatcagtattatttgtaactaaagtgccagtccttctgctagacgcttttcatgtaactacatttaatctgcacaataactgtatgaagtaaacaggattatcacatacttacagctgaggaagcaaagtctgaaagccagaaagtctgactaatttatctaagatcacaccacagccaggtagtagaactggggtcagatcagtagtgtctgcctggttttgaagcctgatttgatttctccattataaaatacattgctgctggtctcaactagtttttctgttacatgttttaaacacaatggatgtttctttgtatcttcttcaccaggcttttctgatgtggatcacacctatgctcaaagaactcagctctttgacaccttagtaaatttctttcctgacagcatgactcctcctaaaggcaacctggtagacctcatcacactgtaactgaagagtcactggacacagaaatggaaaacaggagtcgattttccgtcttttggattgcagctccactgactgacagtaaagctgcagtgattgaggactgcaccagagttctgaagggatcttaaccatcacaagtttttaccctcttccttcatgcctgacctcaaccccgctctcctcatcc

SEQ ID NO: 127593 - DNA, 1099 bp, Homo sapiens
atagcaattttaggagaaaatgactctttcgtccagaagagctctgcagaaccagggctcccgtttatcttgtgctatctctgtagtattttcatttgagagaggaggctgagtttccagagctttgctttcatttatttttatacacattgtctctctatatctgcttgtggatattgttattttgaagagaaatggtttgtggttgtccagtggtatacaactgacaggcatttcattaagcacatagaccagactttgtgaatggttcagatattttttcattaaaaaacaaggtatggcagatggacttttccatgggtcaaattttttgtgtgagagatagaggtacatgtcttctgatgatgtgctgtggaatgcaatgtgggaaacctacatctggctagtgcttacatttgctcaaaaagcatgttgtatgaagctgactgccaccatgctaaagcagattcatattaagaagtgtcggtcgatccagtggctcttaagagtgaatagctttatggaatcaagtatgtccctgagtagcaagattaggcctcaccaaagaagaaattaacctgcactttcaaaaagtaccatgtataggaatgaaacattgaggtcccactttattctgtctttagtacatggttttacttattttggggatggatagaaatatatttttgctagttctaggcttgaatcatgggctccttggctttcctagcatcccaaagcagtcaacagtgatttcttaagcaatttgatctgtacctttacttgtgaaaggtatgctatataattcagcaagtaccaacttgtgtagctgcagaataaccaagtggctatccagtcaagtaaatacagtttgcttacatacttcaacagtttcataaaacgattcccctgagtgacacaagaacataaaatgttaatatcactaatatagcctgttaaatcttttgtggagacaggtgcaaatcagaagattgacaaggaagaacttgagcttgctaaataagacttcctaaatttaaaagctctagttttgcttagtgtgaattctggcactttaaaaagattaagcaagtgaaat

SEQ ID NO: 127594 - DNA, 2531 bp, Homo sapiens
atgtttaaatggggttgaatcatagcgagccatttgctcttgccaaagtgagatagatgtactgaggagataattgaaaagtcagactctgtactgtggggctttaatcggagcactgctggaaatgattgcagagaatgtagtgcttcatatatccatgaccaagattgacatgttgctcacaacatgtcacaatttagtgaggagctacatgtatttccaagaattccagcatagattataatttaaataatcgaatttggtatttaggtacattgtttatatagccaagtgtatatgctttactacctaacaattattctagcctaggtgaatccctaattgaaacacctggctaacactttagacacataaattaagtgggatacagttttctcatttgtattatctccagcttcaacctcatttatcctttttcctagtataatacattgttttcaaccagaaattaaagtagatatccaacattattttcagtgcttgtacttcatgagaaataatctgattttcaagacacctcttaagtgcatttgcattttattttggtaatggcagagacctcatgtggccagtttgattgattgaagaatgtatcactcttattcaagcaaaggaattcagacttaaatgcctacctctgtgctgaagctgacagacagtattaactcttatcaaggccatcttttagacctgattttcatttatatgaaaacagacctgtccatgtctaataagtaaaaactgatagaatacattaaaaagtcactggtttatcatagaaaagtttgatgggtttagagctcagtgatttaagcttgtaaaactgcattcttgggcaaaatatttatattgtatataaatggttggcagcttattccagttgatctcttcacatctgccttaaaagtgctatgtagagatacattaacagagttataataaaacagtgttttaaaatctagcctataaacaaaaactagtttgaggcacccaagcatttagtgagagattgagaatgatgcttaatggatcaaaaaagcaattaggagtatgttcctgattttattctctaaattatactcaatttcatggtaattacatgaagaagttacctgcaattattcttaacactacatggaattcactgggtaattgtgggtcatttatttcctgaaagtcacgtgaaatccttagctggttgaatgttgcacagtatttgagaattacggtttgaagtgatttctgtgggagggaatcattgcaatgtatattctaaataaagtcatctaactattaaaaaaaaaacacccttcctaacccttcttttcttaaaattccacattcatccacaatctcatccctttgtagaaattcttgcctgaattctcaccaagttttgaattcctaaggtagccccgatctaggatgtgaaggctgcccagaaaaagtttatggctggaggagtatcatacagtgtctacatatgatagtacttacagattaggtctttggatgctttaacacaaaagatttttgttatccttattagtcaaataacgctattcttttgtggttctagaccctggcttctatctccctgtgatttgttttaatgctgaaatgacttggctatccaaagcttctagtctagaggtctgttggttgaaggcagacatttccaagtttgttgaaataatacgaagctgactagcttacgtgaatgatgttgccctcatttgttttgggtgaggactcattactgcagtatattgatctcttcaccaaatgctttttctttttctgaataaatgctgtattagaggttctatttatatatgatttttaaaactttggtttccttctatccaccaaatactgtgaattgtttttccatttatttttcttagctaatgtaactttattcttcacttttttttagccctagacttcctagattttctgtggcattctgtaggacattgtattgcttggaaaaaaaaagatcaaaatcattctggggcaaatgctctattatccttatttatgacaagagaataatgaaattcataagaaattaataacattcagatattgctataaatgtacttgagtcattttcatttggggatagtaataatggctgtggcagctttaatggagaaacctgtgttggcctctttttctggcattaggatctcttgtcatagaactattggtaaagtacaggtttgatagcagagttcctgaattcagcatatcatcagaatttccatttaccttttgtcttttctttttattgtattttttaacctttttgtttctattcctacctcccatgagtaacattgatttctgctgaagttagaatttgtgttaagaattgactttaaacttctgaaatagttgaatattagaagtggcttcagttgccatgaaatgattgcttttctttttctttttttttccttaaataaaaataatgcagccttatatatgtctcttcccctcaa

SEQ ID NO: 127595 - DNA, 1443 bp, Homo sapiens
ttgttttttagccaggtgtggtggtatgtgcctgtagtcccagctacttgggaggctgaggtgggaggatcacttgaacccaggagtttggggtgcagtgagctatgattgcgacactgcactccagcctgggcaacagagcaagaccctgtctcaaaaaaaaaaaaaaaaaaagaatgtgaatttagctccaattccaaatgactaactcttaggccagtcatagccaatgaaatcatctgacggtagcttctgtagcccttaacctaaggagtcattagaggttatagtaaattagtttctctagtggtgcagagagaaatgccatcggggaaattatcactgtctttttggctaaagttttatattgtgaactggatcccacttaacagcttaaaaacacaaaaatgaaagggtagtcctagtttatcttcttaattagaatcattatttggaaataagatttgcaatgtgctgtctatccccaaacactgctgagcttgctggaaaacagaatttaacatgaatgttgtctgaaagctgtaggatcaatggcaaaaaaggggaaatgtttggtagggaattggaccagttctaaggtatcacttttaattataaaataatgtcttcctttttatctgcttttcagacagcctcagtgaactattaaacatttgtgtgcaaagtcctattttgcttatctaaggcattttgacttggaagtattaaacttcaggaacgagctagagaagacaatgagggtatgttagagaaggaaaaataggagctttttgcttatggattttagaggtccacaaatcgaaaggaaaaataaatttcttcatttctaaccctaaaataattttgttaatgagatgctgggaagaagactaccaaaaggcctcaaagctcatgcttctagaatattcagtaattctgaatagtctttgggaagtagcatttcttgggaagtagcatttcccttcttccaaataactgtttgagatcttaaaacagaaaatccagtgttaatgggctctagatcttaaactaggtgagcagcttcttacatacaaccagttccttgttaaggatccagcaggaaaaccagccataaaacatttcaacatgcagtttgggggctcccttgcttattcactgagtttaagctcttgctgcaacatagctctgtaccatctgggatgctagcagtcacagcagttagctcagatatctgagctgtctgccacacaaagcctgaggagatcatcattcttcagtttcattcattacttaatgaatgccaaattaattggcaggaagaagaaacactgtgtgatatactgaacaagcctgtgtgcatgaataaggagccactcaaaaagccaattttgagctttatttctccgttgttaacaaatctcaagaaagcctttgttacag

SEQ ID NO: 127596 - DNA, 1697 bp, Homo sapiens
acaaatcatccgttcagaaaaataaaagtggacttcctttcctaagcattacaattagcctgggcaagaggtgttatgattgtcttattctttaagccggcttactttttggatttgtgtgaaatgtcttttgaaaagaaagtagatagtatagtattaattaactactttgtatagtcttctgcataatttagagttgaaaataatgtaacattttcctgtgaacagattcctttatgcgtacatactttataaatatacatacatacacatacacatacatttttaaaatgctctttttaaagagattcttatcttgctcccactccaaaagctatgtacagttgagttattagcctcagaggaagagtacaggaaagcgaagatgaggacctccttttcttgtgttggtcttgggaacaaacagtattccgtctttcaaatatggcatatttctaaacagtttgggaaagatgttagaattttttaaaagtcagctcttttataaattggaagtactcagtagtcagaaattaagatcccctctgatagagatagattctcaaaaccaaaattggactgaaaattagattgagaagaaagatacaacttcctccatagccaataaaatctgtctttccaagtctgcttattaatgctgtgaatcgctccttctgtttgtgaaaacatctcctggactggaaatgtggtgctgtaaccagctgagccgaaagttggagaatgttaaatatcttatatgggacttacgataaaatgtattgatgttagtgattgtcaaaataggtttatcatttaaaaaactaggaaattactaagtataaagaagaaaaaccagtattaattaagtgatgagacctgttcattttgttttccctgacttatttccattaccaaacatagtaaaggccagaaaagattaaaaaaaaaattaacacagccattccattgttttttaccacatggagaaaggaccaggctggaagcatatgtccccccacccttatttatattcctttgagcattgccgttttctagacagacaatccgaaaataattgtgttgataggtctgtttaagcctgaactctgggtgtaaaatgttatccagaagctatagggagctgccttgctcaggtcattggaaatttcaaccctaagactcattggaatttctaagtccgttatgcaccattatgggcatatggagcatattcataccatgaggaggagtctttgtttatgatggactttttaatatggccataattaaactcacactcaaaaaggatgagctattgtcaaaagccaaaagaaaaacagacaaaatgaacatgaagcaaggagtccataaaacaagagttctttaccacgtttaagcaaatgtctctcaaaaaaaattgtatttctgtgcacattagctgagattcacacattttgcacctcagtagtatttcagatgagactcaatgtgtggagaaaaccgctaacttgtttggttctactcttaccccctcttctgtggcaatgtggggtcagggccgtatcctaaagtatccacatggtcttaaatggaaatcatgggactctggaaagctggcatgagctggttggagcttttaaacagaagtgctttatgggtatcagatctcttctgacatcaattgtttcaaatcattg

SEQ ID NO: 127597 - DNA, 1383 bp, Homo sapiens
agctagcagaaagtttatttaaaccacttcttgagctttatcttttttgacaatatactggagaaactttgaagaacaagttcaaactgatacatatacacatatttttttgataatgtaaatacagtgaccatgttaacctaccctgcactgctttaagtgaacatactttgaaaaagcattatgttagctgagtgatggccaagttttttctctggacaggaatgtaaatgtcttactggaaatgacaagtttttgcttgatttttttttttaaacaaaaaatgaaatataacaagacaaacttatgataaagtatttgtcttgtagatcaggtgttttgttttgtttttttaattttaaaatgcaaccctgccccctccccagcaaagtcacagctccatttcagtaaaggttggagtcaatatgctctggttggcaggcaaccctgtagtcatggagaaaggtatttcaagatctagtccaatctttttctagagaaaaagataatctgaagctcacaaagatgaagtgacttcctcaaaatcacatggttcaggacagaaacaagattaaaacctggatccacagactgtgcgcctcagaaggaataatcggtaaattaagaattgctactcgaaggtgccagaatgacacaaaggacagaattcctttcccagttgttaccctagcaaggctagggagggcatgaacacaaacataagaactggtcttctacactttctctgaatcatttaggtttaagatgtaagtgaacaattctttctttctgccaagaaacaaagttttggatgagcttttatatatggaacttactccaacaggactgagggaccaaggaaacatgatgggggaggcagagagggcaagagtaaaactgtagcatagcttttgtcacggtcactagctgatccctcaggtctgctgcaaacacagcatggaggacacagatgactctttggtgttggtctttttgtctgcagtgaatgttcaacagtttgcccaggaactgggggatcatatatgtcttagtggacaggggtctgaagtacactggaatttactgagaaacttgtttgtaaaaactatagttaataattattgcattttcttacaaaaatatattttggaaaattgtatactgtcaattaaagtgtttttgtgtaaactggttcaagctctagtagtttcctcggacttcttaaagccttcacttgtgtatgaggctcatcgccaaagtgcctgagaatgtcggctcacacccgtagcacaggagcctccgtgctgagttacacttgtccaactctgcaggcaaagaaattaggcaagagaaggagagaaaccggaagaaaaaaaaaggggg

SEQ ID NO: 127598 - DNA, 1230 bp, Homo sapiens
gcgatgtgtcttcagagacaatccattaaagcagccaggaaggacaggctttcccctgtatatcataggaaactcagggacatttcaagttgctgagagttttgttatagttgttttctaacccagccctccactgccaaaggccaaaagctcagacagttggcagacgtccagttagctcatctcactcactctgattctcctgtgccacaggaaaagagggcctggaaagcgcagtgcatgctgggtgcatgaagggcagcctgggggacagactgttgtgggaacgtcccactgtcctggcctggagctaggccttgctgttcctcttctctgtgagcctagtggggctgctgcggttctcttgcagtttctggtggcatctcaggggaacacaaagctatgtctattccccaatataggacttttatgggctcggcagttagctgccatgtagaaggctcctaagcagtgggcatggtgaggtttcatctgattgagaagggggaatcctgtgtggaatgttgaactttcgccatggtctccatcgttctgggcgtaaattccctgggatcaagtaggaaaatgggcagaactgcttaggggaatgaaattgccatttttcgggtgaaacgccacacctccagggtcttaagagtcaggctccggctgtagtagctctgatgaaataggctatccactcgggatggcttactttttaaaagggtagggggaggggctggggaagatctgtcctgcaccatctgcctaattccttcctcacagtctgtagccatctgatatcctaggggaaaaggaaggccaggggttcacatagggccccagcgagtttcccaggagttagagggatgcgaggctaacaagttccaaaaacatctgccccgatgctctagtgtttggaggtgggcaggatggagaacagtgcctgtttgggggaaaacaggaaatcttgttaggcttgagtgaggtgtttgcttccttcttgcccagcgctgggttctctccacccagtaggttttctgttgtggtcccgtgggagaggccagactggattattcctcctttgctgatcctgggtcacacttcaccagccagggcttttgacggagacagcaaataggcctctgcaaatcaatcaaaggctgcaaccctatggcctcttggagacagatgatgactggcaaggactagagagcaggagtgcctggc

SEQ ID NO: 127599 - DNA, 1017 bp, Homo sapiens
taatcctggcttcgaatccctgccctgccattgttggcacaggaactcgggcaaatcactgagcccctcggagcctcagtttccttgtttatgaaatagggatgatgccgattccttccccagaggattgtgaggattcagtaggaaagtacctttgaggcacccagtcccttgcacaaagttaagtgctcagtgaacgtttgctgcggctgctgtgactttgccgggttattccactggcttgtcataggagtccacttcttccgtctctgtgggaggtaagaccaaagaacctgggaaaactattagagcaagaaaagattgtcctcttctcgcaagggtgcactcatcttttctcattaccctcgttttcccaatgacagcgtcatcggttatctcgcaaagaactcaacagacctccagtcagatgccagccagctctacggccccttcctcccaggagacagtgcagcccacgagcccggcaacggcattgagaacacctaccctgccagagaccatgagctccagccccacagcagcatcaactacccaccgataccccaaaacaccttctcccactgtggctcatgagagtaactgggtaactccagcaggggtggggcaagtaggagaacccagactcgggtagaagaggctttaagacaaggttttctgttctttcctccaacgcagggcccctggctggggctttgagcagcacttacccattccctcctccctctccctggttagcctggtcctggcttgagctgccctcaagccacgcagccaggacatacctggctctggaatgggtccagccatgcctccagcttgccgtgaactctttcctatctgggtcaccccttagttggggggaaatgtcaaagattccatgactattagcccaaaccttaatctcagtggcttcttccaggcaaagtgtgaggatcttgagacacagacacagagtgagaagcagctcgtcctgaacctcacaggaaacaccctctg

SEQ ID NO: 127600 - DNA, 1036 bp, Homo sapiens
cctcagtgcggggaggcagggttagttggagaccgcagttttagatgaaggtggccagggtgggcttagctaagaagccactgagatggcgccccctgccttcctattcctgcctggtgctcctcagctcacccctagggggcactgcccttcactttggggctttgagtcaaaacagactttttttttttttttttttttttttttgagacagggcctcactgtgttgcccaggctggagtgcagtggcacgatctcgactcactgcaacctccgcctcaggagttcaagcgatcctctcacctcggcttcccccatagttgggattacaggcacctgcccccaagcccagctgattttgggatttttagtagagatggggtttccccatgttggccaggctggtcttgaattcccggcctcaagtgatccgcccgcctcagcctcccaaagtgctggaattacagacgtgagccacagcgcccggcccaaaacaggctttctgaagccacctgcaccccgatcctggcagccccctaggtggttagcccataacgtggttaaatgcagtcttccacctcttggctctctttctacctggataaatggcgcttgtgattgggtaatcagctcctggacacgcccactgtacactccctcctagccctgggatcccagtctccctttcactttcctttctcagatcatccaaccctgagcctaccccctctcttgcaccaaattcctcttgatgccatcgagccaggcagtgaagcaggcagtgacacgatgttgatctttctatggccagctctccattttccttctcaggaaagggagggcatgggggaggtgcatggagctacagtccaacaactagagaaaggaatatttcctcacaaggccgaaaagtgggaggaagataggaagggaaggtaggaagtactcacagatctgccttgggggcattgctctgtgcctcagtttacccacatggtaagtctgggctagcaccatatgaggttttttattttac

SEQ ID NO: 127601 - DNA, 1059 bp, Homo sapiens
gcatcccaagctcttgcattgtctctgagtcctggccctgccctgaatcgctggagcagcagcaagcacagaccctcagctaagagggtcccccagctaaggttggcccctgggccacctccaaccatccccacccccttccccgacatatatcaccaccaccctctcttcttttgtagccttattccccttgggaataagccacctcacacttccgaggaccagggtgtagggtggcacctcgtccaccaattgtcatggccagaaggctatgtatgtgcctccactcagggggaagagaattctaaggagcggctgagagaggcttgctatctggccctggattggggtgcagggacctcccagagccaggcccctagggatgtgtggactgacctggggtctacgctgtctgatttcttaaccttccagctacctgaccctgatcagagtagaagggacggcagttaagcaagccggtgaggagggcactctgtaatttttgaacatactggctgtgtgtgaggctgaagccacagctccttcttacctgaaattcatggagctctgcctgaggactgagtccctttggtctccatccagccaggttcccatgccaacctactcccaacacactgattggaaccacagagccctccagctggggtagcctgcctttgcatgacctttatctcacagaccattccagagaggagaaactgaggcacagatgcaaggacttgcagtagatcatacaaccagctcttctcccaatatgtacgtggttcactccctcacttccttcagctctccccatgaatgccactttctcaaagaggcctaccggggctgctctgcttagaaacccctcccccccagcacactcttttcctcctactcgcctttattttctccatagcactcgtcacctgatatgtgttcattggtttgtttgtttgtctgtctcttccccgttagactgtaagttccatgagggcagggacttccattgtgctgtagccacagcacctagaatagcacttagctcaaagtagctgt

SEQ ID NO: 127602 - DNA, 1092 bp, Homo sapiens
gggagaggatgatgatcatgatggtgatgatgatttgcatgtattgaggccagaaaaggcttgtggggggcatgttgcggcaagattggtctgttcagtagctatggtgcattctacaccaccctctagggactcagtaaggccagctccatccctgtccttctgaaggtgtggtcgcctgggctgctgtcatcgggaatagcataaacactgccccccatctgctggaatcctgtgatttgattcaaagcaagaaagatttatagctcgagtctctgcaacaaaggaattatccccagacaggtccatccctgcccctctcccccagcttaccttccaatatatgggcagattatgcagcctacagcaaagaaagcattcaccttaagggttggacaattcatcagaccccctttcagtgctttttggtttgataaccatctggcagaaccacaatggtaagtcacatctccgtgcctccgtttcgttatttgtgagatagaataaaagaaccaaagggacctctagttccaccatgataagatatctggggttccgtgttccctcagctactgaaaggacaagctgattcagtactctcaatctgatgttcaatggatgaattctgggcaacagaaaggcagcttggtggggtggaaacactcagactttgggtcagagagatgtgcatgaccatggacaaaatagtggacctccctgaacctcagtttcttcatctataaagtaataacagccctaccttgtgggttgctatgaagatgagcgagtatatatatcatgggcttggctttacgcccaactcaggatcaacactcaaaaaatagctatgatgattagtaagcatatatattgagcacctggtgggtttaagggaccccaggcattgggatcctgccaatgtttgtgggtatcagtggatatatgataataaaaactgaagccccagtgccactctgtgggagagggaggcatatggaaaagagtataagatttggaaggggtggtctggaggtctggagaaagcttcctgaaggaggtggggttttcacatagggattttaaaattaaaag

SEQ ID NO: 127603 - DNA, 1024 bp, Homo sapiens
caagaggaggaaactaaagcccacctggcaaggtgagggctcggctccgggttccccagccacagagggcttaagcctggccctgccttaagctcctgggagcaggggctctttcctcaacctttcagctgctgcctgggatctgaagaacttgccccaggaaagccgagtgggtggggttcccccctggtggggtgggggtgatttgtgcaacacacgaaggtagggacacagaggtcgaacaggggccagcaattgggatgcctggcagatccagatctactggctgcccctcgcgtggtctcgttcctctcttccttcatctgtgtgcccatggggtgtgttctgtgttgccttctcctcttgcctcctgtctcctttgcctcctcttctctctccctcctctgttgagcactaatgctggcaaggagcctgcccttgcctcctgatccattttggttcccagtcagttttgttctgcagtcaccagcatggactgcgggagcactgtgaggagtgaggcacccggagatgaggcttccacctggcagatactggtatctatggggagagacatccatccaacagatgctcatgtgacagtaggcacatgccagactctgggctaagcatggcctgcccccggctcaccctgtagtggggagatggacacgtgtacaattaaatcaggtattaaagagaagggggtgagtgctccaggggtgatgatcctttgtaggaacagctcagctctcttccttccctcttctctccctccccttcatcctccgtctctccttttctccctccctccccttcatcctccctctctccttttctccctccctccctctctcctttctttccttcctctcgtcctccctctctactttctttccttccttccctcattctttccatagtctcaaatatgtccattgagctctgaaccttaattgccagcttcttgccagacacttccacctggatgtcccacggacatccccaggcagcatggcccggc

SEQ ID NO: 127604 - DNA, 1074 bp, Homo sapiens
gtctactttagacatccactctgtgtgggggtgggagagccatgaaggaatctgccaattgccttctctttggaaagttcctcccacctcaactctcaactttgtataaacttgaaaaatagaattggaaggacagagaaaaatgaagtttaggaggaaaccaaaagttcttctctggaatcacatggccaaggtcttggcttcataatctaagtacaggtacccttcctcaccagggaggaactcaagaagagggtggcaggctgtgggttcagcagggtttctatcagggagctggaatagagggtgccagctccatcacccctgctctgcccttccttcccaacaagggcaacttgagctaatgagcagaatggaagctgggagactgggtgctggtgtggggtatgaggagtgggggacaggaaggaagaatacaattttaaccattattcagtaagacacattccccatgctggcatcactcctccaaattggcagtaattggtgccctcccaccattcctgccaattgagcagcagggaggaaagatggcatggggagaggagctgcctctcctctagagcgtggattctagatccaaactgggcaagcatgggagggcagtgaggatggcgcgtggcgaggaggctctggtggggacctgaggacacccaaaggggtccagtctctttcccctaaggagtccctaaggtgcctccttaggactttgtcttatggagactttctgagaaaggccaggaaacagtcttgtttgtctgagaggcagcatcattcagaggtaagcaggtagttaaaaacttgagcccctggttgatattgcatctggctgggaccctggacctagtcttcttggagcagggttgctacttggaggtagcatggctgattatcaatatgggatgctgccattgagaaggggaaggcatggagagaccaaccctcttgccagaggaggaactgtgtgggttaagagaagagtccacagatccttccgggtgcaaatgccagaagcatgaagggggccacctcagtagaagacgctctggtcga

SEQ ID NO: 127605 - DNA, 1021 bp, Homo sapiens
tccacttcccaggttcaattgactctccttcctcagcctcccaagtagctgggattataggcaggcaccatcacgtccggctaattttttgtattttttagtagaggtggggtttctccttgttgatcaggctggttttgaactcccaacctcaggtgatccgcccgcctcggccacccaaagtgctgggattacaggcgtgagccaccgcaccaggtccagaccatagattttagcaacaaggctgtactgctccactgtggcctcaccacatatggctacatctccttggagttcattacaatggactttgaccttcttctacactgcacaaagccttgtataactttctaggtggtacctttaagagtctagaatctagcagcagtctgttttcaacagctgtgaataaaggtgagcatcactctgtcacttgatgagtgttgaattagttaaaaaaaaaggcaacagggaaaaaaggagattcgacatgggtcatttttttgttaacagcaaatgatctattgagtcagtactcttgatggtaaggtgaaaaatacaaaaattatgtatccttctgaagtacctgctctcagtaactcactttcatgccaagagcaatgaaacaataaaagagctgatgtcttgtgttatgagaagtgctttgttgctgttttctccaaatttatgtaactagctttcattaagttctggctgttatttaacgcgtaaaatatgtggagagctaaaatgaagctgagaggcctgtgatgctttttcactcttgcaacgtagctctagctgagagtctggagttcttcgctttatgtcatttcctgttaaaacctccatgttttcttccctgggaactttgcctactccaaatctagctctcagacgttctctgtgcagccgaggtctttggatagtgagccctggatcggtgaggagcatgtggagtcagtgttatctgcagggtccttcctccatgggactggagcctgggctggaggggatgtgg

SEQ ID NO: 127606 - DNA, 1007 bp, Homo sapiens
cccagaaggaaggagaagttcacaaatgtagcagccttcttcagcatccctctagctgcagaaaaacaaggaggcctttggctgtgggttgtatttcttccgcatttccacgtctcactcatggctttctgccaagaaagtctagccacaaaagacctgggagaggggctcactgaaggggcatgactgttgccaaggagaccgaaggacagtgaggggagacacaggctcctctgtccaccgttaaaccttcataggagaaggaaagatggagagaaagtgcaggcagtggaccactccaccctccatccagggaggccacagacaggtcccttcatggagactttcccataccaaattgccacccaattcacctcagtggcctgtccccaaagtggtattcatgctgtatctagactcaattcagcttgtggaatgtattttaaaggtagagaaaccaaagcctggcagtgatttgaccgtagtgagtcagtgactgctgtgcttctctcaatggcggcttttcagagaccacagagcaggggggaagggcttggcaagcaggtgcccctatgctaggagaccagcctcaatagtgagccagaggtctggctaggccacctgtacattcccaaactctggcggcactttctgtgttggagaaagctgctggaacccacgctgcagggagctacctcagggggtcacttttcctattttagctccatgagactgagtgcccctggctccttgcccagtccctatatagcacccatgaggtccctgggggttgtggccttcctgccctcttcctaacctaaggtctctggtggatttccagcctctaagaagcacaacttgagagtagaaggatcctgggtcctatagctttcaagtaatatctgggggtgttgtgataaaacagtgctgtccagtagaactctctgtgatgacagaaatattccctgtctacgctgtccaatacatagccactagccacatgtggc

SEQ ID NO: 127607 - DNA, 1056 bp, Homo sapiens
tcctcctccccaccacaacccccagaactaaggaggggcaaacatgacttttgttgatgaggaaacagaaattcaagtaagggaacatcatgcagaaaatgagagggttaggcctgataggaccacgatgatcatgataataataacaacaataattttgtgcactactatgctgcttactgggtgaaggaatttacttgcattggggtaggttttacatctgcaatttctggatgaggtcagtgaggctgagggggtcagtagctgtcctaggcacaaggagaatgccaccttatagttgttcaccagttcttcccaaagcctatgcttgtgatctgacatggaaagcaactcaaggctgtctccacggacattctaaaatcagagagaagcttcctttccctgccgcctccaaggccccatgcgaggaccctccggctggtgctgtccaaggacctcttccctggtccctcctgccttcctcgagcagtattcccctcacccccatcctgctccagcctcagccagtaaccttggtggattttcactgaatatgttgcctccaccaccaacagcatttttatttgcacttccttggggatgccttgcctggaggaaggagtctgtgggattgtccagaggtaagagggaaacactgcgcagtgggagtcccagcaggggcgaggagcaggggagatggccggaggctctgtctccaccctcctcttaccactgcccatttccaggaaaagacaacccagccagagcagggcagtggcacgacggcttgctagtgctgtagcatacctggtacctcagtgaattttccgggacatgagaggcccatgtaataaataggtcaggaaactgagccacagagaggacacgggacttagcacaggggaaaagagtggttgaaatggaaccagattccaggaggcctcattcccagtcctgtactcttcctgcggagacaccatgctttgaaccaggctcgaagttgccaaagtgaacattttaaaacttttcccagggctcaagagatggccgagtaaa

SEQ ID NO: 127608 - DNA, 1042 bp, Homo sapiens
tatgtgtcagcttggtaaggctgcaatgttagacactaaccatggtgtttcatagatggggttagcatctactgtcagctcacttcaactgatggagattgccctctatcatgtggcggggcctgatccaattgattgaaggctttaagagcaaaaactaaagtttttccaggaaagaagaaattctccctcaagactgcagcatgaattcctgcctgagtttccagcctgccctgcagatttcatacttgccaactctaaaatcacatagaccaatttctcaaaacaaatgaaaagtaaatatttttacacacacacacacacacacacacacacacacacacacactcctgctggttctgtttctctggggaaccctggctgatacagacaaacccctgagcataacatttttattctccttagcaactctgacccaggaatggcaggtgtgatgacattggtggtggaggtggggggaaggttgaggctgacatgcaaacacacatgcacacacatacattttttgagcctgtgtcatgtggacattatctgctgcacgtagtaaagagggagggtctgctgggaagagcactggactggggagccaaaggccagagctcaggtcttgattcatgacatttactgttcttctgtagaactggggggaattccaagaatgatcagggaaaccaaataaaatataaaagttacagcattttgtaaagcactatgcaaatgtcatttggtatctcttaattttttaaaatgcagattcattccacaaatgatctaagttaattatttttgagagagaatctgaccaataggtggaaatggacttggctatcttccctctgagtgacagttcagcactgtaaaatgagaagagaaaaaactgggggccatttgtctgaaccaaaggaaactgtcaacagactttaaaagagttttatcaaggatgtaaatatgaggttattgaacttgctagaaggtggtattggggaaggaaagattcccactggaaggggctttgacaggt

SEQ ID NO: 127609 - DNA, 1042 bp, Homo sapiens
agcttagacagctgagaaccgtccttccagggccgccctggagggggacacaccaagccgtgcctcagtctagattatcatctttaccaagtgcaagttccgactggcatcagcagcatcccctgagcagcgctgtttctctctctttctctctgcctctttccgtttctccctccttcctggatctcttctcttccagttgctctgccaacacgattggaccaagccactgaccctcagttagtccaagaatggccaggcccatggcaagggagctgaccagaagatgtcagagaggcctctgtctcccaggtgctcctgaccctgtgcatgtcagcagcagggtgcaaataacgaatgaggagccagggacaggggacatttctgtgctgctacttcaccttccactttggcagcccctgctttggtctgagccttggcctagggaagaggcaaggaaggacttcagtattatctttactgggaagacatcacctggctctcccttcccacagttccatctccagtggttcagccagtggtctgatcgctttgcagctgtgagaagaaaggctacacctcctgcatgtggctggagcagggcatgtgtgggcagctgggaggtgctccttgaggctccttctcccccactgggctggtgtccagaggcttcctgtccttttccaggtctccagagggacctgcctgccctgcctgctcccccgccagtagaaagccaggcaggagaaagaatagcaattacattccaccatggagatgctcctgaccttttcatctgaatcctagtagcagaaatgtaacacagggggagaaaaggaaagagagttgcatctaccctggaagcagaatttgttttccatttaccctcaaattcaaatgagtcacaatcatagtcataggtctagtccactaccagagccctgagtgctgtcaagagaaagcatctatctccaccctcctttgtcaaccttcatcaagggtcaacgtgaaatgcagagtgcatctaggagattctacctcc

SEQ ID NO: 127610 - DNA, 1043 bp, Homo sapiens
gggtttgatcttggaaagggacttctgccagatgccagtatcccccatcccttgtgtaaatatcttcttttttaattttttttttctttttttttttttttgaggcagagtctcactctgttgcccagactggagtacagtggtgcaatcttggctcactgcaacctccacctcccggattcaaacgattctccctcctcagccacctgagtagctgggattacaggtgcccagcaccatgcctggctaatttttgtagttttagtagagatgggatttcgccatgttggccaggttggtctcgaactcctgacctcaggtgatctacccacctcagcctccctaagtgctgggattataggcgtgagccaccatgcctggcctcgtgtaaatatcttctgagggaaaacatatagtggcccagggagtcttagtcagctcccttctccttaagccagcttgcagtggtcagaggattgctggcctctcacctgtgcctagaaacatctttgagatagagaaacaagaggcagaattcttgcttggggttgtgctttcaggtttattaaaacacacccttgtctacagcgtgatattttaagcccagcttaatttataataacaacaataacaatcacagaagcttcttattttatagccaagatgaatctgtttgtaactcattatattcacagaacctttattggactaagcatattactatggttagtgaattctcttgttattatcagcattgttattcatacctttatccaactttattttttttatctagttgcctttttctttactttttagtaatgtcttacaggctttatttttatttataatcataaattccctaacagcaggaaatgctttttctgatgttgtgggaaggaagaatagtaagagacagagctggcttaggtggtctccttgaagccagattgatgccagaggaaaatccatgatggattgcttggttaatgtcaccccctgcctcccttgatgccagtgcttagaccattaagatcatttta

SEQ ID NO: 127611 - DNA, 1047 bp, Homo sapiens
caagatgacatggaagatgtgtaagcactggccatgtgggcctggaaagcccgatcagtctctgccccaccaggtttctttcctactctggccttgcccaagcctctactagtaggactcaaaatcccagctaaagtgtctgtcttggaaaaaggcacatagatgaaatggggacatcagcctcagaggccttactaacatgagcttgggttatccaggatgagaatgcagagggcggggacagcctcgcctttcttggtcttctcacacacagacttgtgcacattgtccatcagacctctctgacaccttgaaaagaacacacagagagcttgtcccacagcagacagggtagttgtaactgactctgggtggcttacccctcacatacattttccctgcagaaagctggaatgcttttctggctttaagagtgaatttgttggagttgatagtgaaattgctagataaaaattatatgctctctgttggtgcaagtgcctcacactgattcattttgctagtcatgacttttctgttttcttgggggcaaagctggcaaaacaggagtttggtagagctagaaactgttgttagcattcgagggttcaacaagtggtgactctttggcaatcgtgaaagaatagcccagaacctacaccagctcctgggacccacagatactctgggtgtgttcctctctgcagacatctgatggatgcgttctgatacccaccagtagcttctaattaccagctgctcaccctttccttccctccagcctttgctggtgtaggcctggcatctcccaacagctagcctttgacaccctgcttgttttgtgaaggagcctgtcgtgtggtattaaggcaaggtggatcagcccctcagaactgagagccagaccctggatagaattgcatgtgacaggaaagatgaatttatcaacatcagcggctcctaatgaacacaatctcccagtgctaatgggaaccttaaggagttaggcatggatgaaggccacggaggctttcaaatgcagatgcc

SEQ ID NO: 127612 - DNA, 1060 bp, Homo sapiens
gttcatttttagtagtgtggaaaaggacacggccttcctcaggaacaccagtggcccaggcactgaatcctgtcttttggcttgtggctttgattgtgcaaacacagtagagaatccagaggataaacaggaggctgtgaagcagtcgccacacccacaggaccaggggtgaggaaacttcctcaacaaggaggcctgggggctcagcaggcagtcccaggtgctccgttcatctggagagagggcagtgctcgatgatggacaagagatgcttagattttgaatcagtagctgccgagaactctgtgtggccatggagaatccatatcttctgcctttggcctctgtggggaggcacccagcatcttaggaaggggtcgtttccttagtgtttggggctggcagaaaagaggtggtgcagagggaactactgagctttgaacaccgtgtaggcaccaggattgttctagatgttttcacatgttacttacattgattgtcacatgtaatcctcaatgtttttttttgggggtggggtaaatgttacaccttccattttacccaggagaaaaggggttgggtaactccccagaggtcacacggtctaatccgaggttgtcctgggacccgtatcgagtaatatcacagactctacctaaggcctggctcctgggctgtagggtaggtcacctccctgatggagggaggaggtggtggctggacctctggtacctaccctggagcctgttgctcagaaccctcctttcattccctctgttctgtctctgccctgtctcaggccctgatgtccatgctagggcggttgaaactgattttcccctctttaatccatcttcctgggatggattaaagaggggagcactttagggacaggaaaatcagtttggatggatcctagatggcagattcagcttcctaaagcagttctaatcctctcacccttgtcaccaagaaaaacaaaactggacttgtctcatccacccttctgcagccccttgcctgtagctttgcttgcatggaagtggacctgacatgctga

SEQ ID NO: 127613 - DNA, 1033 bp, Homo sapiens
cttcaaaactcttgcagtgatttggattaggtgaggcctctatactcttcaaaggctttcccatgcagaaagactttacttacctacctctctgccccccactccctggcagatagtctctctcctgggaggaggcttatcaggcaggcagtggtcactgtccctttgttgagaggccagtctgcttcgaacataagcttgccttcaaagtaaattacatttatatatcatggctttgaaatgcaaacatggaagccggaggtcagtggtcagttgcagggtaccactctgcttagctgtgtgcctttcttcccagacttgccccagcacagagcagcctgccaggtctggagtccaagtggctcatacttggggagcctcctgcggactccccttccctgtcaggtctgccctcctcactgcccacagcacagattgaaagcctctgttcattctctctctctgcccctccttgcaaatatataaaatcgaagtcgagggcccgatgacttgggccaactgcctattatctgctgcctgtgcagtccaagggatgagggtaaaaccattttcttcacttcatagccacaagccgtgtttctcagtcagcatcaaaccagcaacaccatgccagcctgcacattttagcttggctttgcatctccctaaggtaatgtgcatcccggtctcagaagcatgaccatgaagtcattgaaaacagtattcaacctccagttgaagtggcattgttgttttatttcaagcttggaaggcaggctgcagagcaggggctgggaactccacttcagcagagggtgaataggatgtcgggtaacctgctggcaggagtttattttcagtcacctccgtgttcttaaaatgcctttgcagcagctgcatgttaaatgtgaacccaaaataaaagagcccacactcctcaccctcaggtgcttaacacagaacttagaagtatcagtgactaaggcagaaggtgtttttcttctattggaaatgagtttatcagtgaagttag

SEQ ID NO: 127614 - DNA, 1096 bp, Homo sapiens
ccatgcccagctaatgtttttgtttttggtagagattgggtttcattgtgttgcccaggctgatttcaagcttctgggctcaagtgatctgcccactttggcctcccaaagtgctaggattacaggcgtgagctactgcgcccggccttgttggggttttcaacccatgtggtggtgagaggggtcatttaaagatcatattgataaagcaatggtgttgattaaaggagcaatattttgagaacaggaagcatatgccttgttttctgtgtttttaaaattagatatttgaaaagcaacacaaatcatactaaatagttagtgccatttattttttgtcctctcccggtggtaaaacttactctttctgtttttcttgcagagcatgcttgagaagggaggataaaaactttcagaatgagcaaaacaccatcaacgttaattccagagatggaacattttttttcctagtgagaaaacaacccatttgaagagaagaccactaatgagaagaccactaaagagagacatcaagaatggattcagcagaatcatttcacgttttgaacagcagcagtttgaagggccaaagccttgatcagggatcagtcattaaaggacactcttgagtattagtaaaccctcttatgatgattaaaagagaagggcagccctctccaccttttggtactttctattcaacttgcactgaccataaaatgtttctcttctgaacaagccccatcatttggtgaacctccaccctaacaaagtaggatggggttgggggctaaattaattggagtggggcgaggagagagccagaaaacatagatccgagggcagcagtgctgggtggagagagccagaaaacagatctggaggcagcagtgctggatggaattgtctaggctgtggcatgttggttttgtctttcttttctcctttgattatgtaagagctatttcattataacttattatggtgattatacaggcaagaagacaaaaaggagagaaaatgtacctcttctactggaataatgtttatgattacaagtgagataaggtatttttatcaatatgaaggcaacctt

SEQ ID NO: 127615 - DNA, 1076 bp, Homo sapiens
tggcaggtcacataattgcctatcatttaaccaatttaacagttggatatggttgttctgagaggcagaaattgttggaaacgttgattccttctgctgacaaactccatagatttgaccttctaacccaactaaatctagtgtttaagttacacagcatgcctttctgcagtctaatttgatgtagttataataatatcacttggtgtaaaatttttatactctacaaatatccgacgggagggttagtattatctggatagctggaaaataaagtaacattagtggaaagaatataatcaagatttattaaaagcctatgttgtcctcaaaagcctagtggctggcagcttttttctgtttcttgcttgtagctgcacttgtataactcttagtagtatgccagggatccttttcattaaaggtctttggtacaggtaatgttgctaatgttaagttagtacgttttatttgtcgaaaacagcttctgatatgctgttaataaaccccagccttcaatatgaatatgaactgaaggacttgagactcgtaggttgattcatggatttttctaacttgataatagtgccttattgagctggtggtcagtggaaaagagtggttgtgacaaagtgtatgtttcaatgctggtctctaacatacgtgcctgtttgtaccatgtgatttgtaacattaccacagtggcagctgcaggggcattgggagtgctgaccccatcctgcctgtctgggttgtgttgaattatctacatatagtcttgtgacatcaatggtatatatttataggataaagcaaagttaacttgtgacaaaagcaaatacgccacatggcgcgatagtgagtttgaatctggcagacctgggtttgtaccctgtccttttaccagctctgtgaccttggggcttgagttttctcatctgtaaattggggtaatgttgtgaggattacctttatataaagtattcagtaaatcttatttttccccttctttcctcagttgcattattgtgctgaaatttactaaacaggtcagccaaaagcatcaaattattatt

SEQ ID NO: 127616 - DNA, 1273 bp, Homo sapiens
tgcagggccaggcagcggggcctcccccaagttcatactccgtctctgctgttctgtgtccagctcctttaggagaaccttcttctcatgtactgcttttttctcatgcgtgggcttactcaccagaatccctcttgctatcagagcactgacccagctggtgaggtttcccacccagcaaaccatttccttccactcctccccatctcaccagcctcattttgtaatatccttcactgtggacacccttcttaggaaatcgaagtgttattccttaaccacaccaggtctgcaaggaccatgccctcctttctgcctgcccttctttgtctttctttcaaagaattgaaaactcactcttttcacactaccttccctgacatcctaacttttaagcacatttttactggttcctctacttgatgggaatgtcatggtctgcttgcagaatgtgtccttgatgaaagtgttttggctctttaatctgtatgtaaatttccatgtgaatcttaaaaaaaaaaaaagtctgttagagatgtcactgcctccagctctagccttttcttctctcttcttttgctgcctttccttcatttacttgtctgtctagaatgcctttgtatcccatgtctaactgcctaagccctttccattcttgaagaccctagtgaaattccattatctcatctaaaacttttcctagtcatctccagccagatgtaatccttccctttggtattttactgttgccagatgtgtccctttaaagcagttcttaatgggctagataggtctgcctgactcagtctcttggtcttgtcccacagtgcctagtatctcacaggcactctaaaggatatggaattgacctcatcctgccacctccatttcttcttcactgcccactttcttctttaccaatttctacctggcttctgcctcacgctctctgctcagattctttctccagcttgctatggagcacattccttggccatttatcagtcttccttctttttgactgtcttctctgtcgtgaaactctggtctccccagccttgtgatgctgtgttacaccagttctctccacggtcagttcccctactgctccatcttccttccctgtcacccccaggtatggactgttccccaagcttctgctgtcctttctgccctttgcctctatgctccccaccacatcttgcagggcattttgacactgcagctgtagccctgccatcatgctgagctccaactccacgctttagatcgt

SEQ ID NO: 127617 - DNA, 1128 bp, Homo sapiens
tctcacatttattagctataaaatacttcgaaggtgtattttcttctagtttttatatttaatttatggaatattaagtaggaaaatattagcaactacttggatgcatgctgcacttattttctaagaattagtaaataatgttatcatgtgtgattagttgtgtttaatgctagagatgagatattacgaattagcaactcaccttctaagttcttttccttaccagttaccttaaacatatccatttcccaaatagagaccattttctcatttccagggactttcaggagattaaaaggttaacatttacaatgctctgatttcaagactgcaaggcactatgtacaaaattcgtatgttgtttgagcactttttttaaagcctctatgttcaaaccttttgaaatgaatttagttcctatggaaacttatcgctgctgtagatagtgcccttatccaagagaagaaaataaaatcaattcagagaatgattttataattgtataacatagcttgggaatggacattaggaatatgtgcagttgcgctcttcggctgttatactggttcatattagattgtgtttgaaaacaaccttgcaaatgtcaccatctgtccttcactttgaggccagaataggtaatagtggtttaacagaaatttcagtgggtactctttcttgcaacatcacaagtaataccttgtgaggaggcaggggatatgataaatattttggaagtaaaattagctttggtaggtggaggagagggagaaggaagaatgctgttgactcctgggaaagattggcattttgcaggctattcattcactagaattcgtgtagatgaacacaaaaaggaggcagctgaggcagatagactatttgaaagttaagtaatagtagtgtatgcttgaagtgataacttagcctatggtaaggatatgggaaactgaggaatgttaaaagtgaaaggtattttaaaacaggaactaacaatctcagtgacttcttgaaaataaagaattagccggtgctgtggcttatgccatatcctagtactttgggaggccaagaagggcagatcacttgagcccagaagtttgagaccagcctgggcaacatggt

SEQ ID NO: 127618 - DNA, 1830 bp, Homo sapiens
ttcggaggctatgacagactcagcctgaaagaatgtcaagattgattagtgatgtctgtcactggcttaagcattgaatgagtaggcatttttcctttgtatttgctactcctgctttagaagcatatataaaaatttgttcaacccttgactgacggtgcgtaaaccagaaataggaaggatctggttggggaaggggagagaaaggaggaagagagagaaggaaaaaagaaggacgaaagcctaaaggactgtataatgcaattttcatatcttttctctgttctcttttcactttttttcctaccagcaggtttggtgaaatgaaatatcacaaaacaggactctttattttgttacctcttgtcccagtatggctcctagtaggagaactcgttacttctccctcatttcaggcaacctgagcaccagtgaaactgtgactggcatttgcagggacctaaaaggtaatcagagtaagaacaactggtaaaatgtcctttatgtgcagtcattcctgccatttcctttgtaattaataagagaatatattaacattccattttgcttagcatttgtaatatatgcaaacatattaacctttggtacatttttgaaatagtctcctgggcaaaggccttagtttataagcagggaaataagacttcagtcagatggcctcactcctaaatactggaagaaggaaatgctccatctgttaaacagttctttcagtctaaatgttggcacttataaccaatattggagatctaaaagtggctggatttgatggtgtctgataaaaattaatattataattgatttgccatcacgttgaaatgccttgataaaatgctctcattgctttatttcattatacagtatgtggttgtgataaaaattatctcattatgctattcaatttagataacaaaaccagttattcagaccttaaacgaaagttatcatcctgagcagtacttaagtctttctctttcagggtcttcagtcctagctcatattggagttgctggccataatcctcctatttgacagttgacattgattaaattaggccaacaagtctaaaatttcagtttcatggtctgctgtatagccacagccattacatacctctagtaccatgatatgatatatgatatgacatatgatctgatttgacaaaactccagattttacaggcttttcacataataatttagtaatgtgtaattaacttctgaatggtaatcaatccacacatactgtgattttatgatgtgtaaggcttcagtttctcactcatccttcacaaaggccagtcactcaggcacagggaagacctttaattttatctgggttttctttgcattcagccatggtgcatttatagaaaggagaatcctcctagtccatcttcttccccattcctgcttatgagttggctacaaggccattacaggcagtgctgtcattacctgtcaatttaagaccatttgaaaatgaaatcatcattagcactttcacatttctccctattatttctaaatgtcctttggtggttaaagcttttgggagtatggggtaggggaagggacagacctcacaacatgaataaactgaaatgttacccaacattttagtaacaccggcatgtctaggcctcctccagaagactgctagcgtggcttcacaaaataacatgtatgaccttaaagatacagaaaactcacaaaaagaggctgaaaaccagtttctggcctgtttgaatactggtttaacagtaatagaactttaactgtgtgggtttattattcttgaaacgtccaa

SEQ ID NO: 127619 - DNA, 1123 bp, Homo sapiens
ttcttgagggcaggaattgtattttatcctctttatcgatctgcccaagcacctggcatatatactgtgcttggataatacatatttaaataaatgcattcagcaaattaggtgcctgtggctatgttgacatctctgtgtctggcctaatggtttgatttatctggctgttaatggtcttcattacaggctgttaatacagggctgatttttgttggacattagctaattgccagagttcatctctagtacatgccagatagaagctgggcttttctcttgacggtatcaataggataattaagactatagcaaaattcaaaacatgatggagtatttattacattaagacttgtcattaattgggaattccttcagttcagatttctatatagtgtgaatttttgtcaagggaaagttattgatattaaaaatttgttgacttttgctatttttaaggactgttttttttgcttctgttcatgtagacagatttatatattttctagtttgaaatttcaacttgaaaacacagcatcttcaagtcaggtaactgtctatcaagaacaccaattaaatacttcataacaagttttcttcttataaaagcctacccacccactttcccccatgaggtttctattgtctgttataccagtctatattaattataggcattttctgagcaaagcactgatgaaactaagacatagaggagaaaattcctgtgtactttaaggataagagaaccattcctttttctggctcaattaaaactggactgattgtcaagtcccattaacctagtgggtcactaccttgcttgcattagtggcagccccaccgtaatgtggagcagtcttgccacgtcgtggacacatttatgaagattgataacagctaaggttcagtgttaacttttattgtcaggcaggctgtacaagaaactgtctggtattggcttttgctttgatttatgaaaaggttgccacatgaagaagatatcacataaaacagcactgctggcagcagcgttattcggtgcaattgtaaccatagcaaataataactaatggtaattaggttcagcatcatctcttgctactttccatagtttggctgg

SEQ ID NO: 127620 - DNA, 1110 bp, Homo sapiens
acagttttagtgctttttgcacagatcatagtttgttatatagcactctagaatacttggaagagttttggggtggttgagatgggggccatgttatctgctatactggaattcagatgccaagacaaaggcatttgatgaaagcttgttacaaatccatgtattttatgaactagggggaaattgaaagcaatggtaatagtattatcatttgtaataatatataaaatagaatgctcttgattatgaaggtcatgttaaattgctactgtattaagggaaacatagaaaccattcacttttgtataataaaatgatgggcatgtccaaatttgggtatctgcctttctcgtggttaggctgttttcatttcttcacatgtaccttgaaaggctttaaatcatagactttacctggcccttgattatgaaggtgatgttaaattgctacctctcttaatccttggagtgtttaaatgaatgttctgtaattgatggatcaaagtgtccgtgtcccatagctttgtactttccctttgctgccagttctcacattaggttagaagacatcattcagaatttttctgagtatataaatagtcctattgtgtaacctctattagtagcacatgcgcaaattagtgaagcaaaaaaagttgttgtgacagctttagttgaaagattgcatcgggctctgacctccttccttgcacatgtttacaagcatttgataaaatgattaaaccctaaggtggaattactactttctgctacagtacaatttgtgtgttaatggatattagtgttattgtaatgtggattaaaataaaattttttaaaaattaaaggtagtttgaggtttatttaaagagccaaagcccttcagccttctgtagtgaactatctctttagaggcagcagagagagaccttccaaggatgggccacaagtctcactattagagattaatgtgagatcttaagaatttagacatattaatagaactggttatagattttttaagttactctacatatattattttaagttaggtgtttatttttctccctaatgatataatgacttttttttaggtggtaaaccttttttt

SEQ ID NO: 127621 - DNA, 1075 bp, Homo sapiens
ataactgtttcagagcttctgtgcctggaattgtatctgcgcagcaattaatgcagcattaaattgggtccccaagcgcttaactctcacctttgggaaaacatacttgcctacatctagctgattatgtatcatagttcctgggtgaggattataacaaaaactataattaagacttttgaatctggctactcaacaatgggaactgccgttatttgacattggtgtttgtggcaccctggacctctttgttggaattggctgccacctagagtgacacttgtgtttgcttgtgttgtaggaggaagaagaggcctgcagttgttagcagtaactatagaccagtttagacacaggacagtctcaccttcagccagtgtggtattgtaccttgaaggtacaggaccagacttgtttctgccaccattctcttggtgctaaggatctgtggagttgccaccatccttgaacggacaggcaatcgtcttgttcttttctgggaaatagtgtcaggccaccagaatttaaattgtacttcagccctcatgtgttacatagtcatgccctaatctccatatgaagcattctataaaagaactgacaagagccagttacatttttcttatgacctctttgatttgttctttttgtacatgcgatgggtatgatcatactagttataataaaacaagattcagaatctgagaaaatattgcacgaatactgtgtgtgtatgtgcatgttttcttttgatcaaatttagaacttgaaaacagatagttttcaaatcgagcaataatgtgtatctgtgcatgtgcattttaatatacacttttaaaagtgagactttctgaaaatggaaaatggcagtgtatcgcacattcaaaatcctgggccacggccagcccagagaaacttgggaatgatgcccactcttgttgattctcgtttccttccgtacggtctagaaactttgttcttggggatgaagataccagatgggtaaatcccccccataccccaaattagtttaaggagagattggaaagaaatattggaatacttgcatctaaaa

SEQ ID NO: 127622 - DNA, 1063 bp, Homo sapiens
gacattttttaattcttcctgttctttgttggaaaaggagagaggcagaaggaaatggagattcctgacaagtagaagtgaagcattactgcaaaggagaaagttgcttccagtgtgtcattgcatttgactttattgaagttattcatgaggtgtacaaaaaagcaaacatcttagggcttacagaggtctattcctgattactttcaccctgtctatcataaaaatagaatggctgacataagaagtagatttttttcttgtttaataaaaggctggcatggtggcttcagtgtcatcagagccccagacacctattattccattgcagcaccctaacacaggcttttgctctttaaggtcagcttatgtcccaagatggctgctggagctctggccatcacatcaacattgcaggctgagataaagggctgaagagatcccctgtcagcttagatcaactccctttaagcagcctactgggaagttccatataacacttctgcttacagctcagcctcactggcagcaagcttggaattctagttttgtttaccatatatctagcttaaaactagggttatctaaggaggaaggagagattttaagataaaccagtgagagtcttgtttccataaggaatcttaatttggcttaactatggaatgtaataggatttttgattcattagaaactgctaacttggttatttattattgatgactggtgatatggatttgaaaaagaaatagggctgagacaaattatgattcactcatccatatacacaaatgattattagcagaaatttagggatacttaggataaataactaggtttttgagttcagtgcttacataaaacaaatagcaatgctgaatgttagatacatggagatgcagtttgaatccatccgcttgatgattgttcttcaggttcatgcagagttgcataggtaaatgaatggaaatccaggctctttggattacctagggagccaagggttgctggcaagaatggtattgtgatggagaaccactgccttccacaaggagaaaccagg

SEQ ID NO: 127623 - DNA, 1123 bp, Homo sapiens
tttggttaagaaataaatataaaccctccatggtcaacaaaaggcatgacttagtgaagtactctgtagggtaccatctactgctttgtactgaaagaactataatattttaaacctcaagacctaaggccttctagctctggacttagggactgatttatttctggcacttaatatcttatggaacaccagcaaatgtgtgaccttgtttaaacacaccattcctggtaggtaaaataaagatagtggcccctaactttacttccttcttggctggtttttatcataaaatcaaacgatatgaacataggaaatacttgattcctaacaatatttgcttttggacagtccaagactcaaccagctctcctatgctttcaactcttgccctgttagaattgtgttcccttgtataggaagaatctccagagcctcccttctttccagagacttttgaatatgaatgttagagtacatctcagtagatcataagcagtggaatcacataactaaatttaaaaaaaaaaatctaattcaggtcctaggaccttactctgtagaagttgcattcagtaaatacttgagtgaataaaaaatggacattgacccacttaacaaatggcagaagaatttcagagataccaataataaatagggctttaaccttcataatttaaaattggtttgtcccccaacccccttttgaaaattaatccccactctctcatctgtattgaccttgtggttgcataggtttgtactgtgccaaaagggtagatttttgtttttacttttttgttctagaggagagttggtacagtttggaaaatcataagaaactgttgcgtaactgtccttattcttatatctgttcaccaagggctaaaacttaaaggaatttaaacatttcttctctccttttttctcttggggaaagggggaaaaaacaaaccaaagtctaagcagccctatcattccattatatgaataatctattagttactttagctattttctgtggctaaatacttgtttttcatttttcagtatgatgaactccacaatgaacaaatttttagctaaatttttgtatacattcatgattatttcacatatttccaga

SEQ ID NO: 127624 - DNA, 1042 bp, Homo sapiens
agaaggtcaaggctgcagtgagccattatgtcgctgcactccagcctgggcaacagagcgagatcctgactctaaagcaagtcatggagggtgggggcagcagatttatcttatatatatatttgctttcgaatttggcaaattgtgtatatcaaagttagaagtctgataatttagtgcacataagcttaggtctttctgtcatcttttgagcagaggctggtttgaatctgcatctgttttgttgaatcaccctagctaatgagtgggaaatttaaaaaaagaacagagctggttgagctttcacttctgcatattcaatcctttggtatgtttattaaattctatggtattgtaatattgcagtctagctcttccagaccaaggaagtaggtacacagagaagaaaccaggttctagaggttgtggttgtgacatttggggatggcagtgttaaggaagtagccagggtgtggggactgtgggactgtaggagaccttagcatcagaggaaatgctatacaggtgccctctaataatgtaatgtgagcatgtcttctggaatttttagttttgtgtttgaatgttccatcagaagtgtctgacttaggatatcagtgcagaacaaggatttgctttttcgtgatgcattttgggtcagtttttttttgttgttgttaacatcgagtaagtacagactgagttatattttccatcttctccattaagatgaaatggacaacaagaggaagcaaacatgaaagcttgggtgagggtgggtcaccaggctgtggtgggcaagagcaaggagccctggggaaagtcgcacagcagttactctccgacagccactgagctttgtgggacagtgttcacaattgtgaatagtcctggttaaaaggtcttttcttgaaaaccaagcttttcatttggattctattccagaggcacaaaacaattctggggtcttggctttggcaaaatgacattgggatgtttatatcaattttctttagaaatgaaattttcatttctaaagaaa

SEQ ID NO: 127625 - DNA, 1043 bp, Homo sapiens
acccataataaattgtgaactgtctattctctcatggtgtagttactctaaattgtggaaatttggcagacgtccctagaactatttgttaaaattcaatagtatgtaattaaagacagagactgccattttgctgttgggtacattaaaaaattatattatgtatcatttggatttgaccctgaacttatttcccaaaagattaatgccagaaagacaaaagtatattttagtctaaatagaggctcaagttatataaagtaactaaatttatggaaatatcagttagactctagctatttaagagtaattatgcaaaagatagttttgaacgaatattcctctagaaatagccaaatggacactgtaattatgatgaaattctgtgcttcaagtcttgccagacaataaaacaagactgctgatattttaagcctatatcattaaaactaatattgatacaacaacctggataatatgtcagtgaaatggaatattttatagatacacaaaagtatactgctccttgaaacgttagcattcatctagtataaaattacacttttttcaagcaatgaaacagaaacctagaggcttgaaaattgtttttacgtggttgggaaagggaatggtggcactatttacctagttatgattatctcatcagataagttctaggcaagtgagtgggtgtttgtctgtttaggttcctgcaattgatttgtgttggggtggccctcccaaatatagacaagtggatatggattcatatattagacctcctagttattggctatttattcttagataaatcatgtaacctgtttgaccctcagatccctcatctgtaaagtggccttcatattgtacttccttggggatgtggagattaaataaaatattatgtgttaatttatacatactaaattaggataaatatcagttatcagcaccagtctctaggaggttgataattatacagctgtttgaggtagcttgttgcggggagaaagccctagaatagagtagagggattgaatctg

SEQ ID NO: 127626 - DNA, 1412 bp, Homo sapiens
gcctctgtcttcctcctcaccaatggcctctccctctgtgtcaccagtggtggactattaaattttcactttcagtctcatatgattccactccccttttcatcctccccctcttcatttttatttatttatttaatttttgagacagaatctctctctgtcgcccaggctggagtgcagtggtgcgatctcggctcactgcaacctccatctcctcagttcaggattctgctgcctcagcctcccgagtagctgggattacaagcgtgcaccaccatgactggctaatttgtagagatgggatttcaccatgtctgcccggctgatgtcgagctgacctcaagtgatctacctgcctcggcctccctaagtgctgagattacaggcataagccaccgagtccggccctccccctctttaaaaagatttttggtggaggtgggcctgacattttttgtttagaaccactagagtcaagtaacagattctcaactgagtttccctcagcaacattcatacttggttttcttccataagctaagcgcccattgttttatttaatagtgaatcttgtttaaagagaagttgaaccagctttattacagggcatgattagatacagttaattagtacggctatagcgtataggctaaattgataggaaaggtgctgaaagtaaggaaattgtaaaggatctgtgaactgggtcttattcctctgaggggatgcagagaaaagaagctggccctgtactgtggggaaatataaccagaaattgaagtcacaagcgaagccaaatcagcccaggtaaaggtgatgacactttctgagatggcaactagtagctcttaagtagccttgaaccatggtgtccacagcagcccagcacgcttagcttgctatgcggattgtacctgtggaatcctggggcataacttcctgcaaatttaggtttagtcacacaagtttactgtcactttccattctaagactgagtgtgcacttgtttcaactctctcgtttcaggtcagagatgtttctcctatcctagaactatttgaacttcaacttccccaggctctgcctcaaaattaactttagtaattaatgaccttcagtacatgtaccactcaattaactaccctcaagccagccgtacttttaaccttcctcgatggcagattcttgtccatctcctgccacagcattccttcctaggagatctccatgcttgcgttctctctgcagattgctctgcctgtgttgggcatccccttatttttacttttttttccccaactttatttttgtttgttttgtataattgacaaatacatccataatgctttatacctctcttgattatagtcacattttgtttataatacttgtgatgagttgtagatgatgag

SEQ ID NO: 127627 - DNA, 1056 bp, Homo sapiens
ttaggtgtccattgattcaagcttgcattattccaacctcctcagaattgggagcaatgggtagtggggtttctccttgatcttcccatgtcaagattcagcaccatgcccattaacccaagagttgtacatacttgcctgaagaaccaggcgcaggtttcagtagcatgccaccaatggaaagtctgaaccagaatattcttcccttttatgaaatgaagtaggaaggtaattaaattggataaattactcctgtggatctctacaaatcttcccgcaagtgttgccaagatatggtgctgaaggagcaagtgaaagagatatcaacatcttctgttccatcagagcctcaaggtttctgtgaccctctagaaagaatctataggacttgctattcttttgtgaggaagcagtaaggtttacttacatagcgtagaaagtgcgcctttgtatctggagaataagtttgatgatggtcagtaatcacatgctctgcaatttaatttgtcttcgtaaaacgtttagaactggagttcagagagaatggcatgatcaccacactgtccccttgtgacttgtagtgtttgtataaactctataaaagcagggaccttgtctgttccctgctgtatccctattacctagaccagtacttggcacttagcaggtgcttgttaaatatttgtcgaatgaatgatgaaggcattttcagcgggtcaaaaatgtccacgtagcctagagatgcatcttccaaattgcttagtgggcagctcgtctcaagttagaccttattctgcaggttttctgaaatttaggtgagggtccttttgctccagtcatgctaacttctgctattaatgcaacaacataccttatttatgtaaaattaaacatcagtgtaattactactcctcaagcaagcttttgaaataaattaaattatttgtctaagtgatgttcttatccattacttttacatgactggggagaaggtgaataatgatgatgatgatgatgatatcaattttatccacaatctttaacctaaatagaatg

SEQ ID NO: 127628 - DNA, 1019 bp, Homo sapiens
catggattgctttcagttttcagacacctctggatttcagcagcaatttgcatacagactgcaggaaatctcacagaattaaaagggagagagaattagataagctgggcaaaagagaataatacaaagagaatggtgaaaaataaattgccattaagaagaaaagtatattactagtttgtcacctgtggagagagttgctaattaaattctaaggtcatgcttacatcaaatgagcaatttttaaaagtctctcacttatggcagatgacatgtcttttattgcatcataaagtgttgggctcatctgtatgattaattggcttttgattgtgtgtgacttcttctttctcaattagtacctttgcttctgtgctcctctgtgtgaagcttggggaaaaaataatgccaacaatgataataatgagaaatgacaacagaacaggttattgtcagcccagagtgcttcttatgggaagaaattatgtatttttactaccaggtgaagtctgtcattgtaaaatatttcagtgagtgaagctggatcaaccttttcaagggattaatgcaggatggattcacaattagtctactgacatctgagatactaaaatataaacagtcgttttttggagatggggagataacttaaacttggtttatgggattaagaaaccgtttgatattcccccctgcgacgtgctttctaaacagttgccaatgattttaggtgatgtggttaactcattttggccctgcaatgtgacagagtaaatttaacatgagagttaaaaatgtaacttcctggtagatgtgcctacgtgggttatactagtttgcacttgtcaacctagagagatagactattcctttgacactgggaaattttgtactggcttcttcattcatgtggagatcagggcagattccctgtggtttctatagttaccgagagctacacaaacagagatgaggttctgtagtccacaggtttggatgttgaagttaatagaagccta

SEQ ID NO: 127629 - DNA, 1050 bp, Homo sapiens
aagggaaatagaacaatgtatgtatttatttgcaggtaattaactgttcttaaacacaagatttatgtacaaaatgttatttaggcattacttttttgttcaaaaaagagccatgtatcttatgcccaggataaaattaaagtttcattgtacaaaatattaatccttgaaattactctttgatagggaagttaaataagagtctgttatgtgctgtattctgacgtttcctaatatatttggacaaaataggacacagctgttacagcgggaaaaaaaatacaatgcggacttcttctttacatttaaatacagcaatcatcatcttaatgtttttctatggcagagacctaatagattgcaaaaatcttcagatttgtattcttatttctaatgcaatttattcttgacttttgctttgctgttgctgctttttcttgatatagtatattcctcatttctttttttaggctaggcagctggaagagaaagaccgagtgctaaagaagcaggatgcattctacaaagaacagctggctagactggaggagagggtatgactattttttatcattgattctattaccacatctgctgttttcttgtatatttatttaaaaattaataaattagaacttcaactgcttttcctggttgtaaagtggccaggaagtgaagaagcaaagcaggtagttagttcgtcctctgtaacaatgtcattttttctttggtcactttggaatggttgcgttatttgttcactgatgcattttaccacttgggacctaccgcaaatacttttcttatatgtttagaatctacatagcctccaggtcagacagtacactgctactcttatctctcccagacattgactaaactttagtacactcttaaaaatggtagtgttttaaaggatatatttatcttcttttatcttttctttttttgcttttttctttttgaaatggaatctcactctgtcgcccagactggagtctagtggcatgatcttggttcactgcaacctccacctaccaggttcaagtg

SEQ ID NO: 127630 - DNA, 1033 bp, Homo sapiens
atttagtaggtaatacaatttccatgctatctataactgttcaagttgttaaattttttgaattgttaatataattatttaataggttcactcttttagatgccctcagtgctacatttccatctcatagtcaagtgtaaacatatggaatattgatgtttaaaagattttttctgatcacagaagtactaactgttcattataggaaataagaaacagtccaaataatatatcccactacatatatcataactactataacatcttaccatactttacacttttttccatgtccatataaacaagtactcaaccttctctgtccctcccttctgctcctccctcccccatttctcatgcaaaattaggagcttagggcacatgctattttatgacgtgttttttttctcacttaatattttgagttttaaaaaattaattttctgttacgatatcagctttcaaggactcttactgtttgattatatggctggatcaaaatctttataatcaatatcctattgtcagattatatcttatttacccaaacatctattgttcactcttagttgttgctttaaataatgctggttgcattttcttagatgtaaatactcttatattttaatatttgctaggattgaatgcctggaagtgaaattggccacataagaagattaatgataataatgatttatacacacattcacacatttatagttattattataaattttagtatacttaatttatattcatttttaaaatttatgtagttaaattcattctttctgatatacagttctatgagttttgacaagtgcatgtaattatataaccgccaccacaatcaagaaacatattcatttgctcaccttaaaaaatttcttccttttgccccttgactataaagtatgtttctttttaattctgaacatataaagaagcaaaaataagaaaatagataccgcccataagtctaccagtctgctgtaacctctgttgacattttgtaaaatatccttctgctttt

SEQ ID NO: 127631 - DNA, 1012 bp, Homo sapiens
aagtttctatcagcccagtatgttatattcataatcccagttttctcttgtataaactttattatagcctttgttgtaaagccccttcaagtctattctgaaaagagacaagtctttaaggaagtaaacatacgtacttcacttttaatctagctatcaacaccaagttaagacatcaaaatgttcgtgttgggttccttaaacttgatttccatattttctttgtttctcttgaattataggatattctagttttccataatgatccacttaagtacattgtgtcacattttccagcccagttacgttatcccgaatctggcaagatctgaaaactattcaatacatatttcttctaggaatagcaaatagtagatggggaaaaatgttttatattattttttcccaagatatggttctatatcaataaataatgttgtagtcctctttgtttttatttgttcatttacagtgattctctgttagagagctctacggagtttcatttccttgcagtaggtttactacttttttaaagttgaatgtgactctccatcctcagcagctattagcttagtcaatgtattctaggcttatttaagtttcaggattcatatcgtgtgacttttcctcctagcatcatattaactgtttcaaagcaatgtgctattaaagtgttgtggccatgtttcttactttgttattcttcccagtggatctcaaactattgattctgtttgcaatccagggaaagatgtgtgctgctggcctataacttggtggtgttgggtcttaggaaatattgccctctttggtctttagtgtacacatctgagctttggacatgttattttaaactttttcaaggatcatatcttagaaaagtgagtgagcatatagctgtacaccctttatttaggttgtaatcagctcttcaaaattaaatttgttgattgatgcggtgtcctcagcaggctcaagtgttgaattctcttagtgttttctaaataat

SEQ ID NO: 127632 - DNA, 1834 bp, Homo sapiens
tgaacccaggaggcagacattgcagtgggccgagatcatgccactgcactccagcctgggtaacagagtgagactttgtctcaaagaaaaaaaaaatcctgtcttatagatgaggaaactgacacacagagaggttaaagtaacttgcccaatatcacatagctagtaggtgggagagccaacatttcaagccaggaaggagctctggctatgggctaacatgtaatttactcccatacttcactgccagcatcattttacctttaaccactagtagtttatctgtcttcttatttcagagaagggaggatgtctcagatcagaaccttgggccaggcaacagttactaaccagaaattgtttccattatattttccctattatcttccacttagacagttgaatctgattttctaattatggtagttatataaagacttctcataattattcaacttttgaaatagagctaatttaaagaaaaatatcaagtgaatagcagtaggtattaaatggtggcctatataacaaaagtcctgaaggtgatacattacatattaatggataggatattgtgagtagttgcttacagagggtgaagaattatgaatagggcagctttctggtttggccgatgtaattcacgtttgttgtgtttgcaaaggtaagggaacctaaagatggaaaacttagtagcaattgaggggataagagggcatagaaaggacatgggtagacatgttaatgttccattattaacctacattgcatgtgtattcaattattcagctccgatttggtttatatttagtgatctcactcataccaagggggttctactggatagcaaagttttatacatttgacttgctttgggcaataaacatggggacagatgataaaagaagggttatggagagccaaaaggcagttgctatgaagccatcacaaaagacactaaaccgatggggagcagagcaaaggtttgtctggaaaatacaagttaggctgaagttgggatgacccaaggtaagttttaaatataacggtacatgctacttgtattttcccaaatcactacttctgcacttctacaacaaacttctgctttctcacaggacttttatggaaggaagaaaagtaatttgaatcccttaggcctttttataggtccattgtcagcgtcttgtgtctgccttgacccatttgcattctggtggttgctgggaacagtaagataacctatgaatagtccttgtccttccagtgtgatctgaaaggtctttgctgctctgtgcctgaagagaacattgacaggtagttaatgatgttctcgggttgcttctagctctttgtagatgggggtggccagtcatctcatggctacttccttgactgggaccccttcccatattgttcctattagtttttaattccaagagggtgggctgctctctgtccttgctttagtgttgatgtgttcatttagacactgggcatgccttgtgagtctactggactgtgtttgtggaactcccatctcttcttgcccttttaacccttattcttcatgactgagaatgggccatgcttctttttgagcctaatctgttattgcatctgctgctcttaattatgctccttttatgcccttaattactcctcttggttttctgttagtttttcttctccttgtgttactctttcacccttagcatatctgacagtcaggatagtactgtggcaaactgtcagccagctcccgttgattggtaatgcttacgtagtgagctgtgttgggaaaggttgtgtagccttactcagactcggtagg

SEQ ID NO: 127633 - DNA, 1109 bp, Homo sapiens
attttttgtatttttagtagagacgggggtttcaccgtgttaaccaggatggtctcgatctcctgacctcgtgatctgcccgcctcagcctctcaaagtgccgagattacaggcgtgagccacctggcacccagcctagggcaggtatttttaggtccatttttttaggtgaagaaactaaggttcaaaaattaaaatgaaccacaagagtttagagtttaaatatataggaaagatccacattgcagttgaaaagttgaataaagaaatgtttggctgtataatacagatacttagttaaaagaggagagggttgaggggatcactttttcctactatgtgcagaagtatgatatagaggattacgactggctcttttctagttatgtctgagtatgggattaatttttttttttgtaagaattcaatttcagcaggggggatttagtttaaagatggaaactagttcccccttagatggaaagtctgttgtttaatctttttccatagggttgtatataacagttttagattctgtccagattcaaaataataaactagacagcagggtccaaagttctgccattatatctaatgattgtaatttttaaaaacaacaatgcagtcataaacttggattcagtctgtaacatttgcatgcactcagactttattataaatgcagtaatcttcccttacccactgaggattccttccaagacccccctgtggatgcctgaaatgcagatggtaccaaaccctatatgtataactttttttctccatacatacatactgtgataaattttaatttataaattagggatagtagccaggcatggtggttcacacctataatcccagtactttgggaggctgaggtgggaggactgcttgagtcccagaaatttgagaccagcctgggcaaatatagagagaccccatctctaccaaaaataaaattagctgggcatgatggtgcacactggtggtcccagctactcaggaggctgaggtgggaggatcacttgaagccccggaggttgaggccacagtaagccatgattccaccactgcattccaacctgagtgacagagtgaggcctttt

SEQ ID NO: 127634 - DNA, 1114 bp, Homo sapiens
ggaaatggtgaactgagtactgatgattaatgagcacagggattagtggtgatattagtaattttgcttggcacaggtcacatttaatgcctatgaacagatttttgaggcaggagaggtttggtcaacccccttcttccttcttaagggtccagtgcttgtgctgtacccgccctttgtcttcatgtctacccacaggtctcaggcagcttcccaggcacacccatgcttacctgaagccattgcctccttttccacgtcctacctcctgcctaccaagctgggaacagtttttttcctttactctgtccatttctctttgtgagcttaagaaagctggtcaagtctagctcagctatacatcacatcaaggaaaagctgtagaagtgaggcagctcttctctgcacttcttatggactgtttctagccgtgaatccttgggtagtcatttgctcttgttaagtctttctttcctcctctgaatagagatgtggcgtaaagggaaggatttctcaagtcctctgaaaatataaattctttgtctgtggaaatcataagatctgtagggaaattagacttctcaccaacccagtgtcatcatcctctgagacgtggtgataagaagtgcccttcaggctttgcaggctgccttaggaccattttctaatggaaaaatgcattcagaattccaaacacttgccttagaatttaatcctcagaaaatgacttaatccttttttgtgttttgttgttgttgttgttgttgttgttgttgtgtgtgtcatatatttctgttttgtatttaataaaggtctcaagctcttctttatttcagtatatttacctatcaattgggattgttgatacctccttcaaataaatattgggtttatttactgtttacttttaggatgagcctaatatgcagagacttgcagattattaatcttattactttgaaaaagaactgtttcaaggggtgaatactgaaacttgtcccagtacttggaattttcttgcttttattacatttcctaaatgaaatttcagagcctggaggaaagtagtggtgtaagtatatttcaagtatatataattggtttgaattctttg

SEQ ID NO: 127635 - DNA, 1834 bp, Homo sapiens
tgcaatacccattaagtttaggctgaaggcaaggcaacttcttctgtacctttgacatccacccacaacccagataggctacctgaaacaagtccttcacccattattattaagaaatcccactggcacactctggtcctgtatgtgtgtccccaggacctggcacattgtctcttcttctgctcagacatgagagcccttttgccagtgggcccctttgcccagggattcttttcacctttcctgtgcctgagtgagtaataaagttttctgttatgtactatcattggatcagatgacatctagttttttaatggtgttttttgttaatcgagtacatttatgagattgggggtacccaagtttgggctaagtcagactatggatcatctttaacagaaatcttggttctcagacatcactcccaaccagtgaaatcagcatctctgcaaattgggacctagtatttttcaaaactctccagtgattccaaagggcagctgagattctagagggaaaatctattttatgttgttagggccatagaacattttagaagagccttatgataaagtctggctgatgttttgcacatagtcattgaaatacatacttctcgtgatgtgtatggcatgctgagcacaccatcagaaatcacgtggccccttcttataaaactatggcagaactgagagcagcagagcagagtaaccagagttaaatttgagtcaccataatgagattaccattagattctgtggaaaatgtgttgcaacaaatatgactcagttgataagtgcaaattgcattttgcccttgatgcaaaataactgttctgtttaacgttcaggatgtttttgcctgttgttttcatctaactcagaacggagtctgcttaacaaatgtatgaaactggtcaagacctcggttttccatctgaatctgaaggtgacccttgtttaaaacttcatactctgggcggtctttttgtgtcagccttgctttttgccattttctttttcagatgacacaaaacagacaagatcagctgggagcccttcaaagccagctctaaatggaattaaaagaaggtattctgaggcaggaaatagttgttagatgaagggcctcatggggaatgattttgaggtccttagattttatgaagttggataagtcagggctctgagtcatggtttagaagaggagctcaggtggaaaaattgaaaggaggtctcctcaattttgtaggatgtaaaaatgagaaaatttagcaaaaaaggtttatgtgctaataatgagcctgatttgaaatattggccttccagcactttgatatgtgtctatcagtggtctgcctttgacgtgaaggccctgtgtgcggcagcttaacttgtgaatcctcactaaaggggaacagtgggagacggcagcctcagagtgcatgaatggcagtgattggctggcaagttgcgtaggccaataagcagtgccttccagggtaaagacctagggaagcgccttgtttttgctttgtcttagtgtctgcatgtgtttgacaagtgaacaataaaatgtgctgtttgattccacactgtcttgattcttttctgtgtccctcctgcaatctttctttttcatgtcacattacatgaggctcttttcacctctctctcctgaccctgagttctagtgttcattgctctctctcacccaggatgtgctctaattggcaaaactataacctggtagcagcagttcactattttagtttcctaattggtgtcaggggctgctggcagagcccggccatgttggattgattgatagatca

SEQ ID NO: 127636 - DNA, 1028 bp, Homo sapiens
tatgccaaaccatctctttagtataaatgtgttttcttagtataattgtgaacattaccagttcagatataggcactatatgaaatatgacccttcttggtatagatggatatttacaaaaattttaaaattacaacctgcaagaatatattttacatcctgacccagagtacacacagattttaattcatacataggaagtactactacttgtgatttattgttttctgccttcttaaagtttctattttattgtattttcatattaaaaatgctagtgtgatatgctaaaatgatataatagtccaatagtaggtagcaacctccagtctgaaaaatcactgagagtcagtgctggccttgtagggttcatgtggctgagcgaaatctgtgttccactagttttacttttgctcatgtgctgcctcaggtacttgtacttctaattttgttagttttctaattttgtgaggccttgaatagttttgccagtaggcatttgtgagtgattggattctgaggcaggattaataattttcctgaggctgtctcttgccatttcatcgtggtcctttgggggtccagtggagtttggattacacgagtatactcagaacttgtctttccagaggcttcctccctttttttataaagctcttttattccaggcatgttcattatggcaactgaaggaaactgaagtacaaaaatattatttctccacttgtatcttttccatattgtgcgggagatagtataagaaatgtgttataaatagaaattgagaagatgcagaatagtctcatctttatcatcttgtaccccttgtcagacctaccaaagtactggctaaaaggctagactaaggttattgccccatgtgtctttgcctagaatgaactagcagtgtaggagcggcatcacctagcgctcttttgaaataaggtgtccatgtcatctcattcagtcctttttgaggaagcaaacatttgttgagtatctactccatgatggccctgtttcaggct

SEQ ID NO: 127637 - DNA, 1786 bp, Homo sapiens
ctgaaagcttccattagtagcttgaagtaggcactgctgcctaatatttcagtcagtgaggaaaggcaggtaatgacattatgaatacaattataatgcaggccaatttcttctaaaatgcatggaagtattattactttaccaggagtctttgaaatatgatttatttaatgcattccagcccccataatattaagatataattgagatgtgaagtttaaaaaattgtatgcagtcagtatggtacatgaatcatagactaaattgcttataattttaaaggcacttaggggaattgtgaaatttatataatgcattcttatgtttggaaaaggttataagaacaatagtccagttattttagtatttcagtcccaaaaataggattttttgagttgctattaaacctaagatagctgtatacatgagcaaatccaaatctttctatgtccagttctcattcactactttttgtgagttttttctttaaacctctcatatttatcaaagctgttgagtggtatataatttctataaaggccataatctagtttttataaactgtacaactgaatgaatgacagcaacataaatgttgccagcatgtttaagaagggaatcagttaaatggtacttggaattttgatgattattgctttgaaaagactgaaaatcacaggtcttggctttatagtttaattacttgcttaacaattgctagtgattcactaaatcacaaggcttccaaacaaataacatcagtaactctgctatgcctgagcaactccaattttcttgacaatggctaccaaactgtgtttagcctaatataaactgttagtttaactgcaagcaatgggggcttcaagcatgctattgatgagatgccagcaaattgagccctttgccactggtgacacttgtgtcaagaataactttagcacgttttatcaagaccagttggagaagcaaatatagtaattatccacatcctttttggatattaggtttaataataatgagtgctgtccagctttccagagtttctaattaataattggttcttaagaacacagcatgtggtttctcacagtttgaataagattgggaaatagggcaagcttaaggtcctgcatacttttatgggcctgatagaaaaggcagtttaaaagaagagcaagttgtaggaagacattcaggtgtgctggtgtgaaaatttaatttgtgcctttattgacctctgctccctgaccttgctgtgtcttaactttgtggcatttccatgagtacactgctcttccttcttgcccttttgcaaccgcaagcttttgatttcaaatggactcttccagaattagatgaatttctcagtttttactttggtagcagctacagtcttttgctcacttgaaaatgatcttatcccctgttctttagtactttatcattgaaataatggaaaataagcatgttagacctgcatttaagaggggacaataatgcctgtcatttatcgggtgcttactcatgccgggcactatactaactccacgtacgttcttaaattgttaaagcatgaggtggttgtattcttgtgcctatgcaatggttagaatgtcccttctaaaactcacatcaaaatttaattgccattgtgagagtgggcctctcagtgcactcgtgaatggattactgctgttatctcaggtgtaggcagttgtccaggcaatggtctcctgatgaaaggataagtttggcccccatcctctctctgttttgtgtgctc

SEQ ID NO: 127638 - DNA, 1844 bp, Homo sapiens
attggatatagtctcaaatttgaggagagaaatgcaaagaactgttgcctcaccataacctttttgttacaattgaacacatagatcataatgctttagtgggtagaattgtgtaagaatgaataaaatcaggcacatataagatcggaaagcatcagttttacagtattttgagaggaaactggccactgagaaagtggcttcttgggttatattggaatttggatcttggatgcagagtccaagatctaagatttcccctggactcttctactaaaaatgaaaactgacagggcgggtggaacaataccttaactcatccactcctgcatggtaataaaacttgttcagtaaagccatgtactttccacctgatgccccatgcctagctttattgacacctgtcaaggatgtctttcttaacaagctcacttatttccacccaagtcaatggaataaactcttagactgaagtgaataatggaggcttgtgattgttagaagccatcacagcagtagtggaaaaaatgactgctgaaagccagacgttgaaggaagagagaaaatataaaaagtagaaactatattaaagtgcttcagtggtgaatattcctaaggacggccatggtttattcctacaacaaaaccaaacccctgaaccgctccaccactttcaatccaattgcctgtaaggatgcagggaatgaaatactctgaggaaagatttcccttacagatggccacaaaatttaatcagggattcacagtgtatcaagggataggccttggttatatagaaaatgcacttaaatggaacaccttatttcccagggatgccagataattgagttatacctaaaatcttgaactgtctgactagcacacatgcatacacatctagcttctgtgtgctgagaggtgttaaatggtttggaaactgtaattaagtagctgaaattgtgctgcagaaccactataagcattgcctcatgtagtatttcaaccttaagtgctaaaatttcatctgagtagctgtgactaatctagtctttatttgtaacacattcaaattaggaggtgtatgttcttgtccatgtactttctcattagcactaatattgctaatgggagtgacaaatgtattatgttttttccttcgatcactcacgccttttagataactagctttttagaggaggtaattttccttgtgatacatttatggagctctgtgtttaacagatttactcaaaagaatatgtccgtagggactgtttattagttgataggctccggggaaaacaagtttggattaatcagtttgaatcacagaagaaattgtgatggcagttagtgtaaatgggaatagcacatactcatttgttcctaaatgtctttccagcattttccgcctagtttatttgaacttggaaggttctttcctaggctgtttactttgacacttgaacacaccctcttcattcttcctttccaaattttcgtttgttcaaaggactccttaatgtttagagagtcactgaacagtgtttggtacagtcataaataacaaagaagatacattctgaaaaatgcatcattgtgtgaatactagagagtgtacttacacaaccctaggtggcatcggctactacacacctaggctaaatagtatagcctgttgctcctaggctacaaacctgtgtagcagattcctgtacttaatacaattataacacaatggtaactctttgtgtatctaaacatatttataaaggtacagtaaaaatatagcataaaagataaaaatggtatacttgtatagggctcttaccatgaatggagct

SEQ ID NO: 127639 - DNA, 3524 bp, Homo sapiens
cagttttaactcagatcttgagcaaactgagcaacaccatagaggagctcttctcagttatgttcctgccctagtagtttaaaactggctgatttttattctatagtatttatagagtacctactatggaccaggcactgcttggtgcttatttttatatatcaggtacatttcaaaggtattaaaataattttgaatttttcactgttctctttctctttctctctgtctgtatataacagtgagaaatgtgtgtacattatatgtatatgtgtgtgtatacacacacacacacacacatatataaaggccaagtaaatttttagttaaattgaattattccttaatggttacgtgagaatatcttatcaagtctaaatatagtaatcatcagtatgattttttatgtttgatgtaataagaatgtgtctaattttatgcattttataattattgaatgtatctttggacagtgtgcatacagatagttctggttatcattttcaataaaaatgtttatctgaacttttgtaactctgccctctgaagattatgcttcatagaatttctcatgttcatgagcataattgctaactggtgtttatgtagattgcattgaacaatctttaggaagaaaaaagcacattataccattttcttttcaaatttaattgagaaaatcttgtgagcacctcctgtgtgcctagtgtcaatgcctacattttagttgagcttcaagatttatctaagtatcttagtttttctttttataagttcttttaaaacttttattaaagcaagatgagtgttattaaatgggttgcacaaatgaccactaactcgtagtaatgttaccttatcagcttactctcatatgtgttttcttcagacccctcttttggtcttttccattctcatgcttcctacctatcacttgtaaagaagtttgaggtcatttaatcacatctaaaccattttaacttttaatagacaataggaattcattttggtgcttggcaaccccattgatatgtacttgtgtgaatatgtttatacatatatgtacaatattaaagaaatctcatccattcttttatatttatttaccacaaaaataaagttctggaataccatgccttacttgaaaagcattatttctgagtattttcacatttatttaattaattgttttaatgttaggtagtgctggcttaaggggaacctttttgaaagctgaatttttaaaacaatgaaaacccaagaagtcttcatgatttttaatggcaattttaaaaaagcactctcattaatgtcaggaacagattaaaatatgcattctttatatttttcaggaagtactaaccaatgccgttagacaagagaaaaaagtagaagggaaaacatggaaaggaggaagtaaaatttccattatttttagattgtatacctgcaaaatgaagaaagccagctgacaaacttttataagctgagagaattcagttaggtaactgcctataaagtcaataaagaagttctttatgtactcataagtaacgagaacaaagaaagtttagagtaggctttcattttggaataataattttgtaacatattgacagttatattaaaacaaatgcaaatgtttattatacaaaatgtttattatacaaaaatttgcaccagtagatttgaaaacgtaaaacatccataatcctaccactcctgatgactagtgttaatacttgctgtttgattcctgtttttaccatgcatatatacttctggggagtgtatggataggatggaggaggtacaaatttcggctcatattttactactatttatacatttttttttacaacaatgtaattattttattacaacaatattttttacagcaataaaaatgtaatatttctattatagcaatgtattgtgactatttttttcatattactaatattccagctattcttttaatgtatattttggatatttgaccatttttccatttttggatatttgtggtgttttcttttttttttttctttatccttttttactattcccgacaatgctaagaagaatgtcttcttggctaaatcttagccaatctgcactcctgctctctcagatcactcagccctgctagagtcttgatagaggagcagttggagaatcaagggagatgatgatattaaaaccaacagtactgtgttcctaatttttgggttgccagcagttgtaaggcaccctgtgtcaccaagaagtcagcaattgattggttaaaggggaggatttgagaattgtacattgattgctaaggagcaattaatgacttgatattgatgacttattttctgtttttgataaatttctaaaagcaaatttgctgtttaaagagtatattttaatgttttctttctgtacatgcatgctagtaggagctcatgcccacacagagaaaactttctctcttgaaagtttctatcagtttatattcctaccagcaatatgtggtgggaattacttgcctacttattagcattgggtgttacaagttctgttgttatttatcagtttgaaagtgaggaagatttcacttttatctgtggttcttagatgaagagacagatagtgaaatagagagacatcgccagacatatgtggctaacctgaattgctcattcataactttccttttcagtaatgtcttaacatattttttataagaccccctcattgtttgcatatataagttttacttttagatagtcaaatctgtcagtcttttccttttatagtaactatatgcttagagtggtttgtctccctttaaaatttatttaagtcatcactgctttatttgtacttttgttttcaatttttttactaatgaaattttaattcagtcttgtgtttattttggcatgtggtatctcaccagctttttctaaacagttttgccagtagtagctttttgaataagtaatttatctattctctttagagttgtcttggctattttatattaagttctcatgtagaattaaggctgtttctggtctttgaattctgtccaattggtatatttaccaattcttgaaccagcacaacattattatttattgtatatttacactcaaaaaatatttgtcaaggcaattccccagtcatgactattaattttcaacatttctttgctagtatgatttatctgttcttgaaaacgaacattagtctcttttcattaagcattttaaatactcaagtctctttgttgttctttgtgcatttagatacctttatgcagtatctggaatgtatgtataaattgaaatttttgtgcttctaatatttagatatagtaggtagtttattcatgaaaaggtctatttcttagagtatgcttaagttaagacaaaaaataggatcttttcatgcttattttttatcctttattttttcttctcattgttggcttgggttcctttctctctgtttgcaaccagaccctttattac

SEQ ID NO: 127640 - DNA, 1059 bp, Homo sapiens
cactcttccaccattttcttcccctctttcttttctttctgtctatcaagagttgcatgaaaaagcacatctctttgaccagcctccaaggtgataaatcttcatcagctgagaataaatttgatttttggaaacagccagcagtcagagtcaaggtcagtgggtaataaaactatagtaacattttgagttagagatggggagtgactgtaaagtagtgagcccatttttcttgagtttttggaaggcaaagaaggaaatcccaaaacaggaaatctcagtttattgtgtatatttgttaaaaacaaaagaaaacaaaacaaaaaactagtcttgtttgataatgacattgcaagttttgtatattatttatttatttttgtatttgtgactttttccccccaatggttgtgtctttcaactgactgtgggatccttgtcacacttttattttatgttgataatccttttggcattttaaatgatatctgtatgtcatattgaaatacagtaattaaagtggcacaacataggaggaaatcaaatttcatttaatgtttaattacataaattgactacctgatagatttttttttaaatttggagtttaacatttgaaaattggcaggaaggttttaatgcttgttttaaacatagtcatcatctagatctgtactatcaaatgcaatgatattacttattataacattatcaaatgttatatgtagtgccatcaatttatattgttttcaaagtgtaacttttaaaaatagagatattcagcagttatactaaacatttgagtctttcaatgtctgttaaatgtaaaacttgatatttattaaaagagaattttaaacttagaaaaacagtggttttcatttctgtatttcctttgaatttgtttggtatctcattttttcaggctataatttagaaactttttattttacatgcttactggccatcagaagagttttttttctttactccaacttcatgtgtaaagttttaaaataaagtgaagatgttagtgaatttgttttgaaaggaaggaag

SEQ ID NO: 127641 - DNA, 1026 bp, Homo sapiens
gaatctgttcattgaattgaagaaaagtatttttccatttccagagtacatctcgtacatttttgcattctggaacaattactgttatgctacttaggcaaataaacataggctcattagaagatggaacttgtgattttaaacttcattagtatgtatttttgttcatttctcatccacagggtccaagaaagctcagtatcttcttgttccgggcagtgggattgagtaggggagcaggaaataggcgtttgtcctctctcttttaagatgagtcctgggaggcgtgcttgtcactttccttcacattctgttggtcagtactcagttgcccatacatatccagcatcaagggaagctaggaaatatcttgtttttccctaggatgatatgagccatgcaaaaattcagaggccctgttatagatagatatatgaagagttagtatctgccacagttatatggtcttcaaaaatgatatttgagctttctgatgcaaagccaattttcaaaactatttagatatttaacatttcttgacaactcctttgcgattgtaaatcacattgacgttttgattatatgtattcatttgaaagcactaaatactattattttcctagttattgtggtgctaaagagttgtcagtaaaatctagaatctttaaataaattttgaaaagggatgacggaccaaatggaattctaattacttgatttcaacacatttctctttcatttgaatcttttaagagaaaagtgaaaagcaacattatccttgagaatttctctctcagcatctaagcagccgttttaattacagaaaatgtcttcaaaatctgttttgccattttaaagttttggctgtgaaaaagtcaattgtcagtgtgtaatggtggaaaaaatatcttaaaaagccattgatatagtatgttcagtagacatgtgttacttgaacactagtagttgattttccatagaaactttttcctcttgagtttgggtatcgttgttggtaataaacat

SEQ ID NO: 127642 - DNA, 1053 bp, Homo sapiens
tggatattatcaccctggcattggcttcagcaatgatcctattcagtcagctccttatccttgatgtttcctcttgatacttttctattcgctgatcccccaccttgctccttggttataaatctctgctcttccttgttagaatcagaattgagccaatctcttcccctcactccaagacctcattgcattagttcctccacctattgccatgggccctcttgaataaagtctgctctgccgtcttaacaagtatgatgaacaactttttctttaacaggcccatccacattataaaaggtaatgttttattcaaagtctgaagatttaaatgttaatcacattaaaaaaaaaaaacaaaaaaccccaaaaaacaaacaaacaaaaaaccccagctagactggtgtttgaccaaacatctggatatcgtagtctagttgatggacattaaattaactgtgaaagcaattgcctccactttctagatgaaaaaaactaacaagtactttttgccctgcattgcaaatgatgtagaaagctaggcaatcatgttcgtaatatgcacaccaatggctgtagagtgtagaggtgtttgctttgttcacgaccatggttgtgggtcttttctgcataggtagggaagaacaatagttgattgaggaatgtcttccagcccaccccgcaacacacacacacacacacacacacacacacacacacacacaccctctgagggaaaaagcctcctttctaccttgacgttgttggtgatgtgccctgccacacagtgtgatagtttgggaccctatgacttccctgggctaaggcccatttagagaagggcctacgctgactcttccccagttgcagttaccgtttttgatggcttcccactttgcaattccttgatgtttttgctcagagaggaaacccatctctgcggtacatggtatggcctccatttttgaggaattttgtggaggacaaggtcatggagcttgagacacatgcagtctgtgatcaggcttatgctttatctgagtaggaccacaa

SEQ ID NO: 127643 - DNA, 1080 bp, Homo sapiens
gtgggtgaattgaggaaaaaccattgttttggaaattttcttttcatgaactaaaaatgctttcagcatctgtatagatcccgtatcttcaaaatgcagcaggcatccaacttgcatcattaaaaactgttagagaataaactcttcctattttttgacaatttttgaacaataatttcatctgaaatagccttctctctgtccctctgcccttcccgtccaggtacaactccatgtaattttaggcaaattgcttccttttctttatgccctttgtttccgtctttttaaaatgaggacaaggtcgttaatgtagttctctttcaagtctcttaccttgatgaataaatatctaaatataggagttcttacagaattcgaagttctatatacgtataaattgagtttttataaagtaattttgttttatgaataggttaccaattccaagagtcacatttattttaattttctttggttattaaaaaagtccattttagaaaaagaaaaactgttaaagttgaaagcctctattttcttggctaaattggaattttgttattgattacttattctgattagtaaaagtggtttagtcacaggccgggcataaatgcttttagacagtcactgaattgaaagtgtcaacatgagagagggatccttttcttggaaatgggagcatgggatctttctgctaatacgtgtttgttggcttagaatgaagactcagagctttgttaggaaaataaacttaaattggcaacatggtgagtgtgaacctggagggcattatgctaagtgaaataaatgagatacagaaaaacaaacactgtatgttctcacttatatgtggaatctagaaaagttgaactcacagaagcaaagaatagaaaggtggttgccagaggcaggggactgggagaagtggggagatttggttaaagggtacaaagtttcagttataagatagatgaataagttctgtggatcgaaggtacagcattgtaactatagttctacagtatttttaataatactctattgtatacttgaaatttgccaagggaatggatctta

SEQ ID NO: 127644 - DNA, 1971 bp, Homo sapiens
gagcaggaatctgtttacaaacctgcagtatttattacatacctcatttagcccattcatcattttaatagaaaaatgagtcattttagatgattctgaaataattcgaggtaagctacattgctgcaggcagaatatgatttacacagatagcaccatgctattttgaaaaaaatacagtggaatgatcagcaccaataatttatgattacttgtggtaaacttatcaaatgtcttcattgtcatagaaatttgttgattagataaagcatttagagttttctagctagcttttcccccttcttccatcttttatgacaaatgattacaaagttccatacttaccctctgcctgtttcaaacactgactgtaaatttaattccagatttgtttttaatattttcttgataagaaataacactagtcactgtcatgggccaattttattggagatgataaaacctactcatatacattttctgcttagaaattaaacttcatccatttacagtttctttagcccagtgtatgcacatattttaaatcctatcttacctatccataggttacatatttgactctcaggaacacaggtaactcattgcctggaaccatagctctgagccccaaaggcatcacaaagtgattctagttagtgtcttgaagcttatgagctttgctgataagcagcatcacagtaaaagcaatatttgtttttagatttagttttttttttttttcatttaactaagagccttcaactgtactatcttcttgggtgtttgatatgggcaggacatctatcattgattcctattagagatgataaagcaaacattcaaagagactgtgaaactaaatgttgcacagagatagagccagggttacaactctgatcttctgtgccgaggtgatcttattttgggcacaatttagcaaatttagttttgttgttgttctttgtttttaacgtgtaatggatttgatttattacattagaaagggaaatggacttttaggcacgtggtcaaagcagaaattactgcagctaagagtagaaagggcaactaatcgccatgcatgtgatgcacactcacaggaagtaaaacacacacacacacacacacacacacataaaacccatagcattatgagcctacttagcatagaggcaggcagccgtaactactcgaataggccttgtgtgttcttgcttagtgaaataatgtatgcacaatcataatgctatcagggattgagaataatttgtttaccagcgtgggtgagaaatattagcactaccatttccatagaaaccattttgcatttaaaaagttctggcatgtcaaactgtaaatttcagtatttaaaaacattctcttatgtgaatccctgtattgcaaaagatactggtcaaaggaagtgctatttgtacactttcgtcaagtcatttttgaattttcttatttaaagaaagtttgccatggcctgtcatactttgggagaagtggttgatatagacacaaaaggacctggtttgtagcaattatccattcccttggcctcaaaggaatactagtatataaaggcagaaactttctctttttcttttgagactgagtctcaccctgttgtctaggctggagtgcagtggcgtgatcttggctcactgcaaccttccgcctcccgggttcaagtgattctcctgcctcagcctcctgattaactgggattacaggtgcacgcctccatgcccggctaatttttgtatttttagtagagacggggtttcaccatgttggtcaggctagtcttgaactcctgaccttgtgatctgcccgcctcggcctcccaaagtgctgggattacaggcatgagccactgtgcccggcctactcttttttatgtctaacataaagtcttcatttgtgcgggaggtaagagatgattcaattatttttgtcactttg

SEQ ID NO: 127645 - DNA, 1013 bp, Homo sapiens
gtccctttctgcattgtccttcgtcatatatttattaaacacctactgtatcctaggcagtatttcccagggatgcaaagatgaattagatctggttgcttttcttcagagtctgaagttaagtgtcaggtttgtggggaaggttattcttgccttgtgtattttgtcccaacttaagctataatttttgaatttgtaaaaccttatactgtttagaaaaaaaaaaaacacagtaaaaaaaaaaaggatgggtgaatgcataaatttagtttttgaaaatttaagcgactgtttctccaaaatgtcacttttcatccccagtttgccttttgtctgaaatgcaccagtgaagcaatcaagaagaagaattgattaattttgtgctgtatgcctttcagttctgtattttgtttgtgcttcaaactgtgacagttgaaatttcatggtaaaaaagaaaacggttttgaatttgggatatagagaaaaatgactaaattaaaggaagcagataagaacactactgctgtccaagtgaggttctatccaacgaggaagggaaacaactggggttgtaattttgaaatgatcgacatggtttatactcaaaagttctgtgtaagagaagagtaagagtgatcacttggggtttttagtatcactgaaattagccaggtgaacgaaattgcagtgtaagcagtggtttcccgggttcttttattgggcatttaaagataattttagaaatctgttgtttttgggtgcaatttagacttggattataacctctgttaaaactctctctggttatgtatgttgtgtactggttttcttgccctagacactaacctccaattatttggatatgtgtagagtattagtttgctttgaattccaaaaatgaagttaatgaattcgagcttttgcttttgacaactattgaaatatggtatttccacgttgaattggaaggatttgggccatttaggtgttagacatttttctcagtgttattg

SEQ ID NO: 127646 - DNA, 1473 bp, Homo sapiens
aaatgtgaaagtatcaaaagatttgttactcaacataactaaaatattaagcaacatgttttgattggaatagcatatctgcagtctgttctgttttacctaataaatcttgtctattgtctgtctttactgctttgtgtagctggtgaagcatgagaaactggcctcgtacattctgatttgtagatctcttatttacagattctggttgtgtggtatagatgacaaattgtagtactcacaactcctgtatttcagcatctgttgtaatatttgccaaatagagccctcaaagcacttagggaataaaagtggaatttatgccataggatgacagctgattgagagagtcccttccttcccagagtgttgtcagacatttgcatggtctgccatggccacagcaacatggctgccagtgacatttagttattgggcagttcccaatttatttaccagatttctccctttattgttgttatttattattatggaagacatacatattcattggatcaagattagaaaataaatacaaagggatactaaaatcactcaatgtactacaattcagagatagttactgttaacattttggtttgttgtgtttatattcctttttacttcccactgagttggtataaaacatttgattttatgtgtataacggtatttctccaaacatagataatagtatacactcttttgtataactgttacaataaccttcacattaaaacatttaggccatgtggtaaaagtttttatactgataaatacgtttttgtgtggtcacattttaatggttgtgtttcactgagttttccactaattactaaattaatacaagaatattatagaacacttggaaaacaaaaaattacaaagaaaatcagtattgttataattctgtcatctatcattaatgtttagaggtataaagttctttctcccttccccatatgtatatattttatacatgctttagggtctcagattatgtatcccaccaccctccaaaccagtactgtgcggtgtggacagtgatcgcaagcctgctgttgtttgttagttccttgatccccagctggagaggtgggcatcttcagaacccataattgatgtgggagtcaccccagaaaggttagcattgctcctgctattttggagggcccctattgctgccattcttaattctaatatgtgggactctttgagtaatggccaagcattgcttcgttcctctttatttagaactcaaatgttgcagtctgcaggaaagtaaagattgtgtttcacacatgtgaagtaattaaaaagttgtctttcaggagagcgagggtgaaagcacgggagctgatgtgatgttgggactgtgaaataaaacgattcccaccccttaccccacaccccccacatctttctggctcactaacagctgacatttaggtttctgtctccttagatgtgagt

SEQ ID NO: 127647 - DNA, 1017 bp, Homo sapiens
cactgaacatttttctgaaatgtagtttttaatggctgaataatgttctgccttttgtattcaacataatttattaagcaatttcttattgttatttgatagataaaagtggagctgctctgggtgaaacctggagtgttgactgcttagcctccacttcggccttcctagaaacccagatgttactcctcggaacctttagtcctcattggagcacagttgggaactcactggacagggaaaatgggaccatggaatggagaactttgaactgaagagtgagggggattttcctagttcactaggcaattgggaaacactaaaactttctaagaagaaggctcatttctagtctctcccattctttaccttagtcacttctctgaaagaccaacccatgaccagctgcaaacagagaacatgaaaggaagtccatgcgtaatgaatcagtttcttcagtgacaaatctggggtcccggttgcatgggcaaatagtgaagccagaatagaggtggtagaccaagaaagaaatgtcagtggactgactggcagctgccctaagaacagtacatgtgttgagtggaacaaagggaataagagaggtggaagcaaagtcagtcattgtgaaaggggaataatttcagaattaaagacagtaagttttgagtaactcaactgaaaattaaatttgttgtacgtctaagctgaaggattttttgaggaagctgaaaaaatatcaggtcagtgggttgaaaagtcatttctatgtatattaaagtctccaaatttggaagctaaggatgtagtggaggaggttaatagtgctcatgtttgaggaaggtacgagagcaaaactcttagtttccagcgggcagaagaataccttggttggcatttctctttgcctcccagcttttactcttttgaatcttatctttgaagcactctttctccacctctttttgcctgaatttggacatactgtcttactctcttagtttatggagaccagcaaga

SEQ ID NO: 127648 - DNA, 2067 bp, Homo sapiens
accaacataacaattttacttttcctttttaaagcatagctataccttcagggatatgatggtatagtagggttattctctcaaagaagaaaaggcagtcagaaaatctttgttcatgagattagactgaaatcttcagtgattcagtgattactgaatgcctctatgtgccaggcactatggcaaaaatcagtgccaaagtaatttatctttatcatgtacaatgaggggttttagtgggttgtaacttaatatgatctaattgtgtgatgaggctactgagaaatctaatgcaatcttatgcttcattaatagaattagtattgtgtacagatctagggaagtaagattctcctgtcttagtttgctagagcatgtctggagggttaggtttagtttggagctaacagatcgattggagtcattccagaagtgaggagccctgcagttgaaaggcgtggtcatatttgcatatgaggattgttggaaaataggggtaatatactgggaggaaagatgtccttattagttccataatgtctggcttctctgctgtgctgtaacatccacaatgacagtgacctgtccatcttgtttatcgctgtgtcctcaatgcctagcacagtgcctggtgtgcattcagtaaatggacgagttgagtaagtttggagaaagagacgatggttaccttcaaatatttgtcatgtagatggcttttttttttttttttaaacggagtctcattcgcccaggctagaatgcagtggcatgatctcagctcactgcgtcctctacctcccaggctcaagcagttctcctgcctcagcctcccaggtagctgggattacaggaatgtatcaccacgcccagcgaagttttgtatttttagtagagacggggtttcaccatgttggccaggctggtcttgaactcctgacctcaagtggtccacttgccttggtctcccaaagtgctgggattacaggtgtgagctgccaccacgcctggcctagatggtttgttaattacttaaattttcagaggccaaatggaagcaccagggatggaatttttttggtgggcagattttaattttacataagaagaactttgtaaaacttagttatatttggcagccaaattaataagcttcttcatgtatttgaatttggttatttgaaatgcttgagtggaggctgcatggggatttacctctatacctgcttttttgatagattatgggccaagatgatttcagctgttgacctttttggctatgtgtttctatttttaaattatttcatttgatagaaaataatgtcaactaataaaatattttttctaacttagacaattcttgtcattttagactaaagcaagccaaagagctggaccgagagagggctgctgccaatgagcagttaaccagagccatccttcgggagaggatatgtagcgaggaggaacgcgctaaggcaaagcacctggtgagtattaaaaatgtaggagaaattttcttgcctacaaggaaatctctgatgtttgggaagagctaagtactctgtgccagcttttagtgttgataatattattcatgttctctttgctcagattttgatttttgccttttataagtagcttacagtttaggtttaaccatcaaggactttaaaggcaggtaactctggaagtattgaagaccaacatgcagacatgtgtacatgtttcacacctgaaggattgttgtctgcttttttttctttttctttcctttttttttttgagacggagtcttgctctgtcgcctaggctagagtgcagtggtgcgatctcagctcactgcaacctccgcctccggggttcaagtgattctccagcctcagcctcccgagtagctgagattataggcacctgccatcgtgcccagctaatttttgtatttatagtagagacggggtttcactatcttggccaggctggtcttgaactcctgaccatgtgatccacccgcctcggcttcccaaactgctgggattacaggtgtgagccaccgagcccggcctgtct

SEQ ID NO: 127649 - DNA, 1007 bp, Homo sapiens
actttcttaaaaacttgaggttctttagagtaaagtcaaactggctagtttttaccctgggactaaaatatagagaactagattttatacctgctgtccatgaaagttgaatgttttataagtagttaatttgttttcccatttaaaaggacatgtaataatatttattataggagatttggctggcttttaggaattcattttgctggtgtaccttaagtccctcgcctgattgacaatatactgaggaaagagctaagttgctagggcttgaggtctaagggcagcactgactggtatttgtttcattaagcttaggcaagctatccaattacttaatgcaaacaagaaaagtttacactaaactcctacttctttgcttgaaactctagagaatttaaatgaggagagatatgtatttaaaagaaagaaatttaaatgaaacttaaatcagggacttaatgtagaatatattagagcaggagatctaaaatattaagtgggaaatgccaataaataaaaaaggaatgtattctctaagatacttggcatgtttagttttgttttgagataattcttaaatctttggaaacccaagttaataatgagagacttattttatctcctgcctttacatataaagtcctgccttcccttggtcagtgagagcctgggtcttctctccttagtgaagtgttcccaaaacaacatggcttctgattttatagctccactatctgggcagtagttttcagagaggcccagatggcagggctgtcttatttggttcaaaaagagaaaaattggttgacagctcatctaccttttgcagatggctgttgaatagtatagctccatgcggtataaaaccaaggggccagagaggaagctttgaaagtaattgggggtttctgaaaacataagcagtttttctttgcaaagtggttttggctcagtaaagaatttacaggaaccattgaaagaggaaacttagaagaaaataattg

SEQ ID NO: 127650 - DNA, 1027 bp, Homo sapiens
agactgaggcaggagaatcgcttgaatcccggaggtggaggttccagtgagccaagatcacaccactgcactctagcctgggagacagagtgagactccgtctcaaaaaaaagaaaaattaagatgccatattcatgtttatgtatttattttggaatctcaatccacatatattttcttccaggatttgaaacgatttgagctgagaagtgttaagcttctctgttcccttatttttgtcaagtcttattaatcaaaaactgtatacgtgttttgtccttatttttaatagtctaataattacttcattgaattacccagcttagctcttctgtttaaaaatggatggtaaacagtatcttgaatgctggttcggcaggttctgacaaaatatgatgcgttaaaataaaattcattgttagcattaaaatgacctttgaggttgtcgtcactcatttttctctttcagtgtttgaaatagcctttctgcatcaagtgcattgcagtatcttgtatatattgcctatgtataacggtcacggttcaactttagataagtcatttagtcaaatcactttatctctagcaatctccgtttcccatttattcttacccattatctgaagttcttatcaactttctctccatagtgtaatggccttatgtattacatttataaagtaattttctaagctagaattgtatagaattacttatgtgtcaacctacatgaagataaatctgagtatttgtgaatggccaaatgagcagtatccaaattcagaaaaacatttagggccattaaaagccaaaccactttgggaaaggggtggtaataatttagactctggcaaactctgacttagtgtagtatacacaaattttaaaagagcctattttaaaataaccgtgaataatgtaagatttaaaaactgtccttacatgaccacaaaggtgagtagtataatggaaactaattcctataggaaagtttactctttaagatgtttaagaagtatgactttgg

SEQ ID NO: 127651 - DNA, 1578 bp, Homo sapiens
gcatcacatacgtgttatagttgaatttttgtataggaagcattttgtgttgggatatttggaaattaccgtaaagataaaatggattgcagaggaagccagatataatgaatattcatcttctgtgtaacatctgctatacatcttaatgaaatttatagttatccctgaaatttttcttccttgacagtatttatttatttttaaaattattttaaccgggagttgaatatgagttgataccattctagctgcatataaaatgacagtattggatgcagggaccatttttcagatctccatgatagccatcatctccacagaattgaacttagacctcctgtgaaccatagagtaactgggaaacttttgatattcgcagagtgtaagagagtgatgagttcaagcattggtctctgacaaaatttgttctggattgctgtgaacacatttggtctcttgctgtttttttttttttttttttttttttttttacaaccctgttagttacagtgagaagccataaaattcttcctatgcaggaaaatggtagaagcattttttgtgtctaaaattgttctttcttaaaaagaaaagaaaagaatctttttctggtgtggtaacaaaaaattgaaatagcaaattcaaatagtagaaagtgtaaaaattcacaactgatgaggtgatagcatacttttttttggtacagtgacagtaatatagcttatgagctttatctgaagtaggtgaaatactgattatattttacttgagctatcattgacacaatggattagaacttaatgagggggaggtagtttgattttaaaacatccttgattacatagatttttttggaatggaggacagattaatcttcctgtgatatgtggatcaaaaactatataggcagccagtgggctcatcttgaacacctacagccgttctttcaaaaatgatagaaatggatattgtgaagtaaataatgaaggtggcatagtgaattcctgctggcagagagttaaattattcattttgttagtttagctaacatggttcatgctgcgtgggatttgagcactatgtcaatgactaatattgcataattaaaaagcctcagttcctcgggcttagaatgtagctggaatttagaaatggttgttaacatcgtggaaatatagttttatttgtataagtagatgctgtttacctagccgttttgaagttttgactttatgaaacatttgtgtagcatgtaggcagtatgccgaagatgtttttaacgatagttaatcttgcagtcccttccccttgctttgcgtcccaccccacggtgtttttcttcttgaaaggctgctctgtagtaaatggtccgtttcgaaagcctggtgagcacactccctcagcatcgcaccgctgcctcttccctttgcttatctcttccacattaggttgctgattagcgacagggcttggaaggattgccaattctgtaacgattcaatttgggggactgcataggcactgatacctttacaaagcaacgccgacattagtttattaccttctcaattttag

SEQ ID NO: 127652 - DNA, 1045 bp, Homo sapiens
aagttaatgtcttttggagttggagagatctgatttgaatgccagctttgtctcttagtaatctgtgatctcaagtcagtgatttacccttccaggcttcactttcttcagttaggaagccaagttaataagaatatctaccagataagcatgtttttcaaatgaagattaaataagataacatatataaagcacctggcacatattaaacttttgatacaaaatgcttattcttacagataactcttttctctctttgaagtgaagatcactagagtgtgatggttaagagtgtggtcctaggagtcagaccacttgggtttgaattccagcttcatgggttactagttctgagaccacttagtaaattacataacttcttgagggctcagatacctcctctgtcaggtggaggacaatgataactctagatgcctcatctgtaagatggaggacaataataactcttacctcagggttaccttcagcgttgttttgaggatcagatggttcattccaggtacagttcttagtacagcacagcgactcacacagaatcaaagtaaacgctctgtaaaaatgattatctatcgcatccatctgtgtattcattcatttcagagaatcgtttcctagttgtatagtgttaaaaatctgtctgctctcttctacatttgccctttttcattttttcttggctttatagtttctgaagattgtaaaagatctctttgttgatgaaaatggaagaaaaactagctaagtgaagctagatgagctttttctcttttgtaggagccattgctcctttctggaaagctatgccatgtgtaattccaaaagtgctaagtgagagaaataagaagactttttttcttatcagattaacaagtaattaaaaaaaacaacttagtttttagtttgaaaaatattccttttagttgacataagttttcactttgctattggtgctaaatggttgattgttgtatattgcttttttgcttgttcagataatcattttcaagggcttggaggccctctg

SEQ ID NO: 127653 - DNA, 1039 bp, Homo sapiens
tcataaaaatccgtaaattacagggcattttgacttcctgatggggttgttggattaaaaccaaatgataccaaaaaaagtaccccacaaagtcaactgaaaccactaatgtgacaagtgtctactagttaagaaacacttatgcaacagagtttctgcaattcttccattatttctaccgaaccaggtaggtttgacataggaaattcattccttaaacaactgaaaacatggatattgtgtttgtttctttaacaaaaaaaaagaaaattaccagggaaatacatacctataaaaggaattcagtaaatacagatgaatagttttctgtctccctcctttcccttattcttactccctacaaaatcatttatacattcttaccctagattatttatcattttgtttttttaaaacaaaatgagcatgttatataacgtgcttttttctactcagtcatatattgtgatctctcttcccatgtcagcatatatagattcaagtagaccgtctatctgataataaatgccatttaagaagactttgcctaagaaaagtaatattactactactaataatatgtaatagtaagtaatcatttgtaatagtaatagctaacagttttgaatacttcttttgtcctaagcactggtccaagccctttgcacatgtgattatttaaccttcatagcagccctatggggcaggttctgacctgctagtctcctcactttgtagatgaagtagccgaaacacagaggtcacttgcttatagccacatagccagaaagcagaggagctggaatttgaacgcaggcagtcggcatctggagtcacccatacttaccatcactcgatcagactgtgtttcagaggctaaattattttctgatccagcagtaatgttacctattatatgtctgtctgaatgtttttttttttttttttttttgaggcggagtcttgctctgttgcccaggctggagtgcaggggtgtgatctcagcttactgcaacctctgcttcctgggttcaagcga

SEQ ID NO: 127654 - DNA, 1122 bp, Homo sapiens
attgattaaggcagtggttctcagctgggagagcatttgatccccagggggcatttgacaatgtttggagatatttttggttgttaaaatttgtcaaatgttattggcatctagtggatggaggccagggatgctgtttaacattctgtaatgcacgtgacagtcctcacctcctgctgcccgccggcccccctcttatccgttctccccccaccaaaaaagaattatttggctcaaaatgtcagttgtaccaatagtgagaaacccagggctaaggtattcttcaaaccagcccacattggatttaattgttctggatcacttttggactcagggtttgatgtctttgtttttccacacaatatcatattctatgccgtcaaaacctcggtgacacaacattccttaaaagattgctccactcttattcctggaatttttccgagctgctgacagcagttctgcaaattttgatgcttctgtgcaagcaatgacaacagcagcaggactgccgcctggcagatagcaattttcagatgcttttaggtttgtgaaaacgtggaaaaatatgcatcctagaattgataaaatgcagtccatgtacacttcagaccataaaatttgtcagctcggaatgacttcttgaatgtcttactttaccttctacttaatgcagaagccctttttaggcatctgtgactggtagggccacatgcttttagattccattcaaaatcatcgaaactgatgatatttcattaggtcatctaaaatttaccccaaccccattaaatctccactcctaaatctaatgcagacctgccatacttaaaagttgccttagaggaggtttcttactaaggccacagtgacaatacagttgctaattattagcatgatgactatatatattttcatttttacaaaacatttacatatggactcccaattcattttgtcttagatttatcctgttttatggggatcttaagtgatttgcttccacaatcatgtcccgcacaaatcgctgatagattagtgcacacacgaaaatttttgggtctaatttgaaatcatggttttgcttatcaaaacatctagtagacagaatagttgctcagc

SEQ ID NO: 127655 - DNA, 1014 bp, Homo sapiens
aatggataataaacatgtttatttctaactcttgagatttatcctagtcatcttttggctcttcttccaatcaaaccctgtagcttttagaagataaggagcaggacaagatttatcctgtaacctatgctgttagtcatttagctctaatatacttggtgttgtatttcattgattgcatggatgctttgattattattttcttaaacaataattgctcttcattttaatgaatttattgaaattataagattaatgagtatttctattgagctgaaaatttaatttggctatatcttatggtataactttttgctcaactatctcaatcctgggagaatcagagtctttatctgaaatctgctgcttatattatgcaggtacatatatttattttgttctcttggaagatcttcatggtttctctttagtgtgtttaaactagcacatgaaaataatagactttacaaaattggccatgacctatatcagcaaatggtgaaaccagaaagaaaaatacattaaaggaaaaatcccaaaggaactgatatttctctaagaagcaaggtataacttttattaagcaacttaaagagattgtttaagaaatactgtaattggggagggaattatagtgtaaggattatgcaaaaaaaaaatgaagtaaaagggaattacaagtgggaaaagttacaaaggaaattagtatgttccttgaggttcagggaatctatgtatatttcagatcatggttgcattttcagtcttctgtttttcatggttgatgagttcatcaagtccttccatcttttggagtcatttctattcaccattcaaggatctatctaaaatgtataattatgtctccccgtaccattccctcccttcatatctttagtttaaccagtttcggtaaacacaggaatttgagcatcacctgtcacatagaagacaggtgatgtgtattgaacttatgttacactttctttgaggaataagaatttcctcacattt

SEQ ID NO: 127656 - DNA, 1466 bp, Homo sapiens
gccactgagaatgcaaaggaggaagtgaggcgaattctggggctgctggatgcttacttgaagacgaggacttttctggtgggcgaacgagtgacattggctgacatcacagttgtctgcaccctgttgtggctctataagcaggttctagagccttctttccgccgggcctttcgcaataccaaccgctggttcctcacctgcattaaccagccccagttccgggctgtcttgggggaactgaaactgtgtgagaagatggcccagtttgatgctaaaaagtttgcagagacccagcctaaaaaggacacaccacggaaagagaagggttcacgggaagagaagcagaagccccaggctgagcggaaggaggagaaaaaggcggctgcccctgctcctgaggaggagatggatgaatgtgagcaggcgctggctgctgagcccaaggccaaggaccccttcgctcacctgcccaagagtacctttgtgttggatgaatttaagcgcaagtactccaatgaggacacactctctgtggcactgccatatttctgggagcactttgataaggacggctggtccctgtggtactcagagtatcgcttccctgaagaactcactcagaccttcatgagctgcaatctcatcactggaatgttccagcgactggacaagctgaggaagaatgccttcgccagtgtcatcctttttggaaccaacaatagcagctccatttctggagtctgggtcttccgaggccaggagcttgcctttccgctgagtccagattggcaggtggactacgagtcatacacatggcggaaactggatcctggcagagaggagacccagacgctggttcgagagtacttttcctgggagggggccttccagcatgtgggcaaagccttcaatcacggcaagatcttcaagtgaacatctcttgccatcacctagctgcctgcacctgcccttcagggagatgggggtcattaaaggaaactgaacattgaaaaaaaaaaaaaaaaaaaaaagactggatccaattgctgaaaggacttgaaaagaattatagatgcatttttttaaaagtatcatatatgtttagattttactcatccttgttgctttcttaccatttattctagatagtttaatattatatgctttagtgaaagctaacttatttttgctgtttatagagaaattatttcttattataccctcacttccttaatttcaaaaaggaatctctgtgaattattataagttaattcaggatgagtagctttaaatcctttttctttttccttcattataaacatgatatggccttattgaactgtttgttcagtattcattctgatattgtcatatataaaacatagttttaaatggtcaagcgctatcctgtgtagataattttgatgggaaatgtgtcagcttgaaataaatcgatgtttggg

SEQ ID NO: 127657 - DNA, 1658 bp, Homo sapiens
atctataaattccttgttatttgaaatttgagtgttatttatatagggatttgggtaaagtaggtttatgggaactaaaatgtaatctaatgaggtaatggtatttatcagaaggtgatataattctcacaacaatcttattacctggatacttgtataattcccactatacaagcaaggaaactgagttacggggaagctaataaacttggccaacaatatacataaacacatggcatggcagggttttagatcgaggcattctgattctacaggcgaccttcttagctgctctgctgtgatgccatgggcagagaaccacagtttcagaaatacatttaccagcagggacactcgaggtgatctaattcatggccctcattttagaaataataaaagggctcttcgactgcgactgaatggcttgttttatggcttacttaccctgggatggaaaaagcattttaatgactctttaatttcctcttattatggatagctgggtagtataggggagtgagagatcatctctgactcccctttttgctcttgtgtaaatgggctctttggctggatctgcaaactaaattgacaccaggcatattaacaagtgaaaagcatatacatcatcgacgtgttcatggggatcttcataagagagtgaatccgaggaagtaaccacagcaagatgcttgtatacttttttgacaaagaacaatgaatttgagaagaaatgacaggacaagtaaactttggtgaggggcaataaattttctaggggagttactgagatatatagaggggtgtataaaactagtggaagataagggttacttcattaagtatatttattcaggtctgttgcagccccagttctcaatgtctggtggtaagggctgttttctcaccccagtactggaagggtacccctcccagaggaatcttgatggcttactgcatgcgggaagagaaaggtcagctagccccttctgaaactacaattcctccagtgttttcaacttgaaatagtcaataggccattccagcatattttgggatggcatgtccttcactccttcagtagggataatgaaaaaagagactttcctggggcagctataggcttctgctctgaggtctcttccagctcttgcaagtatacccaacatagctgatttttagcttttctttctaagtctgcatgtttttgaggctatcctttgattcttctaggtctgacaaagggtagagttggacatacgttttagtaagatatgtggggtcgaatataggttccactgttctaatggagaccctaagttacatggctcaaaaagttaaaattttatttttctctcatgtaacattttggataatttgatgattccctaatgttgggacccagtcttttctgtcttaggctcacaactatccttgagcctgtgtcatgggggatgactctgaagctgcgtgcaccctgttcattcacattttcttggcctgaacttagtcactaggctattcctaactgcaagagaagctggaagatgtagtcttccttctgaccagccatgtgctcaaccacaaattgagtttcagttattggagggcagaaagaatagatatggggctgctttgtaggctgctgctcggggcag

SEQ ID NO: 127658 - DNA, 1034 bp, Homo sapiens
aataaaagactgtctcagaatgtgttctcttggtgttaagccttggaggtgtgtctttgtgagtattcaaagggaaacgtaagatagttggagagaatcttagggacatgcagaaatactaccgcagtgtgatgaagagaagcctttttaagattgtaaaagtataaatattgctcataaaaaaatagatgtgtttcaaccaagcttgcttttaagtgaatatgtataagtggattatagttctccatttacatcttttataaaattggacatgctatgctggaaaaaaagggcccttggatataatttacatttcctaggaatgtggcagttctgtcattgcatgcttaaaaataattattttcttacagaactttacactaatgccaaaaacattgccagcacctcttatgtattcgtattttacctaacttatgcccaggcagactgctttagacctgaactatgtttattttttagctgatagtcgaagtcctcataggactattagcgtatcaaaggcagtattgaattagagcagttgtttgctttgggtcttagaaattcccagagtttagcagcagaacatagaatagtgaaagtgggttcttagatggggacagccaggacagggtgttctaaatcacattcaagttttgcgtatatgactggagtagatggagatgggggaataatgaagttatgactcaatcagtcctttcatttcattctgcttagtgaattttgaataaaagaaaacctgtgaaaaaggaagatttaggaagatttgtactggacccttgctgctattatgcagaatggtacatgggaagaaaggatggaaaaataaatcaagagcatcgcttcacttaggttttcagcaaacattgggatagctgagacattttttcattaaaggttagcttgccagaaaggtggttgagagtgagtgaattattagtatgtaggtactatgattgttagattatcattaaacaggaagtagatgactggatggagccttgaagaattac

SEQ ID NO: 127659 - DNA, 1541 bp, Homo sapiens
acagaataaacaattacaaaagcaaaaatatatgcaaacaatgtaagacctcactaaaaaaagtaagattcaggcttaagtattagttcttgcactgctataaagaaatacctgagactgataaagaggtttaattggctcatgagtctgcagtctgtaggctcatgactctgcatggcagtatctgctggcttctggggaggctttgggaaacttacaatcatggcaggagatgaaagggaagggggtacatcacatggctggaggaggaggaggggcagcgagaggtgccacacacttttaaacgactagatctcatgagaactcactataagaattgcaccaagagggaaatcagctcccatgatccagtcacctcccatcaggcctcacctccaacactggcgattacaatttgacatgagatttgggcggggacacagatccaaactatatcagcatatacatatgttgcgagatcctggagggtaaaaattaaaatttacttaatttaaaatggttagaacctataagtttaaattatttgtgtttcttaatgttctagtcagttctctgcctacctctcccctaaagataaaatgatcatattgaagtttgttattttcttcattaaaaagcctttgccttctatatttcagcttcttctgggcaatttgttttaatgagggtgactgtcatagagagtttcagttcagttctccattagtgatgactggtaggtagagcagagacaggacctgaaatagaatgttagagtgcactgaaatggcatgtctctcctgtgcgtcgtgtaagcctgaaaaggtttgttttattgcttttcactgggtgagtctgaacctcttcgtcagttgtcaggcctgacagcttaagtgtattgtagttgcttccatccttacctaaaatctagttctactctttcttttgttaattaaatgggaggcattcacttaaatgcattttatttcctctcttaggtggggaatcataagctgtttcttctaaactgttaagcccctctgtctgagttgctccagagatactaagtaactcggatgctgttgacaggaaaagctttaggtagaggggaaaaaaacgactgagcacatttaccgctcagcagggttgccatgctcccctaaccccgcatcatgcagtgagtatgtgcgttgctttccccaggccagcatcctggatcagagctgcaggacttgggaggcagtgcctcagccctgctgtcagcctcatctcccgcctggggaggagagctgcagatttgtgtgagcttccatgcagcttcctggattccctctcccaagtctgccctgcagacccatccagtggactgctcttctgccatatacattctctcccttgactctttccagccttgggctttctaatcattaccaacactttacagtctttttgtatttcacaaaaatagcttgcaaaagcttttggcctgaatttttgtaacagtcttttgattacaatagggctggagaatactattaact

SEQ ID NO: 127660 - DNA, 1955 bp, Homo sapiens
ttttctgacactttatcaccagagtcattctttaggacacttagcattattatgtatgcatttttctttttcatataattgccaactattttgaagaatgggatgcttcagattaacgtcttgggagggagacacaatctacttgaccctgatttaaaggaatagtggaagtgggtggttcttcaccacacatgtgattgttactagggattcttcatagactctgtcatagcaaaagtattatatttggcttctcatgacgtgtcccgtgactagcagagtgttgctcagtggaatggcttgggctgaatcagtaggtctttccaagtataaatttgagtgctcactagaccagagagaggcagaggcgtcaggatttggtgggagattctctgagtgttgcaaatagtccccatccctcctgtgcatgacccaagagtttgctctgagacacctattgaataaatggccagccagcactgtggttaggtgaaaggagcacgaatattgatagatatttaagccctgacgtgactgagcctggccttcagctttgcctcttactatatttgtgatgtccaagagtgacaggggctaacatagctataaataagcaactattaagaaattgtaaaaagcagtgactgccaagagaaaaatatagagaaaatgccgtgtgaatttggaggaagtttagagtgataggagctgtgtgccaaagccactagtctttcttgggcaattcccattatggaacaaagggatccagaatgcattttcccaaagaaagaatgagtacagatgaaatattgttgttagaataattcttcaggcttatcatgggtttttgggttaacttggaaacccaaatagcattttactttttaatgacgaatatacaaatgagctatggcacccctgaagagttggcatggttttccatagctgcggtcaaggttggctcctttctgtacaggttttccatatgtcttgtgagagggtttgaaatatcaactttggattccaacatctgagttcagttattgtctctatgcagttttgattacaagcaaacatttgtatacatacaaatgtgtgtctgtgtatgtgtgtttgtcacttaagaaaataatgtgtcaaccacagatatgttagtatgagcattttaacagttcgttagtcactgaagtttttttgcagtacaggctaatgccaaaggcaagctttctcctgcttgctgttttgcccagggctggcatggctggtcagtgacatcaagggattgtaacaattcacttttataatagttgatataattttggttggcttttgtttattcactatttcaagtatgatggtggtggttttttgtttttgcttttctctgcttcaaagctatcaacgattgcattcctctcctccactaaactttatgtaggagggagggaggatttagtacctgcacatggaaatactttgatgctgtgtcgggtcatttttcagggagacagaggccagagtctgtgaaggtctgtagctgcagaatggttagcacagaggcaattgatacaatgagggggctcaggttttgggaccagccagccctgagtcaccatggggctctttataacattggaataatacttaactcagggctaacctaatgcctagaacattgtagaatcagtagagactaaattggcatggtattggattgctgactagaaatacttctatctcaaccttataaccaactggctgttttaccttgggtatgtttctttatttctctgggccttagtgttcttatctgtcagatggtggaatggactgttatctctaagattcccttgatagattctgagctttttagataagaaccattttcattcgtctttgtttcctaacactgcgattatacttggacaaaacatttttttgaacgaatgattaga

SEQ ID NO: 127661 - DNA, 2271 bp, Homo sapiens
ctgcaagggtcactcgcagaccttgtctgtatttgatgagtagcagtagagccttgctctgcatttcccaatttattatgttacgctttgcagtttctcccatccctggtgtcattgccctagtctggccaccattatctttttcctgcattaccctgacagtctcttgcttggggtccctgcctttagtcttgcattccccggtctattctcactgcagccctagtttctttccaaagcatgaaactaatcatgccattcctctgttagaaacttgagccctccaccccaccccggccttcctcttaggatgcagcccaaatctcttacatagccagcaaggtcctgtacaatccatctcctgctcgagtcttctctgggaatctcatgggattgagcccaaatactgcttttgtacaagaccttgctggcagacagacctttgtctgttgtgttgaacttctttgtctagtcatattgtagttcttgtatatcctcagacttatccttttgagtttttttatttttgagttggagttttgctgttgttgcccaggctggagtgcaatgcctcaatcttggctcactgcaacctccacctcccaggttcaagtgattctcctgcctcagcctcccgagtaactgggattacaggctcccgccaccacgcctggctaattttttgtatttttagtagacatggggtttcaccatgttggccaggctggtctcgaactgctgacgtcaggtgatccacccatcttggcctcccaaagtgctgggattacaggcctgagccaccgcacccggcctccttttgggtttttgaccgtgttgttccttctgtctgaatactgttccaccttctagccctgccccactgctatctcacctcttacctgccttttgtctagcaaactcctgctcattgttcagatccctgcctagaaaccacttaccccaggaaacttttaatgacacccagtcctggtgagatgccccacctgtgtgggcctgtggtacctgtgcacgtctctcgtagcacacgtcacgtggttctgccattgcccgttacacacccctctcctccagatcccatagcttctattttctcattggtcctcccaggacctcctcttctggcacttccttcagcactcccccttgctttggtgctgagctctctttgccaaggccgttatagaactgtgtgtgtttgctgcaggtaaacattgacctgttgagaccagataattaggcaaagcaggaaaagaagaagtctcagagggtcgaggagatttccttcaagagccatttcctcattttctcagtgtggactttccaagttgataccattttgaagagtttccttttcttgtgttactaattctctttagtactgatccttgtaatagtatgtacttcattgtgttacaattacatgtttacttgtctgtttttcccatttgattatgagcctttgaaagaagtgtatgttcgcttcccatgttctgtacgctcagccacagtgaccgtattataaagttaggtgcctcataaatgtttgtggaatgcgtgagctaaagcaaatcagataatgaagcctgatatgtacaagtgcctgtgtccactaagaggcaagcaggaaaaggggtctttctcttaggttggttccactgggcatgggtgtgagtgtcttcaccaggctcctgatggtgcttatacaatgccagtttcaggtctcaatcgtagcagacccaaggaagcccttttggaagaggcactttcttgagtaccatctggggaaaagtacgagtctgtggaggagtggctagggagcggggctctggatttggaaacattgatgtggaggttcatgtcctcctcctagttactaatttagtttagaaaggaaatcatctgtgtagacttgacaagttttggtgagtgctgtagtgagttgggattttcccttctcggaccctcccgctctcagttcctgctaccctcctcactttcctcctccattgggtcgaagttaatctgacattagtacctttgtcccctggaattttaggctaggagttttaggtgaggtttggttagggtgtctagaggtaggtccctaacttggaaaccaagttacccctggcttccttttctagtagaacccgctgctctcttcctgttgtcaaaactctgggacacttgagagtggagcttttcttcactctatcttctcctgtgtggcttttctcgtgtctgatctca

SEQ ID NO: 127662 - DNA, 1060 bp, Homo sapiens
tcagtccttttctccccaggcctaggacaccttttctctgtgctacttgattcatctctatgttggatttatttttgagaatccagaaaacctttaggctgactttattttaaaattgagaggagggcatagaaaacttcctttcttgtcattagcaatgtgttttgtattccgtggtattttagaatggtcaaaagggagtcacacaaagaaagtgctgcagtgggagagagaatgaactagagataaagcttggtaggttctgaaacatcagtgagttacatcttccgatcgttttctgtgactaggaacttccacccattgatttcctagttaacggattaaccactggcttcagctgctttatattatgtcttcagaggtccctgcccttgttactgcagggactttgcattggtgcttctaggtggtatgaaatcaagtgggccggacactccctacttgcccctaagttactagaaagaagcaactgttttcttaggtaggttgtataatgtagattagaaatatagtaatgtcgtggagtcacagtactcaggagctggaagttaactcgggagttatgacctagtaatttcaatgacagcagagaaaaaagacgctgttttaaagaagctccccatttttgctgctgtagattctggacactaactttaaatggaattatgggatagtggattgtattttctcacagaacaagtgttgttatttgtcataaccaagcaaatcatgggtgtcaccaaaactatattaagaaaactagataaaacagtgatataaattttgtaatcatgcttcaagatttgtgaaataaaatacggcattggttagtcaagcaaaactaatagaatataaagcataggacatatacttagcaatactatttttgatttaaatttcatacatttgttgtaaacaatattaacaatatttttgcctttcttggaatttgacagatttgagagcatcatctggatggcccaaatctcttataataagttgcccaagggagtttcaaatgtacattttcctattgcaa

SEQ ID NO: 127663 - DNA, 1561 bp, Homo sapiens
tcgcatgtaaagctgtttgggcaaaataatatactgtgtgacacacagcagattgtaatgccactttaataaatgaatgtgctctcaataacttaactgtgtccttgctgcctcaatttttttgctgcgttatctcaactatattggtttgcttttataccagataatttttttcttaggctgacataaggagatgtcattgcatatagttataaacttaccttttcattaacatcttgcatcttttgattttaaaaaatcaattttgggtgctgattgtttcctttcaacctgatcttttagtttttctggcttataatgaggtcagacctctcatggttgaccctacctaccgctgaagaatctgtccccaaatcaatatgaagaaacagacaggaaatgatattaggagatgttttgttgttttcgtaagctactggcaaccagataaaaatgatgaatctggaaaaaaacaagacaaatgacctaacttttattatcatcctcactgtagaagtttctctgtaaatttctcgtcattgtgaaaaataagaaagatttgccagtttgtgttaagtatatcactgagatcactaagtatttggcagccttaacaaattgcaggaaaccaatttgagcaggaaataacacagcctaaactaaacagccaattttgggaaacagattcatgtataagttctgtgtatttttctcccagaatctggccctcctagttatttttaaacagctctttaaggctcatttagacataacactgtagggagagttcagagaaaataagcttattcctttgactcgagttacaagaactgaacatctaggtttccaacttttaatatgtgaaactttgtggatgccagtgtctcaactgtgtactttttttgtgggctgtaatggttgatttgcctgactgttcctaatagtaagaaacctaattgctattgaattaaaggcattaaatctaattctctaagtcagcatattctgctctgaaaaagaaatctgccaacagtctagggttgaagaactcatggttggttccatcagtcaacaagtgttagcatggccgccatctttgaccttcaaggaattactagtttggtcaaagcatatttaatgttacagtgtagtgaatgagtactagtttagtcgcctcctctgttaatatttttgagaaggtgaatcaacatgtgagtgagatagaatgtataagaggtatggaaagtgctttaggaatttagagaaagagtgtcaggagctttggcaggcaggcctggcatcaggggaagtgaacttgagccaaacttgaggctaagagggatgggaggggggttagagtagaaggtaatcctggtagagttagcacacagaccagattaattcagataaaggtttcttgtagggtctcatgggtgggtaggttgaagtcaatgagtttaattctatcctatagggcctgggcagcttcagagctgttctatctcattttaggatgcaagtctggaaagttacattagttgtgccttcagatatacccaga

SEQ ID NO: 127664 - DNA, 1373 bp, Homo sapiens
attaattattttgcccaaagtcacacagctggtgagcaatggagatgagagttacattcaagtttgtctgactccagagcaaatgctgttaaccactttgtcttattttaatttgaatgacatcttgctttagaaaggacgtgatagaaactagttggaatgaaggagctgctttttagtgatgttctgcttgaactaaggaaagaacccgttgtctataagtaattgttggttgttctagctttttcccatattggcctgagtggaaggagagaaaatgttttctctcttgggttgttttgatatttcgagagagtggggatgggtcgggaggttttctatgagtgcctgtggtgtgtctggcccgaagagcatgccactgatgtgaagagttctggctttgctgagggacccatcccttctcactccccatttgaaatgactgatgaactctttggtccatgaccagctgtgaccagcctgggcactgaaagctcttagaatgccatcttgtgggccaggcttggtggctcatgcctgtaatcccatcactttgagaggctgaggtgggaggatcacctgaggtcaggagtttgagaccagcctgcctaacatggtgaatccctatctctactaaaaatacaaaaaatagctgggcgtggtggcacatgcctgtaatcccagctactcaggatactgaggcatgagaatcgattgaacctgggaggcggaagttgcagtaagccgagattgtgccactgcacttcagcctgggcaacagagtgagactccatctcaaaaaaaaaaaaaaaagtatgccatcttgtgttttagtggtcaggctagaactacactttccaaatggtagccactagtcacatgtggctcttaaaagttaagtgaaaattaagtcgatcaaatgaaaactttagctctgaagttgcactcttcacattttatgctcagtaaccgcatgtggcttttgactaccatattggaaagtgtagatatagggcatttctattattgcagacagttctgttgcatagctctgatctggaacacaccagtgctttttattttctatctgcaccatgatgtgaaaaagactcaacaaggctcataggacaggttctttgagtacatgatttctctcaccctttccaacctaacccaagaaaagaactaaaatttggcatgctattttgaaatgatcttgctttaggttaagaatgcaattcaactatgtgtaaattaacaaagatttattcttcttagaattaaaaaaataggcttataaaagcatgaagcttgaacatttatgttttgttctgagtttgtctcatttaggagttttagttagtactcaataa

SEQ ID NO: 127665 - DNA, 2667 bp, Homo sapiens
aatgaaactattttcaaacagtctttgaaaattttgttttctcttcccactcttgaatcctctactaggctttggaaagttacttcatatctttttgtgtaaaatggattgcttatagggatattagagatttaggaataaatatttatttaaaaaatcgaacttagaaaatattgatttgctattttcaaattgtgaagtattccaaatgattttattttctaataaatttcttctaagtttataaaaggtttagtttgtcacagtcagtcttagttattgatggaaatgtggtggtaaataaaatccataaagaattattaagcctaattttatctgtaggtcctgctggataagagacttaatgctgtttcttctcccttttctctctcctgccacactcatctgtttatccagtattttactaagcaccagctatgtgtccagcactgttcttgatactgcccagttgatggatagatacgctatttattgtgaaatggcaacaagaaaataattgggatgattaattttggactaagtgagattttcctgtacttattagaaagggggaaatctggctatagactgtgaaattgagaaagacgagatcctgcccaaatgccattcacttgggccaattgtgaccccccccgccccgccccttactaatcattaagtcagtaaacatgaattgagcttctgatacgtttagaggaaagggtaccaagatgaataagaatgacttcttgcccctttgaagcttcttgtttagtaggagagttgaggattcacagttaattaacgctagatagaaagtgagcatgccttccttgttagaaacccttgttttggcttctggaccacactcttggttttcctttcaccctacttgcaaccctcagtccagggttctttgttgatttctactaagtaatcttgtcccaatatacggttttgaaatcgttatctagatgcctgtgactcccaaaattatatctctagccctgacctttccctgaaattccagacattataatagacaactgcctacttaaaatctccccttacagattcctcaacttgacatatcccaaatcaacctttattttcacccccagacttgcttttcttctctgtctttcccactaaatggcacaggtagtcaggtccccaattggggattcatccttgttttcttttttccttacaccttacatcagactgttagctagtcttgtcaactccatctctaaaacatgtctaaatatgttccttttgcatctgtctcctctgctatatctccaatccagatagataactgtcgtcttctgtggaagtctcttaactggctccctgcttcactctttccccctgtgctgtgcacacagaagtcctcacaatcttttgaagaaaagcaaatcaggtcaagtcatgtcccagtggtggctctccatggtacacagaatatagtctgagctgcttccctgggcttccatcatatatcatgactggtccctctctgccttccaacatcatcacattattcatcatctcctatcacctttcctctacttattcactgtgactgctatcttcactagaagagaagctccagggaccttattcctcatttgtttgttcacagctgaattcttagctcctaggatagtgtaacctgcttcttagtaagtgcttattatcgtttgttgaattaatttaagggcattatccattttaaaagtagctacttttgttcattctggagagttctatacatttaattcaggtgacatatattgaatgtttctattatgtaaataaataagccacgtttttatttttttttttcttttgagatggagtctcgctgtctcccaggctggagtgcagtggcgtgatcttggctcactgcaagctccgcctcctgggttcatgccattctcctgcctcagtctcctgagtagctgggactacaggctcccaccaccacgcccggctaattttttatatttttagtagagacggggtttcaccgtgttagccaggatggtctaaatctcctgacctcgtgatccgcccgcctcgacctcccaaagtgctgggattacaggcgtgagccaccgtgcccggccaagccaggtattttgaaaagatgcaaaaataggaaaaagttttttttgacagataaactacatatataacaagactgtaagggaggtagaaacatagtataaaagaaacctaggagatactgaaaataagtttatcaaatattttggcttaagaagatgccttgtcgtgcagaaacaaatggctgtccagtttattaaaatgcccaacaactgcacttccagtcactcgggtcttgcatataaataccactgcatacagtgagcacatctagctgatgataaatatacctttgcttcctcctcttcctcaaaatggtgaatctgttcttatctacatgtatgaacttaaaatacggaaaatgttaagggagcaaatggtttgtaactttgtaagtacttatgacgtgtatctttttgcttatgaatattctgtgctataaccattgtttctgtagtttaattaaaacattttcttggtgttaaaaaaagaatgatgatatatggatacatttaaaattggaatttgttctaa

SEQ ID NO: 127666 - DNA, 1334 bp, Homo sapiens
attctcttgcccatgctggagtgcagtggtgcgatctcggctcattgcaacctccaccttctgggttcaagcgattttcctacttcagcttcccaagtagctgggactacaggcacccaccaccatacctggctaattttttatatttttagtagagatggggtttcaccgtgttagccaggatggccttgatcttctgacctcatgatctgcctgccttggcctcccaaagtgctgggattataggcgtgagccaccacacctgaccgcaagatacttcttacacagaggctgccatcgcagaagcttgtgttgtactatcgacccccattttgggtcattttttatcagaaagatgagttgttctgcagctacagattgcgtgtataatcctggccagcatctctaaagcttgtcagctgcttcacgagtgagtacccctgttcacagaggagatcaggtgagtgtgcaggtctgaacttactactgcaatgggaaggtcagctcagagagcattaactttggatacagatgataacacaacaaaactattacctcatatctacgtcgctatgagcagactgggaatagggtaatagtgcttggagttggcagaggtgcaacagtagatggccatgggtgctgctttggaagggcctaaggatacagttgttgaatgattgtaagaacaagagaaaggtggagtctcaataaggcagccgtacaatatgtttatcaagccttcaataggtttagtatatactcctttggtgcatgcttacaagtttactgaactataaccaaacatcccactgggaaatgttttgaattgatgtgagaatttgacattaagtagcaacttgggacatcagagaggcctcaaaaagaaaaaaaagttaacaagaaattagtgattaggttgaaagagacattctactcctactacctagagagcatagatagagaaaaataagcaccttctatacccataccaggacttaggcagctgctgcttgcaatagctgcaggcctggtcctcatgcaccttacagagaacgagtcagtacaagctcagacccagttgataaaaatgaaccaaaatgaattaaaaagtccctgtggttggagctatatgggtaatagctttaccaaatatttgtgtagccaattgtagtttatggtgcaaaacactaaaatccctccacagaatctctggggtaaacattattttcatttttttcagatgaaaatagtaacttttcagatgaaagcttatagctaacacttgatttttgagatttatatatattatatatcagttaaaatagctttaa

SEQ ID NO: 127667 - DNA, 1050 bp, Homo sapiens
ttttggctaccatcttaagttatctaggattttataaaggtagggataatggtttctactaatgacaaatgtaaagaaacacagacataagctaagcattacatatttcatatatatctatcaacatatatatgggttccctctccccctttctcttaactaactatttgggagtaatttctcccaaataataatggcagtttttggagcctatgtcttaaaaaggtaattgtgaagcaaactaatactcacacagaaaatgacctatgctaagtggaaggaggatcaagagagaaaaaatgggtctgagttcttgaatcaatttgctaggacacatctggaagaagataagataaactaatggaggcaggaggctgatttatttgtctcatgtggctcataactttacctcttagaagggccactgaagaattcctctttttttactctgttacctgggagtagaaatactttctctttgtccaactcacccagtctcctgtttctgagaaaattctttcttttggattggtgggtagtgtttctggcacggattttggataagaccaaacaaggtgggtaggaagagatgagtgggaagactgtaggagatgacacatggcctttccccctctgtggagcacattggtgtggtgagtaccacaaatttaaacttggcaagctctgtttgcttaaatttgtctttaggagcaatagagaatagggtggacagtcaagttcagtgggctgaatatcggcagacctgcttcttttgattgccccttatattagaatggtggctcttttagttcatagagcactgtggatctgtaagctgtggattctggccagaaccatgcaataagcagacagttttgcatacagttgagtaattgacccacggactactcagtctgtggacctcagggtgtaattcccagtatcaatgtgtgtggggattatttcactattctttgctacaaataatttctgtaaattgcccttggtatttgccttgatgcagattccagagatgtctggaaagcaagt

SEQ ID NO: 127668 - DNA, 1877 bp, Homo sapiens
tgcgccgaagttttggattaggcccagttgcttcaggactagtgtctgccagtctgataggggctgagatgggtttgcagtttttcataccagtagaagtaatgtagtcatttctgaccaacgttgtagagcactttttttttaatgccctttgcatgcacctgatacataaactgaaaacctggtttttctctagggtgtcagtataccagcactaacttcattaacacactctccgctgcgcctgaatttggagcctcacatttttggacgtatgatgcctgaacctagtaaataaagcaattttgacttcagaaagttttataataatttatatatttttttctgttatcaaccagcgtaaataaattacatttgtaaattatttttaacagttgttaccaggaaataaaacttcttaaatatttaaaatgtttaaaaactttttcttctgaaactgttaccttgagaataatttattaaacttttcttcatagaaactcagactgtcgaactcagtttttggtctgtgaccagtatttctttatatcatgctaattaatggtagtactacattttgtaataaaatatctgaggctgtattctttgagttattgtgtttcagttagtactctttggagtaaaaaattactgtaaactttaagttttatgcagagattttaagactcttgccattaggctttcagtacgcaactcagagtgaaaaataattaaaagacaaagcaaaataagttttgagtgagaagacattggttagaaaaaaatgtataaatccatattctcgtgctttagtacagacacagtgctaacagcaaacaaaatcgaaagagaatgtggccacagcacagagattcatatcaagtattagataaggttggatggaataactgtgacagcagggataggtattctattaaaatggaaaaattgtctaaaaaacctttttaagatttttgttttttaaaaagaaatgtcctttggtcatataacttgacagcattcctcatttttttcctttcttatatagtacattttacctgtattgctaacagttcaagcatgatcatttttacctctatgcttttcttcagaatatacccttcacctggaatgcccttgcgctggtctccattgcttcaaatcctccttttacatgaatgttttgcaatctctctgagcttcagttttcccatctgcaaaataatgcaactgagtacatccctcagatctctaatattttccagtcctgaaatcctgtgagtctggtggcactgtaagtttcttgtagccatacttagcccattgcagtttcctctagaagtgacatccattgaagtattgagtacacagaggtcattctgatttctttgagctcatgatcaaaagagtatcaacttgaaattaaacagacctcagtttaaatctcaggttagatatttattacttaacctgattgcctgtgtgatttttgtctgggtcttttgtagatgtttttcagttgatcttagtatttttcttggcttgaattaagcagacatcagtttaaatcgcaggttagttatttattagcctgtggcctttgacaattgacttcttttatttccttatccataaacggtaataccatcacttcccttgattggttattgtaagaagatgaggtaaggtatgtaaagcacctggcacattgtagattttcattaaaaaggcagccattattatgatagggttcctttcacatgcaaagttttaagattctttgaaagtgctgtgctgtgtagtggaaagagcatgtgccttggaaccaagcagacctgggttggattctatctctgcctctcactagcggtgtcgct

SEQ ID NO: 127669 - DNA, 1070 bp, Homo sapiens
ttggattaaggcccacccttataacctcacttaacctttattaccttctttgtaggctgtgtatccaaatacagtaacagtgagagtcagagattcaacatttgaatttgggagggacacagttcaatttgtaacaggtggtaccctgggcactcttattattttgataaaatatcctaaactgcttctagagtgagaatctctcatcacctacagatagtcttgaggctcgggcaagagccctggtcaagctgttaatttttcacaattgtttgtcaatcttactgcatgcttttctggcttatattaaaattaataaaacataatttgatctatttagtcctgtaagttcctgaaattctagacttaaattaaaatgaattgttggaaaactttgtacctgggctgtattcagatctttcaaaatctctaggcctgaattgagttttaatgttatgttcttgaaggaacttacaagaaatggccatgtaagatttgtgactttgtctgttttcagaagattgttaaggacatcttttactatattaggtcttccatgttttttaagtgaaagatttcttttagaatttaggactagttcaaaatttgcttccttaaaggaactggagtccatattttttgagaatgagaattatatcatgtgatgtgtctccttttgcctgggctgctaggaagctcagatttagtttgggggctcacttcatattaactttgcttgcccatatgatctgcatagttgtcttttacatttatttggtggtgtttagccctgcatctctttagtcccactttctcatttgtattttactttttattgtttatattcttgcacaagccatctcacatcttttttgggaagaggtgggatataattaaaatgaaacttgaatgtagatattgttactcagtttcacaattaaatactggttgaaaggttatcaggctttggctgggtgctcttccccgagtagtttcatagaacactcagagtaaaagctcacaaagttgggcctggtctggctcccagttttctccttgattcatttcct

SEQ ID NO: 127670 - DNA, 1124 bp, Homo sapiens
aatctagagtgattcaataacttgaatacatcttgggttggcaactttatgccatttgtcctttgatcatgtcttttatttagctcatgcttttaaatcttgcccagattcaagactgttattactaaaaaagctgcttggtgctctctttccatccctaactgtctgctgttctctttacatatgaactgtggcttgatgagagtatgtgtcctgcagctcaggagttgaaggcaggaaagataggattttgtaacatgtatagtagaaagagcatggattttggagtcaaatatacttagctttaatttcaactctgatattaactatgtgcatgtgtatattttactttacctctgtgagcctctgattccttatctgtaaaaaggctggtgataatattttattatactagactgctttgaggattgtcttagattaggtatgcaaaataaccactgtattgcctggtgtattatagatgctcagtagtttttatcctgtgtctcactttcaccttcctttccaaacatgtagaacacagggatgcatgtaaatttctgcatttagttttaaaatttcacaagtggaggatgagtgagagttgacttgtcagcacttactgtcaaagggatcttggataatttttggactatatttttaaaaatggaatgtagttttaggctatattattagaaagatagtgttcatgttgtgggatataaaacctctttctgtttggaagtatgttgtattcacttctcagcacatctgagaggcaggttagtgaagccattaagagccatatggcccaggtttgaggtcagactctgctccttaaagactgtgccttgaataaaaaactccatctctttatctctacaaagagggataagtatggtactgatatggtttggctgtgtccccatccacatctcatcttgaattttaactcccacaattcccgcgtgtcgtgggagcaactcagtaggaggtgattgaattatgggggtgggtctctcctgcgctgcactgttctcgtgatagtgaatgagtttcaccagatctgatggttttagacagggtagtccctgcacaagctctattctcttgtctgctgccac

SEQ ID NO: 127671 - DNA, 1230 bp, Homo sapiens
ttctttcttttctctttttctaatagcctctagttagggtgacttgcagattttgtgaaattgtagctattgctgaataggtgattatgagcaactgtgaagttactaaaactctgagaaagcaaaggaaatttgtctctgacttgatatcatggtttgaacaaccttttcacccatttgttttaggaagaaacagagtaacataatttttcaatcttaattatacttataaattaaatagaatgaaatgaaaatactgtcatcacatttataaaagtagaacagagttttgagaaataaatgtttcagtgtaatttgatacttttctaacatttgaatgttattcattgatgggtatagccctgttcctattaaaaaaacctttttttttaatttttaaaaattgacaaataaaaattacatatgtttgtagtagagagcatgatgttttgaaatatgtatacactgtggaatggctaaaccaagctaattaacatatacttcacctcacatgcttatcagttatttgtggtgagaatacttagaatctaccttttcatcaattttcaggcatacaatacattgttattaactgtagtcaccatgttgtgcaatgggtttcttgaacttacttctcttgtctaactgaagtattgtatcctttgaccaacatcttctcaacccgtcctctcaccctgagcccctggtaactactgctctactttatgcttctatgagtttgactttcttagattctacatgtaagggagataatgccaatattcatctttctgtgtctggctgatttcacttaacataatgtcctccaggttcatatgtgttgttgcaaatgacaagagttccttttatttttgagacagggtcgcactctgttgtccaggctggagtaaatggtgcagtcggctcactgtagcctcgacttactgagctcaggcgatcctcccacctcagtctctctgctatctgggaccacagatacttttttgtggagatgggttttcaccaggttgcccaggctggtttcaaacccctgggctcaagtgatctacccacctcaggctcccaaagtggtgggattacaggtgtgagccaccatgcccaaacagatttccttctttttaaatgctgaatggtattccattgtgcttataccacattttctttatccattcgtctgttgatggacacttacgctgcagtgatcatggg

SEQ ID NO: 127672 - DNA, 1026 bp, Homo sapiens
tcttcagtgaaacctcaaatgtcactatctgtataggtcttcacttggaccagttcactttcccaagggagaagccatatgtctcttgtgttggggtgaaaagtcaagctgtcagtgttttggagcctaactattgacggagaccgagggtccatgggggctttggatcgtactgtttaatatgtcccactttgacttcatcctcctgttttctgtgcagtgtctcatgcctccctctcaaccatgcctggcatttccttgtctagatcctgtccaattcagttgctcccaatttggccaatgctgtgggggaggaaattacccatgtgtgtggcttgatggggatttggggctcagaatactcctatagaaacttttaactcagtacccctgccattagtatacttggtgcctcctttttggtgttagtaaatcctactccaggctaaggttttcagatttctctggcctgctaatttagttgcctactgtccatcttcttgctagcttccacagttttgttaccatcccttatttgctgttcttcctctctgttctctctttatgcttcaaaaaatttctttggtattaccttggtgggattgcaggaaggagtagaaataattggaatcatcttcatcagatttacaaagaggtctatgaccccccaaattaataatcagtctattatatatatatatatgtatatttttttttgagacggagtcttgctctgtcgcccaggctggagtgcagtggcacgatctcggctcactgcaagctctgcctcccaggttcatgccattcttctgcttcagcctcccaagtagctgggactataggcacccgccaccatgcccagctaattttctgtgttttgtttagtagagagagggtttcaccgtgttagccaggatggtctcgatctcctgacctcgtgatccacccgcctcggcctcccaaagtgctgggattacaggcatgagccactgcgcctggcctactatacttattaagagaggttac

SEQ ID NO: 127673 - DNA, 2695 bp, Homo sapiens
ctttcttttggaagctggggttacttttattttagttaggttgagcactctgtttcttggttttaaactttagctggagttctagagctagaagcttggaccaagtgacctatcagctggataggaaatttgcaagcattggggaaggtataatagcatggactctcacattgatcattctccttttagatatattaatatttatgaggtacttcatattttcagagtgctttctctttagtaatgttttctagattcactcaaaggtaggttgggagtagttttctcatttcatgggagtgaaattagagagaggtggagatgtgcccaagtgagtctatgtcagaaccaggattagaattttggaggcagaccaaggagaataagtggcagtgggaattaggaactgctgcatacagtagtaccagtgaagactactaaccagattataggtttagactggcaagactttggactgacccaagaccgaatctgttttattgtaggtaaaagagaacctgctttcatgcaagatgctgctgcactgcaaacgggatgagcttcggaaactgtggattgaaggaattgagcataagcatgtcctgaacttgttggatgaaattgagaatatcaagcaagtgcctcaaaagctggaacagtgcatggccagcaagcactatctcagtgccactgacatgttggtaagagaacagcctgtgctaagggtcatttttgttaagatgtaaaagcactctcttttattctctctgaatcctgtaatgcatgtagcacattacaaactgccctcttgggattcatgagcccttgaaggtgaagcctgggtatttctctaattccagtgtttgaaatggtaggtaattattatttatgtattatctgtctttgtaacaatggcaagaaatataatagtaagaaaccagtacttaaatcaggttagaatggtaatgagaggtgttttttagcttcagaggaagatagttaatgaatcccattttaaacaatgaaatctacatgagacagaacttctgaagatttatagactagtgttccacacattttttgaaggaatttttacattagggctttgttcttttccttgaaattgataagaaataaaattttgggagactaatactggaagcaactttattgaccaagagtactccacaatctagcctttagcctccatcttagtccattgtgtgtgctcctttttgaattgctgaaagttcccagaaggatgcaattggtggttcatgtggctgagcgtcaagaagatgaataaaaagtagaaatacagagtttgctccctaataatcctctttcccaaggcctgtggctcttagagagggctgctctttctcccttcccttttacccacccagtcccacttccatctcattcagagttggttaaggaagctctctataggagctctgagcagcagatgggctgtatttgaattgttgttttttccttccccacagtaggtgaaagtcctttacctttgtttcaccaaattagattggctttaacactggaaaaaacactgaggggaattggtagggacacagattaaatgctctaagtggttctaattcattcagacttccaagaagaattttgctaaaagtccttcataagaagctttttaaaggaaatttggtaaccaaggagtgagaagtgccatgatattctatcagatattaaaacctggttatgtgataagactgaatggtcaatttccacagtggaaggagattaataatggttggcccttggctgggagtttaaggctgcagtgagtcatgatcaggtcactgtactccagcctgggcgatagagcaagactctgtctcaaaaagaaccccaataaacaacaaaaaaagattgactcttgggaatgacaaaagaattggttattttcagcatcttattcaaagtggcagcttctttaataataatgactatagggtgtctgatagaaaaaaattacttttcacctttagtgttgatttatgcattatgaatgcatacttgtcctatattctcaagattcagcaatcagaatagataagcaagtatacatttgtgtagcaaatatacatctatttgaatcatgattttttggagtgggcttgcttttaagtaagtgccacagattaaaataggttgttagaatttatttctgtgttaattatgttcatattaggatttcagatttttgtgttacggtctttgttcttaagggctaatttatttacttaagggctaatcaataatgaatactgtccctttttttctgacatattttcctcaagactcattaaataacttctttaaattcttggttgtaagttacagaaattcaactctagctagcttaagtaaaaataattgtttgactcatgtaaccagtctgccaaaggaataggcatgtatgtggaatgtcacctgtgtgttttctctgcatgccctcttcattgttctgctgaagactggtctcttcatgtgtgagggaggaggttgggtattgagggaaaacagggggcataggctatgtctacatctttccacctttacagaagaaaataatctttttttttttcataattcagaaatctagggttaggagctagattgagccaggttgggtatgataatcatcaataaa

SEQ ID NO: 127674 - DNA, 2086 bp, Homo sapiens
aaaatctaaggcatctcaagggtccaaatcgaaatctttgctaaaagacatcagaggaaagtgaagacaaaacaatctagtccttcaaaaccccctgatttccttggatttgtttgtcagaagattttgcatttctattttaaggcagatgcagatgcttagtaatttaatccctactcagaatagattaataaatccagagtaaataactccatggtgacccattgctcttggcagctcctgctattcctactgcaccatcagactggtctggtagctataggcttggcttttaggtgagatatttgtttcttcttttgatatgataaccgagtattgcataaaataattaaattgtcatgacagggaatgtctgcaaataggtctggccttttgtttctttcttcaaggtaaacagctgctgttggcttatgaaaagctaaaaatgatccaacaagaagcctgtatccgtcacattgaaatcagagacttgattaatattgtagcctgtagctttgtgatatgtacggtttaaattagacctttgcagtcattgtgctgggttgatgcaagcacattaatgacataatttctggttgcagcatcacatttctgcagtctgtcctttgtattccactcacattaattgaagtaattttgccagtgaagcgtgtttcaaacctctgcatttaaattgaaattttaattcccttattgtcttgaaaagacggctgaagatgccttgttacaggtttcattatcactcaaaacactccagctgctggttctaatgtacaaagagtgattaattctgggaagaattattaatataagaatagcagcttcttcccagtggcatgagccaaccaggaaggtatttcatgatagttaatattttcataaactttttttaagggaaaatgtgtgtagaagtctgcatcaaactaaaattgcacagatgagctttgaaaaccacttacacaagttctgatttatcatcccatagaagtcaattcataattgcattcaatcagtggaaaccaagccagtgcaaatagttttgaagcactttagctgacagtcacaaggcttgtgactaaaataatttcatttctaagccttcctgagattgtagagattttgaatgtctcttaatcattttgtctgtctttatttatatgccttttaaaaagaatccatagctgtatagtcagataagggttattatgataattataataacaacttatatttatatatctgccttcttcccagaggatcccagagtgctttgctgagagaatggtgtaatgaaattatttcacttacactgtgtaaatgtggccatatctgggataaagaaattagggcagctatttaattgaatagttttctaagatcttatgtaataaaataaatatatttgtagtatttttagttaacaagatcctttggaattggataacatggtgggttgtgaatgtcagcatgggtcttaatttgggttaggtcgtctgatgcttgaatcccagctttgactcttagtagctggatgacttatggttagtaaattatctttgctgaaagctggagttaagaataatatgtatctccaagggttgtcgaatggattaagtgagatattaaactgtgtacataaagtatatgcagtataaagtttttgaaatgttatttataatcgataaattttactgatattgtaggaaatgatatgatgattgcttccatgttataatctcaaaaactgcctttgaggtggacttcttttgagctagtaaaagttgaagtagggttggattaagcagttttgattccttttcttcttggcctaacatggatgtacctaaatgaaaaaccagcccaccttttttaaaggtaaaggaactcttgtgggtggatagggtttttctcagaaagcaattctagtcttctctaacaattctgtgttacatttctaggatttggcatggacaaatttcagattatgtgttatcaattacttactcggcttacattaaaaatatgttcatagggtacccattgattgtataattctgagcaatgt

SEQ ID NO: 127675 - DNA, 2087 bp, Homo sapiens
agtctgattatttggtcaaatcggtttagtagttaaatgagatgatttagtagttaactcacttagtttttaaatgagatgattctccatgtttggactgacttgcactctttagaactgtcattttgttgctctgatttgtgcatctttgctgtgggtcctgatatgacctactgcagggatttaatggattgaaattagagaatatgtttattaatttacaagtggtgactatgtatagtgtgtcatagtggaaacaaagtggatttaaaagcaagaagttcttaattctagtcctgattcaacaacttaccagttccttgagcttagataaataaattacattatctctctgttttagtatccttatctgtagaacagataaacagatacttacctgtctactttatagaatggttatgagaataaaagtgaaatatagtacaggaaaagtgctttgtaggatataaagcagtataaaaatttaaaatggtgtaggtatcatcgtcgtcatttccccatgccaggtaaaaagaaaatgcaggagtctgggcttgtttacactgagcagcatttctattctggtgctaccatcattaatgcataccggttttaatcagataaaccaagtgtgactgtgtttgcacacttgagtgtacaggaagaatgctctaagtcgagaataatacctaagtcgtttgctgccatcctccatcatatttctggtttcaacctcacatacgacctttcttgaacagatttttgattggtcagtctgtggccagatgggaactagatgtttgtgtaaattgcagctgatgacaacccatgttgttgataggggacttcagtctgaacttgatgatggtctgagaatgctaatgagtagcttttgcttggcttgacaagataggaggagcttgttaaagaagtctattttctctgagattcatcccaatactaattacttgtggttgcctagctcttgaaatgaaaaacgccatattcctctatcattcctttgtgggattttaatagttcacgttagtaaagagctgtgtaagtgctgagcatttctaatggatttggggctcttgcagagtgtgggcgaaattgtcttgattgaagtgcgagcctgaagtgattctgagacctcctttgccaactcttaaaaagagagttgttctgtaactttttcttgtcccagagtaacaaataacatgacatggtgagtgactttaggacgcttgttaaaagagaatggcttttctagtggtctcttctattggattttgtagtagaaacctaggttttaatgctctcttacagagcactgatgggaactgggaattgaagggaccatgaggttaggaacaaaagaggttttttttctaagctttcctatgagcagtttacaattatctttctcttaccgtgttacgtatagtttaatttcttcaggaaggtaattgtgaacagatctgttacaaggccttttagaagaaataaggctctcaatgtggaattatgcatcagaacccctagaactatgcatagcttaggacttgagatctacttctagaattttattttaaagaaagaattaagaattataactgttttgtgttacaaatatgtatacaaggatacttatcacagtaagatctatgaaagtaaaaagattagcaatgacttaaatatggggaattggtttaagtcattgtatagtcatactcatggactagtatgaaaatactaaatataatgtttagggataggcacatgctcccagtgtattgccaaatggaaaaaacatgtttaaaaacaagtatttttgcaaacactttgcatggaaaaatgattggaaagaactaggttaaaatattatatattattgcatcagatgagtgacaatatgatgatatttttcttttgtaattttctatgtttttcaagttttcttggttgagtaggtattatttttgtaatttgggagaaatgccaagcttaagaaaaaaataccattctaggcctgacttttttttaatctgtgaaattagggtgggaccccagtcttgaaaaccttt

SEQ ID NO: 127676 - DNA, 1494 bp, Homo sapiens
aagtccgcatttcatggtagtaatagggtgaaatctttcatgaaggaagaagtcacatttgatcctgttttcgagttttattttccgagatagatctgaagatactttaaagaataaattcacaagtaaagggccttttctttgacagcactttatcttgcaggcccccctcccttcattcacttatcaataacttcatctaatttgccttatcctgtaaattccattatctccctggcagtctattgcattaagcccttagtacctaatatcgcctcatttacattgacatatgcttgacctcagtccttctcctctctttgttaatgcaccaacaagcactgatatctctctggagcattatcatttgctgttagctcaactaataacaacccctcatttgagctgatgaaggtttattaaataaaaacatgcagtaaccctggcagtaatgaagggagaagggaggtagacaacatcctttttttaatggtgagagtacaccaagtctgctttataggtattgggtttcctaagggagatagggcacctgaatgggtctgatcaatattattttatcagggtgatttaagaatgggcatttttgattgtcttacttgatcactgttgattagcatataggctgaggagttaggagaaaaaagtattcttgctccaggcacttggccttgctcctgatgcagctgtctttggaactctgtcttcagtaccagactgtcaataaccctgcagctttcaggcagtggcaaagcttggccatagggagccagacacatcatcttagtcttctccagtgaaactgaaatcagaggttgtttttcccatagatcccgcaagagtccctgaaatcttcacaatagccctgacccttgaatgaatcccctttattttccctttcacgtcccatactcttattcccccgaccaccatttgtacatgaagtccggtctactggtgtcatgctgtaaacaaaagttacgtggatgctgttattaggtttgtattaacagttgggaattttgggttcacttgcttgcacatttatgtcacatacatatatattgtggtatattctactagtaaaattgttcctagtttatctgatgcagttaaatacatagagttctataaaggctacaatgtactgcaaagagtgctgtgatgtcccagatctatcaaagctttcagacttgctgctacagctgttaggttggaccataggaaataaccaatatttgatcatttttaacttgtaaaaacagtattttcttatggttcaagttaataatatgatagataccattttttttttctaagcttcattgtttgttttactagtttctgtctgataaagataaaaatttccgacttgggaaaaataagatgtagcaatgtagaaatagttggtgaatgaatgatctgggattcttggctcctgtgtgataaatatcttcgctgcttgcttagacgtga

SEQ ID NO: 127677 - DNA, 1445 bp, Homo sapiens
agtggtttaccaaattatttttcattttctggatctcagtgtcactgaaagttaatgcatcctctttctctgctagagacctgagttaaaatccattttagggcataagtataaatgaatttgttgttgttttttcctccttggggacactgtggtcattttgtgaggctgcctttccatttggaattgctggcagcttgctctgggcccaggggctctcatagcaggggcagttgcaagtcagcgtgaaaatgaactggtaggcttcagagggcagagctggcccagggcttgtcactctcccattccttgattctttcttggttaacttaaggaaacttatttgctactgacatttgattatagcacatcacaaaacaagtgatgtggttgtggataagccatcacattttctttaccatttcaggctggtttatatttggcagctacaaaggtttctctgttcactgtccacagactcctagatgactccttagactgctgtagttgtgtgatcaacatttttgatcaccaatgtgtttcatggctttaattacctattgttttagtgtaaatggttcattctttaggagcgtgtttgtatccataattacatttaagggttttaccctgaagtattattagttatttcctttatctgtacctattaggaatatttagtataaccaaagcagggaataatacgcatagcatttcatccctgagggagctcacttgtgttctttccctctaagctcatcctgtcatttctattttctctcaaagaatagcacctagagtatgctctttaagttttctttgaaaagatacaagatctttacacataaaaacaaacataattttgtgtacatgaataaatgggatcatatcatgcatgctgtcttttttttttttttcctttgcagatgtcactttgagtttcaaagtgagttggttgctccaggttccctgaatccttcatgttctccatttattgtaggcattcctataccagtttgatttatccagtccttttgtcttgaaaatctcccaaaccactttgcaccgggagtatcttcctcttcatgttttgtcttccagtcaccattcatatcccgtttcttctatcaaactgaatcaggacaaggagaggtgatgactactattgtccatttgtagcattcatgtaaaaaaatgtatttacctctgtgtgatgtgtatttgaaaaagagtgagagagagcccgactcttggtaagcacaaagagtcatgattgctgtgagaacaagttctttttaaaacatttatatagtgtgcttttttttaaagccttagtttaaaaaagctaactttgagtaaaagttgattaaaccattagtacatgggattcttgtgagaatgtgaatgatagtatcatttaaatagggaggtctttttacacgtgt

SEQ ID NO: 127678 - DNA, 1863 bp, Homo sapiens
acggagattaagcagctgagcacacacagtcttagacaagccacaggaagggtctgtttgggttgctatttttgctggcaccatgcccacaatagctggattttaaactcctctgtaaatgatctctaaatgtccctgcatctttcctttatctcgtcaagattcaaacttctggactcaggcatccagtttgctgagcctgggtaatgcctggactccttcagcttccatagtaggaagtggggccttctttttgctttgatgcagtcagtggggatggactgttcagatgtttggtacccaagacaaacacccaacaaatttctactgcaagagaaaacaaaggaaatcacatgaaggcacttacgtataaagaagaccagatgtttttgaagtagaagataggcagtagaattgacaaatgaaagaaaggtacatgctcacatacaaaaaataataaaaattttacttggaggaaatgaaacaaataaatggtgagactgtccttgttcttagctcatgaagatgtcagttccagttgaaaattttgaaactgtcaaatgaaatctaaagttcacatggatgaatacatgcgtaagaattgtttaaaagaattgtgaagggaggttatgaggggggcatttcttatgtgatatcaaagcatattgtaaagctgttttagtcaaaacagtacagacatgcaaaaataaatttttttaaagaaaacagtgcagacatgaagtagaaaatcagatgggtgagacaaaatagagttgagaaatagaccccaggatctatagactttagtattttgaacaatagttcagctggggggtaatgaaggctatttaatatatagtgttcagacaattgactgttgatttgaagaaaataaatttaggtgtctacctcttatgtacaaatgattcagccagatttaaaaatcacatagcactgtattagcattaggaaaacgtgtaggaggatatgtgtggaggagcctttttcaagcatatcagaagacataaagaaatatattaaatggtttaaccattaaaaaacccaaaacttatcttcaggaaaacagagtcaaaggataaactatactctgaggaaatatatgtatgtcatataacgctttaatatctaaagcatgcagatatttgtaagctcagtaaagcgggatatagactgttcatagattaaaaatacaaatggctaataaatataagattgttcaatatcatgagtagtcagagaaatacacatttgaaaaattaaatgcagttttttgttcataagatgatcaaaatcaaagacattgatagcatgttatgatagcaaagatggcggaaatgcgtagctttctcttgatggtggaataaccaatatgcctttttggaaaataaatttgcatattctttgtccagagaattttgtttctaggtctacatcctacaaaaacagtaccagttcataaaaatatatgtaacaagatattcattgtgacattgttggtaagaagaacaaaaatattcagcttaaatgttcatcaagaggagtatggtatattggtaccatgtaattacagaatttcagtgataatgatctctatgtgctgatatagaaaggtttctaaggtgcatttttgggtcccaaaagcaagttgaaaaatagcatagatagtatgaacctatttgtgaaagattgaaaggatagaaacttaaatatgtatactttatatattggtataaatatttgtatgtgtatagaaaatgtcagacagataatgtcaaaacactgataaaaggaattacttgtgagaaatggaaatgtgaggtggggaatagggaggtagaaatt

SEQ ID NO: 127679 - DNA, 1046 bp, Homo sapiens
cccatttattgtgaagtgaaggaacagaaatatgttataattaaaaagtagatgtttaataagctgtcagcacttctaacccctcttaaaaaactgttttcgtatcatgaaatcttgaaatctaacatttagaagcagagctttactagttggatgttggttaatggccaggaagtccttgaggttacagtggcagtggttgttgcttgttttgggtttaatttgttgtatacttttcctgtcctctaccatgttgctattggcaaaatgcattcagtcacaatatataattggtaattttggggggaccattttatactagcagggattactgtacatcagctgtcttttgatctcagctatgaatgattctgaatggatttaaaataaaaatttgtaatcatgtatttaaaatgaaaaataactgtcagtatttccaaaataacgttataatttttattttattttttgttttcaaaaaatgctttctctgagggattaaaaacccgttgaaggtattaattaatcaatcccttctcagctttatctctgatatgtggtgagaagaggtctttttttctgttgtgaaatggaaactgaggtccatattacttaatgcaatattctacaatagcacctaccttatgctgagcttcattcatgtctgtagtcacaaagtgagtgggtgtgccccctttctctggaacttttgagactaagtcctttcataaaacagcaggagaaaaactaaagtcatttccagagttacttgcctttgggttagtgctcaccaaggagaaaattgaagcttaagggaaaattttagagagagagatgagtgtatgaaaatagttttgcagtaaattgactttctaaaagtttattgatggagtttgagggcccttctggctctgataataaaatcagcaggttatatttttcagagttgaaatggcaagctgtttatcaccctaaatttaactgaaatatgtttttaggttaaaactgagaaaataattgtaggatttaatctagagtgatgtgca

SEQ ID NO: 127680 - DNA, 1094 bp, Homo sapiens
tggatgctgaagaattgttcgagtaatgattccctgtttccctgtaacaagtcaaaagggagacgttaatgactgtcatagtgatcctcaaggcctaggacagtggctcctacattatttgtactcagtgaaaagaataaaaccttatgtgataatttcactctttaacacagtgtgaaattatcacttgaacccgaattatcacttaacaaactttatttttcaaagatctctgaaaaaacatgtttgttttttattggattataaatacacacatacctagcacatttgttccaaaaggagtgtgtgaaggagatggggatatattgctgtggtgggggcagatgttgttcccaattgcacacatccttccttccttccttccatttgaagaaatctttcctataggcgtggtctcttctctgcttcccctttgcctgctctagccactgctactgatgatgtatttcagtactaaaaagtgagaattatggcttccacttccctacccttggatttggcttcgaggggctcttctgttgtagatagtgtgcgagatgattccatttcttgagagcagggcatagggtttagttggcttggcatagcctgcattctttcacttaacaggtattttgagatgggaattaattggaaattttgttttttatagttttcatgatttaaaattaatgtgtttattttgaaggaagttgatttatgcgtttatttaaagtttattagtttatttaaagttaatcattaagatgaggggcttggccttcttaggaaaggtgaaatgggtaaatactgaattaacctgtttgagatccttaaatcattttaattgttgtgattgtccacgtcatgaaatttatgagtctcttttaaagaaaactgaatgtagtaaacttccggcatatgtcaaaaactatagcctgaaaaacacaagtaaacactagttaaacctttattcagtatcatggcatgttgtcatttgatctttctttgttgataaattaatatttaatacagatacaaaggaggacagtgaaattgcctggcatagtgttattacaaggtggttatccagt

SEQ ID NO: 127681 - DNA, 1093 bp, Homo sapiens
ggactacaggcgcccgccacctcgcccggctaattttttgtatttttagtagagacggggtttcaccgtgttagccaggatggtctctatctcctgaccttgtgatccgcccgcctcggcctcccaaagtgaggtattatctttacaatcactttacagatacggaagctgaatgcaggaaggttgagtggttggtccaggttcaaccaagatgataattgttggagcctggcctcatgctgttcccagtctaaatatgtagggcatgtattttgcaagcctttctcttattctcctcagtcacagtattttgtaatgcacagagaaactaatgtctaatttagatgtagtagttcaactataacttaggtagaaggatgggagaagtgtggagaaaagccaataattgtagtaaaatgttggtttaagcttttggactcccagtatgtcttttcatttggcaaactgcctttggaacattttgactgagtagttactcccagggaacacaggcatttcatttgtggcctctttattcattttattcatgcttctgctgggatttcgtgaatatgactataatgaaactggacttcttagttcttttcttttgggtacaagcataggttaagcagtaaaaacctaaagagaacacaaattaaatgatttttatgctgctattttcttgatgtgcattttattccataaagtgttgctctgagactttatatatatcttaagaatttggaggccgggcacagtggctcatgcctgtaatcccagcactttgagaggccaaggtgggcagatcacgaggtcaggagatcgagaccatcctggccaacatggtgaccaaaatacaaaaattagctgggcatggtggtgcgtgcctgtaattccagctactcaggaggctgaggcaggagaatctcttgaacttgggaggcagaggttgcagtgaggtgagatcttgtatctaccaattttgttgcattattttcaaaattctaatagaatatttgaaaaaatatatttgtatattttcctggattttgtatgtaaacagtcagtgtctgcagttaaggcagtgttg

SEQ ID NO: 127682 - DNA, 1112 bp, Homo sapiens
tggttttagatcaaccttaagttcatcactaattcccttctctctttgttatagtttttcacattctacctttgtttgcaataaggccttctggcagatcagggacagaggaggagcatgagatatcacttgctgggattaggtgtctttttcttatttttatttacagttgttttggattttggtcagttcagttttcaagtgatcccgaggacatggtttttgtgtagttttgctgcttatttttcttgtcctctattgcttctggaggaaatattgaaagatggagacataagcaaccacctttgtcagcctgagagtttccaaagctgaatgttttaaaagtgcatttttaactatttttcttcattttgagttttgatgttacattttgtcacattatctcattaaatttgcacatctctgagctacacatactatctccatttcatgaatgaagaaatcaaggtccagcaagattaaatgactcaagggagatcacacaaccagaaactgatagagattctaatcaactctaaaattgtatgatgccaagctcttgttctttccactacatcttgccatctccctgagtaactgaacttagaaagcccatgcattaattaaatactgcaacctaaaacattttagtgattataaatgtaaactgtcagtttattcatctgttccttgtccctcctgttatcttgcagtcctgttatatttttagtagcctcttctccactggcttctactccttgaccttctaaggtacattttctttcctgtaaacgagatcatgtacattaagtgctatctcttgaaaaaaatgattcaacagatgtcaattttgtttatttatttattttcctaatagaggtttttactctatctccccttatagcagacctaccatcatttccctcttggcccactttcacgtacgggaggacccgtgcacactcaccttgctttcaaaactcactgccctccctgcgcaaactcctcacttcatggaaatgatagccccaagtagcagttggcaacaacttttggctcctcctttctggagtgggtgttgtattgtctgtagttttctttaaagtaattta

SEQ ID NO: 127683 - DNA, 1152 bp, Homo sapiens
attataattttaatttatttatcactcttccccctgtgtgtattcatgatgtctttttctccagcgacttaccacttttaactaacaaatacaaacctgaggctaggatccagctcttcagaattctcttgcagcgccacatatggcattttataaacagcgagtgcctaataaatgtcatgagccagtggactcatggcagaagtagtagtctgtggaaaacttcccatggtgatttgtttactaatttttattgcatctgcctcttattactaactgatgggtatgatttgaggaatataaatgttattttgtgacttttggatggttactgtgcaaatataatttaattgaaaaatcctctttaattctttaagagagtaatcaaggcagtgatttcgtttattagactgctctgttttggggtttttgagtggagtctgtatctattattgttattatttaatttttcagtgagggagataaatctgcaggacatcaaggaagatttagaattggatccagaggaaaacagcaccctgtttatgggtatcctcattaagggcttggcgaaactgaagaagatcccagaaacagttaaggcaatcatagagcgcttggagcaggagttgaagcaaattgtgaagaggtctacaacccaggtggcagacagtggctatcagcggggggagaacgttactgtggagaaccaaccaaggtaggtgggagtgtattttgtatttttgacaactctatttattgcacattttctagggtggggcgtaagtaacttaccttctgttgatgttgttttcttgaacttaggatactatagcccatacaggccaggcgcagtggctcacgcctgttatcccagcactttgggaggctgaggcaggcagatcacttgaggtcagaagtttgagaccagcctgtactagtagtgaaaccctgtctctactaaaaatacagaaattagctgggcatggtagtgcatgcctgtaatcccagctgttctggaggctgaggcaggagaactgcttgaacgcaggaggcggaggttgcagtgagccgagattgcaccattgctctccggcctaggtgacagagcgagactccgtcttaaaaaataaaaaggatactatagcccat

SEQ ID NO: 127684 - DNA, 1049 bp, Homo sapiens
ttcacttttttaatgtttgaaattttcaacagtacaatgtttaaagtgtttatttccttttcaatgaattatttttctaacatgtttgtctcattgatttgtaggaactctttacatatataggaaatttgttctttgggatttattttgtaattttctgccagtttctttctcttttgacttcatgatgtttctgggcatgtagacatttgttttaattttttatgagggtatatttatcaggttttatagcttctgggttttgtgtcatacttagagcttccctactcttagattataataaaattttcaacacttttctagtacttatatagtctcattcttaatatttatatctttgatacatctgggatctgaaggagtgaccaaacgacttttgagcacacctgacacatactatactgtattgtaaggggttgtacacccttttcttttctgtcatccatgtgtctgtcatgtaattgtccatgttagctgcataattgctgaataattctaacgctgagtcgtttatcatatggtgatggttcttctcaaggttggtatttgccacattttctaaaactctttttttcctcctggtttctcagtctgtgaagactatagattttcagaaatacgttgaattattgctctaaaattggaaaaatatacttttgaaatattttttataatttggaggccagaattcagaatgagggcatactgctgtaatagaactttcttataaaatggttttatctgtgaggaagactaaaggctcaggcctcaaggatagttttatagtatgaatacaatgtttatggaaggagaaataaatgaaatattgctcatgattttttttagacctgtggctagattcaggcatgagtttctatttcacataaatagcatttcgttttatctcttctttctatattagttacccttcttctaagtatccgaaatgcaggacatggtggaattggtcattttattttacagaaaagtcattcaagagcagctttgaagcaaggtcaggcattttc

SEQ ID NO: 127685 - DNA, 1032 bp, Homo sapiens
cattattattaatcccagatttacccagagaaatgtgaaagctgaaataatttgacagttcacaaagcttgttcgtggtgcaattaagattagaagtagtctttttccaccatgtaagtttgctttctggcttatataaacatgatgtttccaacccatgtcatgggcctgattttgtttgtcctcagaaggacgatatctgtactaaatatccattttcctgcccatacctcacactgtggtcagtggcaggcctcagagatagctggacatgttgagaagcgtgaaaagcagccacagagtgcctggattttaattaggtcacttgagaatcaaattttattatctaaacaattcctctaggggcattcttgtactaggaacaatatagtactaagaacaacaaagcacttgtactaagaacaacaaagcactaagaatatgcacctaaaatcttaacttttgttatccctgggaagtggatttatggatcatttttctaatattccactatgatgaaatgttatttttggaatgggggaaaggatttcaaaagaatgatactgatactttaattcaaagaaatagggcctgggtttattttctaattttagccacaaatttggcatacatcaggattagacgtttgaggtcatctctccagaactcagaaacctgacttgacaaggagggagtaacacaggaaggaagtgactagcaccaggccccacttcagtattcttgttatttttactgtgtttcattctatattactactaattttttcttgctcttttcatagagcagatggagaattagtcagcactctttaaatagtaacccctttttacatgaagacttattaataagtggtaaaacgtatttctatcccttagaagtaggtattagataaccttgaagattaaatgggctccatgtcctatttgaaatgaaaaatagtagctcagccaggcttattaaggaaatgtgtatgagagatatgggcaggtaaaacaaagaccatttttatct

SEQ ID NO: 127686 - DNA, 1144 bp, Homo sapiens
tttcatgtatttcctcttcagtgctagagaggtgttggatcttcactctccccactcagagccatagctgctgttcttttaacagctaattgaggtataattcactgctgcacgattcacctattgaaagtatacaattcattggtttttagtacattcatagagttttgcacccgtcaccactacctggttccagcacgtttatgtcctccctaaaacaaatcccgtatacttatcagtcagttcccacccacccccagcctaagtaaccactaatatattttgtgtctctataaatttgcctatcctgaatattttatataactataatcatatagtatatggtcttctgtgaccttttttcacttaccatagtaatttcaaggttaattccagttgtaccatgtatcagtacttcattcctttttgtggccaaataatattctattgtatgaatataccgcattttatccatttatcagttgatggatatttggattgtttccacctttgggttgttgcgcataacactgctaaggacatttgtgtacaagtttttgtgtgcacgtatgttttcatttctcttgggcatatagctaggaatggaatcactggctccatatggtaactatgtttaatgtcttgaggaactgccaaactgttttccaaagcggctgcaccattttacattcccactggcactgtttgagagttccaatttctctgcatccttactgatactttttattgcttttgtttttgattgtaaccatcctagtggaccgaaattctagctcattgtgattttgatttgcatatctctgatggctaaagatgttaagcatctttttgtttgcttattggccattcatatattttctttggagcaatggatatttaaatcctttgtccatttttaagttcagttgtctttttattatgagtgtaagattttagatttgtcttttatcagattaatgatttacaaatattttctctcattttatgtattgcctttttactttcttgatgatatcatttgaagcacaaacattttaaattttggtgtcagagctgtgggttttattaaataatatgacaccgttgtgcttcggtaaggcggaagagagctttcctctcgtta

SEQ ID NO: 127687 - DNA, 1054 bp, Homo sapiens
tttagacacatgtttctgtattttgtatgtatctttgctaatatttgagtagttcttcagtaacacagatgagaaagaagaattattttagatatatgtgagtataaatatgaatttgacctttaaggattaaaaagaatcatcaatcaaaaggtagaatggcttctatttataaatacaatgtgtaacttctggattatatatgtatagtctaggctgggagtactacataaattctattgattttgtctcatctgaattacaatgtcaaatagatactagggttttaccataagatagttatgggctgtctcattgtcacattaattacaataattaggcagtaaagaagccataggaatagataatatgttgtatgtttggatgagattgtagttataaccccttatttatggtaataaaaccttgttaattgacactgctgacaagctcttttgctttccttttcaactttccaagttggtttatcagtctatttaggaattacaagctgagagccacaaaatatacaataaagctcacattgcaagattttctgtacttgttcatgctatacacattaaattcattcagcagtatttgctaattattgttctaagtgctcttaagtattcagagatgtataaagcagtgcctactctgaaagattaataatggagaagtgaggtaaagtatctatatataaagaaatatgactgacatttattgagcagcatatgtgaggctcatgtgataagttccttaaaagcagacaaaagagtatacaagttcagaggaagaaaagatgattccaggcctgtgtgatcattgaaactataagtctcagtggtagaggaattattttgcatctatgccataaatctttgagctatctattctagagctgtagtgaaaggtaggtggctaaatgtactgacatggaaatcaacttttgttctaggcttagctgcactgcaaccttattttgtgtccttgagtatataaaattgatgtaataatatgtgtccagcatatctcactgtgatgaatgaga

SEQ ID NO: 127688 - DNA, 1124 bp, Homo sapiens
ctgaggtcaggagtctgagaccagtctggccaacatggtgaaaccttgtctctactaaaaatacaaaaattagctgggcgtggtggcgggcgcctgtaatctcagttacctgggaggctgaggcaggagagttgcttgaactcgggaggcagagtttgcagtgagccattgtaccactgcactccagcctgggtaacagagtgagactccgtctaaacaaaaaaaaccttttaacagacttcttttttttttggcagactttaaaaatagaagcatattctcaatatgtatagtgtctggctttctgtcgtagtatactttacttgactggaattagtcatatattaaggtaaaaaacattaaaatattcttaagcattattttataaacatgtacatagcttaattttgttgactatttccttacagtcaacttttgcatatattgggttatatgacagaacaagagcttattttgagagatgagaatagatctgtgaggtataaatgtatcactttgcttgatttgttgaagattagaggaataatattattctttggtatgatgctgctgaaatgatatttagaaattgtattatactttttctccatatgtgagcaaaatatatttgatttagccagatggaaattagaaatataattaagagttagctgaagcaagctttgacataactaaatagaagtaacttagttagatagtttctgctaatatgaaaaaaattaagtatatgtggggaattggaaaatggaactgtgtaggaatgaaattacttgcatggcaaataagagtctttgcagaaaaaagtaaatcatgaatgtaaattatagtcattttttagaatgtagacatgctcttggtggattgaatggattgattcctggtttttcattcattagacaacttttggtacagtgtatatgctttactggtggttcagtagaaataatattggttgaaactttttactgctttgtcaattgccatgcctgtagtacatgcttggtgaatatttttgtattgaataaaatatctttatgggttggaggctggttatttaacattttgcatgttgatatgtttatccgtcttatgtaaataatgtg

SEQ ID NO: 127689 - DNA, 1105 bp, Homo sapiens
cccagctactcaggaagctgaggcagcagaattgcttgaacctaggaggtggaggttgcagtgagccaagattgtgcctctgcactgcagcctgggtgacagtgtgagactcaatctcaaataaataaataaataaataaataaaatgaaaaattcaccagatggatttagctgcagataacatactgtggaagaaaggatcagtgaatttgaggatagatcaatgtaaaccatccaaatcaaagcacagagaaaaaatagacaaaaggaaaatgaacaaagctataatatcttcaaggatattatgcagcttaacaattatgtggtttacaggtacagaaggagagaggacagagagattggggtagaaaaatatcaggagaaatggtgaccaaaaagttttgaaatttgttgagaaacataaacccacagatgcaagaaacgtaacaaatcccaagcaagataaacacaaagaaaatcaacacatacgcacattatgaaaaccaaagaaaaaattcttaaaaatagccagaggaagaaagacacattgcctacaagcaaacagtgataaaaattatcagtgacatctcatcagaaacaatgcaagccagaaatcaatgtatgtcaatctaagaatgctgaaaagaaacaaaaattgtcaatctagaattttgtgttaccgaaaatattctttaaaatgaagctgaaatagagacattttcaaatgaactaaaacttaaagaatttgtcaccactagactttcacttaaagaaatgttatagaaagtttttcagccatgcgcgatggctcatgcctgtaatgccagcactttgggaacccgaggcgggtggatcacgaggtcaggagttcaagaccagcctggccaagatggtgaaaccctgtctctatgaaaaatacaaaagaattaactgggtgtggtgtctggcgcctgtaatcccagctactccggaagctgaggcagagaattgcttgaactggggaggtggaggttgtagtgagctgcgatcgcgccactgcactccagcctgggcggcagagtgagactccatctcaaaaaaaaaaaaaaaagagtttttcaggctg

SEQ ID NO: 127690 - DNA, 3219 bp, Homo sapiens
gggaccttcaggtgattcttatgcacactgaagtttgaggacctttgctgtaggtaatatgggaactttggagatttatattggagtgtgatgagatgaaggaagattaatgtggtagcaatgaaaaggactgagtagagagggtagagactaagacaggcaaactattttgtaggctagtggagagtctatgcatatattacttgaggtattgtttagtagagaagtaaacaagacaggctttggtgtatgctaaaggaatacaaagaagggagaagaagatttctaaaccttttcagagtcttttagaaaatctgtaagatgatatggtccatctgccagcctagtttccagtatgacagatattttaatgatggtttagtgttaaattattgggaccaactatgtactgagtactggggaatagaaaaaaatacatgaacaccagagacccctggctgggaaatatttaatgttcatttatatggagggtttaggatgaagatttttggttaagtttctatgtacagttttacacatggggctgatttagttttcatgtacttgttggaggagtgttctttaggttagaaatcattcctggagaacaaaataattcaacagaatactagaagcctttagttaaatatgtaacagcatgaatgaagatgatgggatattatgatgaatagagttataagtgtttagagttcaaatttctgtatttctttgaatggaaaacatttcctgctgaaaagttgaaatgttccttgtatattaaattctttgtatagtaaattaattcttggaagagagaatactttttgatcttttaatgacttcagcagtttttttccactgcaacttgggctttccctggcagccagaacccatcctttagttggaaggctcatttgtctcagcgtgtttttgtctggagacagacagtgaggagacaaggctatagctatcatagtaacggggtgttatagtttttccctggtgtcagccctgtgaccacacaccattgcactcctttttcagttttcactctttttgaaactgtgataatagaaatacatgtttttgcccttttgagcagcggcagtaccttccaaaatgacacctacttggtgacaagtgtgtcatattgttggctgtgtgttttcaagtgtataaaagactgaggtacactagaaatacaaaatattcaatcttgttgaattctgcatagcaaaggaagaggatcactttgaacaaacccatcctccagacgttatgattctgtaaaaaatctaaatttttttcacatctcatttcaaaacacaactgtcgatttagccattgttgacttaaatgtgtaactccttggcatgctaagcagtgtctacagatggggacagtgggttctgattatactgtttaccactagcagtgacacctagaacaagtcactttactttttttagtgccttgatttcttttttctggagattaatggagacagaatgtaaaatcgttttacttttgttaactgccatataaatgtttagtgataaaattaacctcttgcagagagagcttgaagtttgctgtcaggtaagagaatccacaaaattattagtactgatccttgacctggaggggattttcaaggagacagatgtaatttctattttgaattcaggtctgaaactaggttattcttaggttctgtcgactttgatattttggttacctgaggattctataccttaaagtaaaacaaacctattttagtatttcaggccagaaaacgtatgagagtattctcgcagaaatagtttttcgtcatttctcagcctataaaactttttgataacctctattttgcgtggcatcgtgaagtcatgttgttggccaggccattgaatctccacaaaagtgcttgctcctagaatgtttcttctgtctcgtcagtggataatatgctgccaaatgaacagaatataattaacatttacaagttaaattaaaaatcttctaaattcgagtttgtttctgtagcaccaggactctccctgtgttgttttatgttcactactaattcttcaagcaggaactgatgagcagccagggagattcctctggcttctagtacagacgtagcaaatgcccaaatcagagtgctagggtgtctaatgcatagtgaagtgtgatgtcaatgtcatggacatctgaatacattgcggcaaactttagaaaatagtagcttggcaggggataccccagaataggttgatctggtaggaaggctgttctccttaaattttcacatacctaggatgggcctgctcgggcctcattacgtcttggcctagagaacacaggtgtagaaatggcaggtcttccttctccctcactgcctccaaagcttatctctgtctggttttgtctgatattttagagggtgaactgttaaaagccaagtgtccgtcagactcatgctgctaccgctcctttaagtgtgctcatcaagatttggtgcacctgggccaaggcaagaatgttgctaggatccaagaggccataataagttgtggtgattaatagcatgaagtgaaatagtgtgatgtagaaagtgtcattctgtgatttgagtgaaattaaagctactggcatgaccttcactgacatattgctcttgcctacttgagaaggttttagagcaaaggtaattacattttcctgaattggtcttttttttttttttaagcgtatttaaaaaaaaaaaacgttttctgattgtggaagcaatgagtatgtctgaatccttgagtatagcgatagttcttctgatttttttttttttctgtatgccaaattcttcagaaacttggtggcttaagacatcaaccattttatttctcatagttttgtgagtcaggaattcatgaaggctccaatgcacagtgcttctacttgacatggcattggctgagaacattcacttggccacgcatctgcagcatggactggttagaaggtccaagaagactttattatgtatctggcaccatcacgcttctccacgtggcttctgtttcaccatatgaccttgcagcagcgttgtctcagggtagttggacttcatacatgattgctagctttaactagagagcattctaaagggtgaaggctgcaggtcttttaaggcctggccttggggcattacttggt

SEQ ID NO: 127691 - DNA, 1057 bp, Homo sapiens
catactgttttatctatattttaatatgtatctctaaaaaataagaactctctttttaaaattatacctaaaaattggccgggtatggtggctcgcgtctgtaatcccagcactttgggaggccggggtgggcagatcacttgaggtcaggagttcgagaccatcctggccaatgtggtgaaaccctgtttctactaaaagtacaaaaattagccaggaatggtggcctgtgtctgtagtctcagctacttgggaggctgaggcaggagaatcgcttgaaccggggaggtggaggctgcagtgagccgagattgtgccactgcactctagcatgggtgacagagtgagactctgtctcaaaaataaaataatacctaaaaacttaatttctttatcatcaaatatccagtcagtgttcacatttccagttgtctcaaatattataattattttttacattttgtttgaatcaggatccaaataaggtttaaatattgcaatttgattaatacattaagattcttttaatctataagttcctgctccatctgtcattttatttttatcccttgaaatttatttattgaagaaactatatcctttgctttgtaaaattttccacagtgtggctggctttggctgattgctagcgtcatttgctatttatttttgtcctgtatcttggatctggcgccttgatcagatttaagttgatttttggggacgtaattacttcataggtattatgcatttttggatagaggagtaaagtagtgaaagtaatgtttttaggatggtttgtctggcagcagtgtgcaaaatgaattggtagaggagaaatggagagctgcgaattagaaggcaggttcaatcagtgcaggaaggaaaggctacagtaaggcagaggcagggaaaagaaaggcaatagagatgagagagattttgaaagaaggaattttcaataccttttaggcttaactataagaaatggagagtcggctgggcatggtggctcatgcctgtaatcccagcactttggaaggccaaggccagtgga

SEQ ID NO: 127692 - DNA, 1057 bp, Homo sapiens
tgcagaattgtgttataggaagtgtattagtctgttttcacactgctgataaagacatactccaaactgggcaatttacaaagaaagaggtttaattggaatcacagttccatgtggctgggcagcctcacaatcatggcggaacgcaaggaggagtaagtcacatcttacatggatggcagcaggccaaaaaaaaaaaaaaaatgcatgtgcagggaaattcccatttttaaaaccatcaggtctcatgagacttatcactatcatgagaacagcacaggaaagacctgctcctatgattcagtcacctcccactgggtccttcccacaacacgtgggaattcaagatgagatctgggtggggacacagcgaagccatatcaggcagctagattgatcatgggggaccaggggagaggtaagggcaggaaatagaaatttagggattctctgtctgcctgggaatagctgaagccatacaaatggaccagctcagaaactcgtgagtgaactgaggagcactttccttaagtagttcgtcagcttaatcggctttctatagttgtcacagcaaaatattacactgtctttagagactggagtttctcatgatgatgccacattttgcctttctttgcttctgcggtttttcgtcatttataggtgatatggcagcagatttttgagcagaatccagctgctttccgaagctggagattccactggggatgtagacagcttgggaggaaataaaagccgagtccataagtgagcctgggaggagtgaagaagcagagcaagcaggacagaaagtgggcggggccagctatagggaaagaccttggggttgaagggatttgatagacttgccttagtgtcttttagttccttcagaagcccagcctgacctccatcatgagagaactagttagtgagggtggggcaccaacagttcccttgtgtcctctcctgctgtttctctcttatatccagagactacagagaatgtggttaatgggaaactacaaaacttatatgtaatcatttcaaaagtcct

SEQ ID NO: 127693 - DNA, 4434 bp, Homo sapiens
atagaaaatcttatagctctcaaaggtgcagattatatttttctgtaatagttctgggcttcccaaaaatttttgttggtgttgccaaagagttgtgtcacataagtgagtggcacaaacattttttgactagccacctgaaagttgtgaagggttttgaaaatataaagtaaaatataaagtgaacaccaccactgtcaacaaaatccactgctttggatatgatttcacaggaagatgacggctgtcaccaattgaactacagcaaatgacgaaagctcagcacgaattagccagtctcattggggtgataaacgacagcacattaaatatgtgttagcaacgtgatatggcagtgaaaaaagccaacgctatttttggctgtgctgcacaaaacagcatctcgtcaccgagctgggctgatcattactttctacccagtacttgtgaggcagcatctgggatgctgtcttgagtgtaggacacgtgcgtactggaaggatagacaaacgggtaggagtcccaagcagagcatctgctgtgactaaggactttagatgagacaagttttagaagtggcatgtttaggaatgagcatggaagtaaagagatgttaaccttttcagagataggatgatgttgaggaaatacatcatagactcctcattagttggcattagtttagtacagtgcactttagaggaattacccaaatactttcacagacagcatatcagcaaaaaggggctctaaagcaaaattaagcaaggacttatttatggtcaactatgttttaatcaagagattaacattggcagtgcttgctataatgtgagaaggaatagaaagtaatagattacataagtcaggtgcttttgattggaaattcaaatgcaaatattaaacctgggaacaatgggggtgagactttatagttatctttagaaattcaagtaacaaataaaggaattacttactttccgcagtagtataggcaagcacaacagaaagaaataatttaagaaatacatagtataaactgaatgtcagggaacatttctgcagtgagaactatcggaccataggatattcccctaggaaaattgggttgaatttcattggacatttgatcctgacagaattgaatgtgtatcagtagggaaatagactgaatatccctgtaggcatttttcatttctctcttctctgattctgggccctgttgatgatctgttcacctgctgtgattaggaagaaattttatctcttgtttttctacacccaggcacattttagatgctttcctgattgacataggctaaaaatggagcttcattgccctgaggttgacctggtaccatccctcctggtgttgtagaaatttctcctttctgtttgggaggcagtgttagggtcctttacctaaggtgaatacatgtaatataaaatgggcccatgtgtatagggtcagtgtcttcttcagatatatctagtaacctaacagggctgcaagctggcctctttgggagtgaatgatggttttattttcccctcttcccccaggacttgactttgaagaaaaaggatatttagcagactaggagaccacagacttttactgtgtcctgtagaaatgtgaaaaatttcaggttcctggatgggaaagggctactggagaagagcttgactccttatgctgtgacagtggtgtgtatgccagtctttccctgtagtagtatcattgtataatcaaagaagtaaactaaaaatgcaaatttaatttcaggttcattacaaatggtctgtatttccttgttataaactagtctattggataagattgttagatagattgttatccaatcttagtctattggataagattgttttcttagcttggcattcaaatacctgtacaattcggacaaagtctctgcttttccaggcttagtttacccttttctatagtaatgctgtattccagttaaatcagcctttctttctgtcctctaaatatgactctgtcctttcctacagtagtagttttgtttattccatacatctttcctactgtccttgccctcatctctgaataccttctctgatatgctccagtcctctgtcttacctatgaagcatccattgatcatttcccttcaagaactcattgcatttcttgtttttaccactcatttgacatatctaatagttatatttttcttcctctactgaatccacatctttcctttttaatcagattaaaaaggctctcttgaggaccatttcttacatgtctttaaatttctcacaactagtctttaagcctttggagagaaggaactatggcttatttatggtgcctgtctcttcccctaaactcacagagtttggcagtatgcacttaataaatatgttttgaacaaatgagtagtagatactctatacatatctattgattgatttaagatttgctatagactgaatgtttatgtcccccctaccccatattcatatgttgaaagccagtccccaatgtgatggtatttggagatggaggctttgggaagtaattaagtcatgatagcagagccctcatgaatggaattagtgcccttgtaaaagaggccccagagagctccctcgacagttctgccacgtggggttacagcaagaatatggccatctatgaaacaggacaggggtcctcaccagacattaaatttgctgatgcctttatcttggacttcccagcctctggaaatgtgaggaatacatttctcttgtttataagctactcaatctgtggcattttgttgtagtggtttgaactaagacaaggttgaattttaaatgctttgtaaatgtgttgaactttgtagatttaaaaatcatgtagcagaagactcataaagctacgaaggtttgctatattcccaggagaccagttcctcctgctttctcctagaccagcctgcacttaaatcatccctatatgaagagtttctgttggccaggcagattgttagctcaggtttccagatatgaaatgatgtcatgaaataatgggcatgaaataatgttggcaagagaaaccattaataattgggactgtcatagtattactattatatagccaatgctcgtgcatagataatatcatttctatcatgggtgtgacaataatagatttggaagaatggtgaaaaatttgataataggttaagtgaaattaaactatacaaacttgtcctttattctttgaaaacgatttaaatttttgatttttcattttaattttcttactcgtatttaaaaatttttccttcatgtcttgctagtgaaatgtacttgctgcaaattaaatccatttctttcagtgatagctttggtttgtaattaccttctttaagtgttaagtctgtccttagaatcatcagagcttctattatgtaattctttggagtaaaccctagttaatcagagcatgcatttcactggaggggcagctcagtgagtgatgtgaaggtgtttcctctgagaaacggaaacagttatgaagtgttttgtggtcctttgggagttgaggtgctatagaaatgtaaggcttttattacaactcctgacctactatacagaaccatgctaacatcattgatgattcttttgcataatcaaagaattaaacataaaagtcatattaattttcagcttcattagagatgcaagaatcaaaagagatgtttgccaaatgggaaggcactaaattggtaggagaaagaattttaatttcaagcttcaagtgaatgttataaataacctagcataaaaaagacactaccaaaagcgcctgacaatgtcctttttaaagatcagcaacattaaaaaggggaaaatgtaaaaaagaaaaaaaaagggaaaaaagaaactataaaaatatgaaattaaaattgctgtatttgagtcagtttatggtagtaaattacttctgagagcctcaatttgaagatcaccaggtagtctatggtaattagtataattttgctgtggtcaccaaatctttatattatttttgctggtcaaacagcaatacttttgcctttttttttttttttttaacttggtcgcagttgaagatgatgaaaaatccatttactcgtgaaagggtaaatgcaacttcctgatgtgaaataggggcatttaaagcactcacattaaggaaagtttgcattttaaatataaagtagtcttaaaatttttctctacccacatataaacaccattccaatatgtgtgaagagctgttgttcatcttgtaggatcactaatcacaggattaaagcgatgaggaagtatatacagtgaagaatgatgcccttttctttaaaacaaaaatctggaggcagccagaagagcttgggaaaattcttgtatttt

SEQ ID NO: 127694 - DNA, 2483 bp, Homo sapiens
gacctctaggctgacaggcacctatacctagaataaggattttctgctagagggaactgaatgtcatatggggctgtgatgggctacagcctcccaggttaagacttatttcacatggatcaagctatctcctcactccagcaatgacacagttagtatatatgttcataactaagcttaaatgccatttttaataaatattaataccagtataaggtaaggacaaggatgcacatacagtcctattatgaaatagggctgtagcagcatttttctagtttagttacttccttccagtatttcaattcctttcaatccaggatcttagtgattttgcatgtaaacctttttcctatttcatgctctctctttgcatttgctttattcagttgtattgaatttctaatgtggattagagcacacagtagggctggttcttcattttaataactttcctttccaggcacttctcagtaatcctttctttttttaagccaggtttagagagggagctaaaagcagaacaagacatttgagtttgtattgttctgctttattttcataagttccacattctcaactgaatttctagggacgaaagagaactcgattacttttagttcctttcagtgccactctaacttagtgacttgacttccatttctctaagtggaaatatttacatgtatttcaaaggatgctctctggcttagttagtatctctacactgattagagaatgtaaagcgatgtttaagtgcttattattttttaattacatttataaaggttaaaatatagataactcaaccattattattatcctcatttagaatttgtataccatttacatttccaaagtgctttgttcatgtaaattagttggtcctcctgccattcctataaattatgtcagtactatcctctgaaatgttgccattttcagtttatagttattatttttatttcagacaactacaccttgttcaaagggtgaaagtgattaatagctttaaaaccactaaaggtaaacattcttaaatacccttgaagttaagtagatgccggaattgctgagatggctgccaagccaatgttggagaatttatttttttgtacagattatatatatatctttgattttcttcttctcctctctgtttattttgtattttttattcatataggaatgtgcacacattgtatatttttcacaaaatttcatgaactaaacctacccactaaacacttgtgtcagggaacaacacagtaccagcatcactcgttcattgaatctcgatttgagtgcgcgattctgtcttacagactgaatctgtctaaacatcagcatagctggaattatggacacaatgagtattcatgctcagatgttgcttccattataaaactaatttctgtatgttccaaaagtgttatcttactgggttaaaataacactgagtagtcacagtaagagatgcacacaagatgtgcctcatgagtggtgtagacaagatatactgttggacatcacaggagcaaagttgtaccttttcagaaatgcttcacatggaggtgaaattagagctggactgcccactagggatagagggcttagacataagtgtaggctttggtaagagaaacaaagaagagggagtagtggtggcatgtgtcccaagcagggaagatagctatgtcttgcatatgacatgttttgatgcagggagagttccagtttgtttggagtaagggttcatgtatgtgtttagtcaccattcaaatttgagagttaagtagaggtcagatatctaaggactttgaatgctagctaaggactcatagtgaactaaacacttactgaataccatctatgtgttaggcacaatgctcagcacttttatatgcattttgaatttatgctcaagacacttggatctgcgggggcaggagttagtggcactgagatatatgagcagcctgggtagaaatggagagaccagagatagaaatcgcagaagactattagggttgatgacaccttggattacggttggtcctaaaatttataatttcagctactaaagacctggttctagaggactgaaacttcatcttttcttggttattctacatataatctaatgcaataagaacctgaatgatgagtacttagttggcagatatttatcagttgcctactctatatacatctctttgttagatttgatgggctgctcactctgtccctctgcccacctgatgttagttaatctgggggacaaccatgtaataagttacttcctagtatctatagtgaccagttatttgggagtcacctgattgaccaaagactgtgtttttacagtgttgtctcctttatttttttcttaggattctttttgcttttcttttttacaacagcctactgtgtcgcatcactgaatctagtttatagtttttcgtttctctacattccatcat

SEQ ID NO: 127695 - DNA, 2862 bp, Homo sapiens
gcgattatcctgcctcagcctcccgagtagctgggattacaggcacgcaccaccatgcccagctaatttttttatttgtactagagacggggtttcaccatattggctaggatggtcttgatctcctgacctcgtgatccacccgcctcggcctcccaaagtgctgggattgcaggcgtgagccatcgtgcccggctgcaagatcctaatatttcttagaaggagagaaatcctttactcacaggaactgtacacacatgttcacacatatgcacaagcatgcctgctatccataagcatttgtcatctttcagatgatggaagctgtttgagacccttaagggactgtagtcatgactcctgtcttttcagtatccctttccccttatcactgtgatcctactgcatttatggaaaaactgctggcgggccatcatgtttgacccagagctgaagttcagaacttccttgttgattgtcagtgttagtaggaatgaatttagcccattatagtgattggcaattagaatggtaccaacattatcagttaaatcctgtctgtttgcttaactcagttttgggtgctaaggcagctgtattctccatttcagtaacttctgaatattaccattcaggtgctctgcatcaaaaagccccacattggctgggttttgtggctcatacctgtaatcccagcactttgggaggccaaggcaggaggattgcttgagcctaggagttcaagacctacctgggcaatatagcaagatcccatctctaaaaaatttttttaaaattagccaggtatgatggtgcacacctgtagtccttgctgcttgggaggctgaggtaggaaggtagcttgagcccaggagtttgccgtcagaaaagtcccacatcagttactaaagtctaacagttctacctctctctgtctctaaaatcctcttaagtctctctgtctctctctaagaccacagctttagttcagggcactggtctctctccctggctcaccataccatcctattaactgatcttctggccctattctgatatattctccatagtgcagctgggatcagctttctaaatgacaaatccctccttaacttttttttgtttgtttgtttgatacagagtcttctctgttgctcaggctggagtgcagaggcacaatcttggctcactgcaagctccgcttcccggtttcacgccattcttctgcctcagcctcccgagtagctgggactacaggcgcccgccactacgcccggctaattttttttttgtatttttagtagagacggggtttcactgtgttagctaggatggtctcgatctcctgacctcgtgatccacccgcctcagcctcccaaagtgctgggattacaggcgtgagccaccgcgcccagccccttaacatttaaactctgaaagttaagtccaaattccttgacatggcacacaaggccttccttgagtctggccttggaagctgtgcatctcacattagtttcttggtggggtcctttctttcttgcctccaatcttttgcacatattgtaccctttgttgtagaattccctaaagtgctgtgcacatttctttcttgcagttttcatcttatgttgtcattgccttttcttggctcaactgggaactttcttggggccatgactctgacctgtgcacagctgtcttactgcctggcacattagaaatatttattgaataagaggtgaaatgaaaagaaaaggctgcgtgcagtggctcatgcctgtaatcccagcactttgggaggctggggtgggaggattgcttgaaggccaggaattcaagaccagcctgggcaacatagtgagactgcgcctccaccccctgcgcccccccccccaatacacacacacacacacacgcacacacacacacacacacattagttgggtgtgataacctacacctgtagtcctagctgcttgggttgctgaagagggaggatcccttgagctcatgagttcaaggctgcaatgagttatgatcatgctactctactccagcttgagtgatagggcaagaccctgtctctaaaaaacatttttaaaaagagaaaattaaaacttaggtaagtactgtttctttattttgtctgaggtagaatttaaaatgttgaggttatggaaagtttatattaaaatcatacaacattgatttagtaataaagctttaatgatgtatgtagagcaaatatcaataaaacaaaatttgtaattttatattagtatgtaggcaatgattcatattaaatatggaagaggagggaaaagatctggaataataatcataaaaccaataataaatatttgagtaaagatagagatgttgtagaaattgtaaaacgttaaatttttccctttttgtggtttctctatttagatcatggtaaatggatataagtattatcaaaaaatattgatataattttttattttctgaatatgatttttatttgtctttggtagcaaatgtaccacattaaggtggtatttggattataatttagggctagtaaacaggaaggaattgccttaatccaaatatacagtagtcttcccttatttgtggggataatttccaggctcctcagtggatgccagaaactgcagattgtaccaaaccttatatacaccatattttttcctatacataactatgataaactttaacttataaattaggcacagtaagagattaataacaatgatagtagtatgctataataaaagttatgtgaatatgcgcttgggaactctttcatgcacacactgtcttgctctctctcaaaatattgtactatattga

SEQ ID NO: 127696 - DNA, 1773 bp, Homo sapiens
tgatggtgatgatggaggtattggtggtgatgatgggtggggagggaatgatgttggtggggtgggactggtgatcgtgggggtcatggtagggtggtagtgatgatggaggtattggtggggatgatagagctggggatggggtggtgatggtggggtggattggtgatggtggaggtgatggtggtgatgatggagagattggtagtgatgatggaggtggagagaggttggtgatggtggagtgggattggtgatggtagagatgatggtgatgatgatgatggaggtcacagtagggtggtaaggatgatggagggattggtagtgatgatggagttgaggagggggcggtgatggtgaagatgctgatggtaatgatggaggtgatggtgttatggtggtggcagctgccacttacttaggatttcttttgtcctaacctctgggatgatctaatttcacctacacctctgcatccataatttactacatgcctattaagtggcagagcttggatttgaacctaagtttgtctgacaccaaagtccacatacttcacaggaatgttgcgttgcttctcacgttatttccagtccaccatatgtgaattctgtgtattttcacagaataatgacacctgtattctggtactgtgggactagtataagatggtcaaactgctatcaatgattctattctctttgcatatttcagtatccaacaatttatttataagaccaaaagacctttctgaactatcataggtagcctgtgttaggaccatcttatataaacaattttctcttgctggaactatctggagtgactgcataaaaaaagaagtataatcaaaatcggataaacctcccagtaggttagtcaatagataaatcaccattgttcttacttataggctgtacctctgtgttgttcataagggattgtacagtaaccagcaaatttgtaaatgtttagctaaaattcaataacagaatgatcaagttttattgccactttattgaggctttgttttccgttagaaagctaccatttgatagtctactaaaaatgccagaatttagctgtattaggtttattcttaattcattgccattatggaatgttcctatagcacaagtgacaggagaaatccatgtataaatgtctgtgctacatgctataagcacagtgattcccacctccaccctccatcttctcaaagcaatcatgtgaagtatcaccagctatgagagacagaatatgctggaggctaaatttctttatctttaaaatgtttccaaaaatggccagaggagttgatttgcttttgtttccatgagtattttcgctattacctttagagatcactaactcagagcagttcatatgactttctgctgtcatcatcctgacccctgcctaaacttttcttactgtggaaaatattaacaattgaccttattcagacatttggcaggctgtggtcattattaattccttcttgcttttctacatattttaattgccctcgggatctggtattctgaagaatgctactattggccagcttgataagtttgggaaatactctcctcttcatagctctgagttagttagccttataggactagtaatgagagttgaatgaaagaactagaaattactagatctttcttataagggaaagctcttcttagctaacattttaaaataattttgcatttttttgtttttcaatagttaggctatctgtatgatgttcttaagaga

SEQ ID NO: 127697 - DNA, 1454 bp, Homo sapiens
catttttggatacaaagtcttaaatagtttgtgttagtcaaatataaagaagttgaagcatctttgtatattctgtagatcatagatcctcattgaatcattttactatagtgtagtctttaatagtttgtaatgtcattagaagtaaactcaataattcttattactatagaataaacatgctattaataagaatagaaatattgttagtcatttatgcgttgaaaagacatttccatttcctgtgcttttcctgacctcagccagtacattagcacattcgtacactggcagaatgctaactagatgttatcacagattatgtatctgtagatttaatcttttcaggacttagcatcagcaaaagtaggacagtttttttttagtctttgtattccatctaaacatgtattgacattctcaagaaagtcatttgaacaaaaatcccaacatcaaatactccagagaaggcatctccaggtgcaaattatgatcagattatgggagatttatcttcaaggtcacaaaagtatgctagctttgggggaagctgtgtcatagtgtcaagtggaacatgcttgtttatttggtactcacgcagtgttgtttatactgaaatacttgaatgtatgtgctcacctgctgtttttcttctgccttttaaaagtcttggagtacatcattataacaaagcaatttttttttgattttgcattgcaagtttttgtttctctctaataatgcagtttacttctaagtgtggctttgataggaagatgtcagaccttcgagtggatcactaaataataatcacttgtctatcagtgagcttgttataaggtgtgttgcttttgatgggctattacctgactgctgggtcaaagttagtcttgctctgtattgggcaatctaaatttaagccttgaagagtgtccagattgtacagaatttctgatttgtatctggtcaatactgtcagaattcagtttttttttttttttttttttttgccagtatttggttgatgggcattagttagctgataaaagtggtatgttgtggtggggcattgtgggagattagacatacttttattggaatatatttgggtattttaatattcccatctttatttgggataatgtccaattatttttttcactttcaggtataaagtgttgtgtttttcttcagcatttgtctaatggtagcccagctctgcaaccacacaattaatcccaaaccgccatgaaaaatcaaatattctttttagctgtggtcccaattatgctggagactgaggcaggagaattgcttgagtctagttgagtccagcctgggcaacatagtgagactctatctctaaaaaaatcagaacaaaacaaaagaacaggaccgggtcataagcctaattcatgtgacaccatcaagcatcagaaaaaagtagtaatcat

SEQ ID NO: 127698 - DNA, 1016 bp, Homo sapiens
acgatgtcatagaactgcagtgactttggtgtcaaatttaggcttgactttcagtcttgctactttggatggctcaagtgatggaagtgcaagtgactcaatttttataaacctcagattccttttggggacttatagccatgtttaatcagtctggactttgctggaagcgcagaagaatcttcgaagggttttaaataggagatcattcatatttgcactataggtcaaaccagagattttggtacccagaactttagctgtcacttcatttagagattaccaaagctgctgagagctatgttgtccaagatcatatactttcctggtttggcccatagtgactgatcagtgaagggggtataaagtccaggccatctcagacagactctgaataactttaaagggacatactttcatgacagtgtaacagagaagacacttgaagcagatataaaaatcacaagccctaaaagactgacttaaaaaaatacattaacttaaaaatcttaaatataacaaaagacattaaaacaaaacaaaatgatagaccacagactggttgtatgtatttgtaactcttctaagtggtcaaagagaagtatccaggatttgaaagaagtcatacaattcaataagaaaaagataaacaactcaatggaaaatggataaagaatatgactaggcaattcacataggtgaatgcttgaatgaccaattataaaagatgcttaactttgctaatagggaaatgaaaagtaaaaccctggtgagattccattttacacctattgattgacaatacctaataagcttgataacaccaagtgttggcaaggatgagaagaaacaggaactcttgtatattactgatgagaataaattactacaatcttttaagcaagcaatctagaaatatctggtaaagttgaagatgtccatattctgcaactcagccattctgcctttatgtgttagcctaggaaattgtcacacatagaaataaaagagacatg

SEQ ID NO: 127699 - DNA, 2300 bp, Homo sapiens
taaaaaaatgggaagagatggtgagtggagctttagctatatttgtgtcattttatttcttaaataacaaagggcattaagcaaataaggcaaaatattagcatttgttaaaattgtggtgctatatacatagctgttatattattttctaaaatatagatatgtatagttgtagtcaacaacctcaaaataatagttgttgtaatgagagtagaaaattttgccaaggaacaattaaaacataatacaagttgcagaaatgctttggtgcatgcttacattttgttgagatctgacaaacgggaagtaaaatttggtcataaaagtctaagttggagaatcatttattagtacagatactaaggaaaggttgtcaaccatgtcagatcacacagagagggagcaaatgtagttaaataaaaaacaacaaaactttatatttggcaattcttattaatatcctcctaggatgcagttttcattttaggagcaaggttcaaaatcaaattgtagggagtatacaatatatgctctatgagaaaaaaagactgtggtgtaaaacacattaaaaaggttgtcagtgaattgaaggagagaaatagggcttgaaaggaaagatggagctaagaagtttgccttgtgcatcaaatttggtgtagtacttgaccatcacccatgtgaacagtttgaaatttcaaagtggtaccacagcaacatagttctgatttagatacctagagtgacaagttttttattcatactttctctctttcctctcttttaaaaagatgtaatttgcatatagggttgtttctctttctagcactcaaagatcctttgagtaaggaataatggtttctataatagcactgccaaccacagaatatagtcagatgcataagtaaatatatcttgaaaaagaactttatccagcatggagagactttgtatgtgggaaagctgtgaaaaacatgggaagatgagacaatgtgtacaaagtgccatcaacactacctcactcatgatcggtcaatcttagtattccctcatgtctcctccactatcagatatttgagaagaaataattgaggaaaacgtttcagaacactctgaaaggaatggagagaaagggcaacagtacattttttaaagaaggatggatgaatgactctctgcttgcagggagggaagctaagccgatgttggagtagaggaggagctgaaggaatgcacggtgagtgccctcctgttggtaggaagagggcctggtggtgatgaaggtagcaatgtgggatattacagggaaggaacaacatttggagcatctttggatgagtgaagaaatgaaagacagatgtctaaatgcattgtctaacaacattgaggattcacatggatttagatagtatgaatgatgaggtctatatgattatgtgatttttataccttggaagctgggaatgaagaatagcatacagggtgtgtaatagaagggatttgcagggctgcaaggaaagatttggtggcgacatggcaatttccttaattgtttgaacagttcttttatggttaagtaattcttttaattctgttttatcataggacagaacttaggcactaaagagtctaagaaaggcaggttcctgcccagtcaaaagaaatcaccagtaattagagctatctaatcatagaatacactgtctttagagatagggagtttcctaacaagggaaggattcagagagaggctaggatgtgaagatggaaggtctgactgcgtgtcaactgaaaccttttttacacttaaggtgttaaatggttttgtactcagaacattgatggggtaaaaaaatctcatttataattaagagcagaataaatgtagtgactataagaaaccaggcgaggttagaatacatgtagtgactataagaatcaaggttaggttctacttgtacacagaatggagccaaggatctaagacaattggggaacatctatgccatagtttacgtccttttttctgcctctgtactagtgacatcaaggacagatcatatgagtaatatcccctcttgcttgctgtgatccttgaccagtctacctcatcagtacctttagtcaccatggtttttttaccctcatttaaaatttcatttgaaacaagtcattataattggcttctttaaaataaaaaaccaaggagtgttaaatttatttgtagactgtgcatgtgaaacattagaattctttatagatttctagtttttgcatgatttttaacccttggcatcaatcag

SEQ ID NO: 127700 - DNA, 1657 bp, Homo sapiens
gaaagaacatagcagatttattagtttcactcatctcataaagataatgtcatcaaacatgttatgaacatagttcaggacaagagacaactatatgtattgattcctttctttgttccgtgctttacatatttagactataggctacaatcttggagaatcccagactcgacactttttttgttgctgtggcacattagtgcccagaaatttagtattgattactgtagtttctcttgcctcatctgaatgtgaaaggaatggcaaagtggcttcattcataatgttggccagttagctctttttgcttactgaggttgtacattggttttggagaatacggaataatcaggctcagagttactttcacattgtactgctaagatactgttgaattaaagtcacagtgttcatggaaaataatgtgtcagaaattactaagaagaatgtctgaaatgtgcacaggttgtgaagtgctggagagaaaaaaatgggtcagtgcattgattctcttggggtaagggtgaggaccacattctttaaggggtgataacaggagctctagttaaaacgtttctaaatatacacgacccacctcctgaggttctgctgtagctgtcacccctagggtttgttgttttcctttattctgcatgcatcactctgtgtactcactactagtagttacttttagggttattgtgaatattgttagatataagatgaattggtgcatatcctctgacgctgggagaccattgtaattgattggtcaggtattttatagcgaacttctatgtagaatataggattagataaagcctttgtatacggtaagctttcagaatttaaattaaaaatgaaaaagtcaatggagatttatgggaatatattgtaaggatgacagataatttcagtggtgagaaaaaggtcatctttgactatgtttcaaagtcataaagtggttcaatatgatattcctggtgtaagtgaattcaaggagtgttgtacagcagaggaaataggggagacatcctctgaataactgttatttcaagaggctgggtgtgtaggcagaattaaagaaggtagaagtggagagatggtttcaagaaaataacaaggtggtttcaatttgagagacattagatgaatcatgtaatgaggattttgggtggttatggacttgtagcaccaccagcagcatatgagctgatgtatggttagtaggactgaaaaaatgtcaaggaagaggaggaaaggagactcatggtatggaacagattaaggacttatttacagatgcagtgaaggaagacgtttgaaatgctccaattcttcaagttggtattcatgattaaaataattaagaagtcagttttgagaactaacagtaaaggaattgaccacctgactggtgttttgatgtgaagcagatttaaagggataaaatctgtatgatgggagatcaggaaggcagcagtggtgcattcatacacagccaacactcaagtatttatttgagtattgttctggggagccatggaggatatggtttttgtgttttaaggggatcatagtctgattggcacagggataacatcaaaggccaacccaaatagaagacagcaaatgttggtgtgtcaaatgaatgtta

SEQ ID NO: 127701 - DNA, 1049 bp, Homo sapiens
ttttaataatagaaaaaaaatctgtagttagaattttagagaagtatgtgaaagttttatcttactacagaaattatgggaaatgcttactttttaaaaggagaaagggaaagaatctcatgttgaaaattgtcattaggtaaagtaatagaattaatggagcaggccgggcgcggtggctcacgcctgtaatcccagcactttgggaggccgaggcgggtggatcatgaggtcaggagatcgagaccatcctggctaacaaggtgaaaccccgtctctactaaaaatacaaaaaattagccgggcgcggtggcgggcgcctgtagtcccagctactggggaggctgaggcaggagaatggcgttgaacccgggaagcggagcttgcagtgagccgagattgcgccactgcagtccgcagtccagcctgggcgacagagcgagactccgtctccaaaaaaaaaaaaaaaaaaaaaaaaaatagaattaatggagcaatccaaaatgagctaaataagtttctttgtgagaattcttctagagattaattctagaattcttctagagacttcataatatatggtaaaactaatattgctgcttagatattctgtgtcgtcttttgtcctcactttaggtaagcaatatgtacgccatagcactctctatcttactttacatcactttgctcatttggtgattgtgtaggtgtgagtatgtgcatgtgtgtagacttttgtcagtttccttcctgctaaattttaagctcattgaaagtaagaaccatgtgattagcttattattattatgtaccctgtacctagtgctgttcttggacataatagtgagaggtgacaacgtgctagcagccctcggtcgctctctgtgcctcctcagccttggcatccgctctgggccctctttggggctggcagaggctgaagccggcttcctctgctcgtggggaggtgtggagggagaggcgcgggtaggggccagcgctgcgcgcaggccttgtggccggcacgggatctgggtgggcacgagctc

SEQ ID NO: 127702 - DNA, 1048 bp, Homo sapiens
gaccaaaccgttatatttcctaaatgtatttgattgacgtctgatgcctccctgaaatgtgtaaaaccaaactgcacctcgaccaccttgggcacgtgttctcaggatctcatgagggttgtgccattggccatggtcactaatatttggctcagaatatatctcttcaactgttttacagagtttgactctttttgtctacaggaaggagatgatcagcacccacttcccgtagatgttttctgtttctggtaatgatgtttttggtgttagggaattcagccttggctattctatgttcattttaaggttggtaacatcatgccccagttaggggttatgtgtctgtaattgccacaggagcagccctgtgtgttatgcctgcagctggctctgaatctgttaaggaaagagcaagtaaatattttcttacaaatataaaaggaagagttaaacacttattgtttggaaaccaagctgatgagcatattatattgtctgaggccccagaaataagcaaattaattacatgcaaataacttgctcatgaagtgtgggataataatagtatctgtttggatgtttatggcaaatttatttacatggctcaattttctgctaattttcctgtggaaaataataaatattggttccttttgcctttcttttagaaatacatcattgaaattatgaaaactgttaccatgtcttgctatctttgctttgccaagggcaattttaaagacagtatttgtaaatacatggtgaagaaagaactattaatgtatgtaggttctttctgctgtaaacagatggttgtcatcaccaacatcattaaataatacagaggttattattgaatattaacattcagtagttcagttgacttcctgttgatctttttcatgaacatcttttgatgtcagcttcttgctgagcttcagacatttcctctcttaaggtataacagggaattgagcagtttatattgacagtgtgatccatggtctctgtctttttcattaatgagtaattggattcacattga

SEQ ID NO: 127703 - DNA, 1051 bp, Homo sapiens
ctctaaaggaaccttagcatccaatgtgactctcctgatgctcccatatgtgtggtttttttttgtttttgaggtatatcaaaggtgattcgatgagttgttttatttttttcaagataatcatttttttgcagttcattaacttggattgtatgtcaggcgcctcataagctaggggatgagtgtgggattgagtctttagttgggatgaggagtatttgtttttgtatccaactttataggctgtgctgctcgactcccagcctttctcagtagggtgatccacagctctactaggttactattttatttgtttgctgtctgtatgctaaggctcaggcattgacatcacctctatacgttttcatcaacaactctgacattttgacatgacaaccttgaaactattatcttatggaatgccagacacatgatctgttgttcataaagcagtaagtagaatggaaatggatttttcttttaatttttggtagagcaggaattttaacctccagtcagaaaggaaaacagagcagtttgtatcttggattagcttttatcagctactctgcaccctcatttttgccatctacaagtgcgttggggtgcagggagatgtggggttggcacaggaaggttgagccacccaactctgtactctgtaaattaatatcttgcttttgcatgaactctctttgccggttttctccatcaattgccgtggtagagatgaggctggtggccaaatattttcttcttgtatttccagtgggtaagggggtggtaccacacacactttgggtattccattgttcttcctttcagtttgaggttcccatgtagaaaaattacactgtgttttgataatctgattaacagaagggaaaaaatcaattggtagattttgaagagagaatcaatttccttattacagaaaaagatgagagacataactaccttgtgtttgcaaattatttgcttcagtctgtgatgctttcaagagtttgagaaatagggtatttaacttctcaacttatgcctgataggatca

SEQ ID NO: 127704 - DNA, 1051 bp, Homo sapiens
ccatttgttattccagtagccataagcatttgccatcaagcagagcacatgccttagagtgatcaggaagaagcaatgtcagaacaaatggtaatcactctgtgctaatattctattctgttctattctgttctgttctgctctattctattcttattttattataatccttggagcatatccagctttggctagttatgcacagactcaatgcttagaaatttgctgttgtagaatttgtaaatcaggaaacggattcaataattgtggcttgaagacttgtttagtataatattcgggttccttcagttatattctacatcagtgtgttttctggtatgccacttgctttcttttatgccacaaacatctgttgctgcttattgtagatgttagattttgagccagggtataccaggacttactaaagttaattttggtaaaattgcctgcagtaagtatcatcatttttcttaaatttttttcttttgtgttttgtttttccctttttctctgatcagaagttaccttatgaatgttatacatatgtgtagattagaaaattcttataatgagtcagaagttgactataggaggattgtggaaatattgatgccttggaaaggctgaagttgcagggaaagtattaagcaagagaggcgtggtttgagaatagggattgaggtgattgacagcacgggttggaagaacaatgatgaaggagaagtagtgaggatattgatttagtaagtgaaagggcactgaaagaacgaagtcttagaatattagagaaagaattgatggaaacatgacttttaatttttttttgaatcaatcttgatgtttattttggatctaaaataaggaaccaagtataagactgctttgaaatcataatctgaacattattttaaacatttcactagcaaatcatctgctttctgtttcactatgccgttttctaactttgctaagaaattgattctgttacgtattaggacctaaattttttccataatttttaattttttaaaattaaaagcattgcgat

SEQ ID NO: 127705 - DNA, 1512 bp, Homo sapiens
tttccctgcttctggtccatatcaataatattccattatatggacattttgtttatccattcatcagttggtggacatctgggttgattccatattttggttcttattaataatgctgctataaaaatttgtatgcaagtctttctgtgaatatttgtttacaattttactatacctaggaatggaattgttggatcatatagtaactttgtgtttaactttttgaggaactgccaaactgttttccaaattagctgtaccattttatattccaccacgcatattgggcatattatttgaaatgtaactgatttactaagaaaaaatagttttaccctttctatcttgccttttggacatcatctatactggaatgagttactgtctgatactttgaaaggccataaaattgtagagcttgagaggttctaatgaatccatctttctactggaatggaaaatccctgaagtttaggcaccttgtccattttgttcacttctgtatccactccacctgtgtcagcactgtaaatactaggtgcttagcaaattttactgaataatgaatctaatccaacccgtttgtttcgtaatgagaaaagtgatgcccagagatgtcaggtaactttctaaaggtcactaagggatttaatggtagaacaaggactagaattctggtcctgatttccttgccaaattcttgccttcaaagtcatcttgaattcactgttcttcctgaacttcatggtccattgctgacctgatacagaattttctgacagttttatagctgtgctttgggggtttattgacatttaatgagtgtttttgttcttgtgaagtcatttacatgtttactgctgaggctagcattcataacaagaaaaaaacatttaaataactgcattttacccagggaagataaattacagttgcctatcaataagtagataactttcattgctgccaagattattagattgtggaaggcaataaatttgtaccctcccttgtgagtcacttgccttaaaaaattcacaactaattatctgaaagtgagacaggttagtacaggtttgctatctactagtattcctttctttcctaatcactcttgcagatggaggaatccattttatcagcctttcctccttattctgctcttccagagtaatatatgtgtaaattaaatgtagcatagcttaagtaagcatagattaccctgtatctgaggcgttgtttttagagccacatttgcatgttaagtggagttgtgtgccatgagggataggtttatagaccggacccgtaatgaagttgagaatcattgtgcaaaagctgcagactacaggtagacattgagagcctttgaatgtggagagcgtatatttcacttccttttgacaaagactttattttataaggctttatgggaaacagtgtgttcaattacctcagttaaaactcattccagggagcagactattaaaatactacttgaaagtactgaga

SEQ ID NO: 127706 - DNA, 1004 bp, Homo sapiens
ggctcactttactcatttgtaaaatgtggatgataataataaattcctaccttacaacacagctttgtatttggtgagctaatgtatgggacatatagtaggcatttaatagctgatagtgaaatctgaacctggggttcattggaccttcttaagaaaattttggtagatagatatataaatataagtatcatgtttatgtaatatatgtattcctctcccccctttatatctgcatcccatgtcttgtttccagtaggatttaactggtatgtggttgataagttaacttttaaatgtatgtaatagccagagccttttaaagttatcttaaaatgttcactgtaaagcttcgttaatagctgctgtaaatctgtttgtcaagtgctttccactctcttccagtttctgctaatgctactactattgcttactacattatccaagttggaaaccttggtatgatctttcctgctttctcttttctttgtaattctgctgtctagcaggctatttctatgcaaaactaatactgcataaaatattgtcaatgccaatgtaaggtagacagcttagcaagtacatggacttgaaacaccagagtatgctaagcagcactctatagctgtaatgtattaccctttgtcaacagatttctgagacatcaatgaaactcctaatcatgtccgtttatacgatataataccaattttacagtttttttctgcttaattctcattcttattttcgaatggtagtagtatcaatggcagacttctgtaaaactaggactgacatacttagatgatgagatcttgttattccataagcggtaggataccagatgtggtaaacaaataacctctagcagcctgaatggaaggatgtggtaggttggattattgttcagcaaatattcattccctaacctaccccactcccaatagccccccacccaacctatgagagcagtctgtttcgtcatccaattgctattggacttg

SEQ ID NO: 127707 - DNA, 1857 bp, Homo sapiens
ataaattgaggatgaactgataaaaaaaaaatacatctgagtgactatggatgggtttgtgtgggagtgtgtgaggatgggagaaacttccatgattcattaagatatattatggtcatagtaaaggctcattttaaaattttttgatttctttttaaattttgcgtgttatccaaacatgttagaggatttcattttaaagaaagtactgaaaatatttgcccaaattaatatttgtgttctactttttttctcttatagtttctcaaatttactatatttgtgttactagagtttttagatttttattctgattatggcttatgattatccaccagatgtttaagtattttaccttttgctattatttatgagagaaaaaaatggactgtaagctccctgtggtacaattttctgttcagaagaaatggaaaagtttggtggcattcattttctagctcatggtcttttcccattttcgattatctggtgatcacttactatttgctctaaacttcagactaatgctggacaatgaagaagaatgcctgtgacctcatggagctcacatctggatgggaaaacagtgctattggtttcaccactaaaattttccgtaatatttctttgttaccattttaagatcgataggatattttattatctaatcttttttccacttcacatcttttatttccccgtttttctgtgatgtttccatactgattgtaaatgactccacaagtgtgtgcatgaattcccttaagctcctctgcttcccatcatccaggcctgctgattggtatgagttcagtattgtcaagtgttccccatctgctttttgtcagtcgctatttttgcaaagtcttccttctctctaattatacaaatatgtctttttcatttttcttgtcaaagacaaattaaaaagaattagttcagtttcttagctagtttagtcttcattaattccaaaccccactccatttttagcaccatttttcttttcctagtctttgtcccgctttttggtaattttaaaagctcctcttctcttgtctgacttatttaagtagcatgaattaatttgctacctctgactcttttctataagttttagctaactctaacaagatactttttcactcttctccatatttagttcagatctgtctttgtctgtagatctttgaagagtcatttgtgaaactacattaggtgtttcttgttcattatcattttccccaagaggaattttaatcctatgtgtgttaattatttaattatcctaatgatgtctcatatggtacccctggcctcttgcacactgatggaattaatcccttatcccagggctcctcagagttcctgattctttaatgtttgtacatttatatttaaatagttcttatattagtttttaagtaactttcccctggtttttccttgccatcttgattttgtctcttatttctctaatgccctatgttctttcgatttaaatattatgacattagtttcttcctttctgttgcctccaatgggggttgttattatctaatatactctggtttcaagctttaatagccatgagaatcgtctggaatgcttgttaaaagtccagatttctgagtcttagcccagaaattctaattcatttggtttgtgaagagcctagatatgaagagccaaacatcccaagttttaatgaggtggtctactgaggcagtccactatgactaccacctgctaactgccatcctttatcttaaacgcagcagccagatttttcatctcagaacatttataaaatgcctgctctctgtaaggcactgtgttgggcactcagaatatcac

SEQ ID NO: 127708 - DNA, 1322 bp, Homo sapiens
atttttgtatttttagtagagacggggtttcatcatgttggccaggatggtctggatctcttgacttcatgatctgcctgtctcagcctcccaaagtgctggggctacaggtgtgagccaccgcacccagcccatatttcatcagttctaatgtatcatcacttatcagacccctcccaacttcagagatgttaaaatgtgaaataatatgtatcatatatccatgaagtatagtgtacgtatttatgtgtgagtgtgtttgtatttgtgaggataatgataccacacaaagctaccttctgactactgacacatggttacttgggaccaaaaaagctgtatcactggtctgacactcctgaaagactcaggatttattaagaaacataaagcctgtaacacaaaagaagcaaagatgtaggaggagattatcagtctctcagcccagatgacccttcccatgttttccctggacctgcctcactgttgaattgtgtaatgtgtagagattcctaacaatgaagccatcagggagactataactcattgggtaactcttccatctatcactcagctctgacatctccaagaaaccaaactcagatgagcacattgcttattgtgagttatagcttctttattttttactttttaattcaatatattcatttaaaggcattaaaaaaataaatttagtgattacattgaataatcacttactggcaaccctctcccacccccacagggacacacagtttaaccatttctgagtcaaggccttgcataggtaacattaactactgtttacactcttcaggaagttgtcatagttcttgaacactacaatggctttcttatttctcttcatgttttcactggatctgagtcttcctgggagggacagtgacttattcagggattcagaggaaagtaaggtactggaatcaattctgcatttttgtaaaagctctcattctgttatttttcccacctttatctccacccccacccccccattacctattcaattctgtcttccttccaagtacttttagccttagaattaacttctcatgctacagttggtcatcagtgttcatgatgtgactggaaatgtcagagacatttgaaccagagcaactccatcttgggtaagggctgggtaaaataaggctcagacttactgggctgcatttccaggtggttttaagtcacaggatgtgatcagaggtcagcacaagatacaggtcataaagaccttgttgataaaataggttgcagtaaagaagctgggcaaacccactaaaaccaagatggcaatg

SEQ ID NO: 127709 - DNA, 1035 bp, Homo sapiens
ctggaaggaaaagataccaggataagattttttttaaagaggggacaagggaaagagaagaattgtaaggaaggttaaaatgctgcaacttcagaagagaaagccataataaaggaactaggatactaacaattgatattccataaaataaaatcagagatgcaaaaaacaaattgagaaatactcccaaatatagatgggaaaaacagcaataataaagattgaaaagctggaggagagatgatagacataaaaatttcagaacagggattcaatccaagtattacagaaataatgtttgtaaaaagagatgtacacacacacacacacacacacacacaaatgtattttcttgctttacagaaaaaaacaccatgagtaagacaaaagagtttaccgcattttccagggaaaacaatgaaataacacttatctagatacagatagaataaggaacttacaaaaagaacaaaaatcacgatagctatatacttcctgtaacactaaatgtgagaagactaaggagcaatgttgatagatttttaaagaaaaaacagtgtattaaaagaaattatccttgcatttaagaaagctcagaaaaaaacttgagacagttcagaacataggtgttcttgagaggtgtgttagtttcccagggctacagtaacaaatgaccacatactgggtggcttaaaacaatagaaatgtattctcttgcagttctagaagctgcagatcttaaatcaaggtgttggcagagtcaccctccctctggggtctctaggggaggagtcttccttgccttttcctagcttctggtggtagccagcaatccttggcgttctacggcatgtacaagttttactctaatctctgcctccatcattacatggcattccttgtgtgtcttctctgtaaccaaattcccatattctttttatttatttatttatttttgagacagagtctcactgtcacccaggctggagtgcactggtgtgatctcagctcactgcaaactccacctcccagatt

SEQ ID NO: 127710 - DNA, 1068 bp, Homo sapiens
cagcttctagaactgcaagagaatacatttctattgttttaagccacccagtatgtggtcatttgttactgtagccctgggaaactaacacacctctcaagaacacctatgttctgaactgtctcaagtttttttctgagctttcttaaatgcaaggataatttcttttaatacactgttttttctttaaaaatctatcaacattgctccttagtcttctcacatttagtgttacaggaagtatatagctatcgtgatttttgttctttttgtaagttccttattctatctgtatctagataagtgttatttcattgttttccctggaaaatgcggtaaactcttttgtcttactcatggtgtttttttctgtaaagcaagaaaatacatttgtgtgtgtgtgtgtgtgtgtgtgtgtacatctctttttacaaacattatttctgtaatacttggattgaatccctgttctgaaatttttatgtctatcatctctcctccagcttttcaatctttattattgctgtttttcccatctatatttgggagtatttctcaatttgttttttgcatctctgattttattttatggaatatcaattgttagtatcctagttcctttattatggctttctcttctgaagttgcagcattttaaccttccttacaattcttctctttcccttgtcccctctttaaaaaaaatcttatcctggtatcttttccttccagcctgttttctctttaaagatttcttttactgttgcaagaagctatgtgttcttgtgtgctactgaggatgccaggatttactgaaaattttttgtttctagtttttgggttattattattttttttttgagacagagtcttgccctgttgcccaggctggagcacagtgcagctcactgcagtctcaaactcttcggctcaagcaatcctcctgcctcaggctccttgagtagttgggactacaggggtgtgtcaccacacccatttaatttttattttttgtagagatggggttttgctttcttgcccagtctgatcttgaactcctgtcctcaa

SEQ ID NO: 127711 - DNA, 1050 bp, Homo sapiens
atattttaattgtagtaaaaaacataaaatttaccatcttaaccatttttaattgtacggttcagtagtgttaactatattcacattagtgttaccttttattgcctttacctttgaaagctttttgtcctactcagaagagctgaggctttgataattagcctgatgcactgtgaattgctaagagtccaacttttttcatggaaggaaccgaagacaaaatgagagaataaaagcagagaggagggaagaggaatacagcttagattagaaatggtccctacagcagcattattagtaaatatctcattttctggattccaagaccctaagaagtataagattaggaaaaaaaagtaaaactaccttaaatgtacacatctatcataagataactgttgatttttggatatgtgaaaaaatgtgagcaaatgtgtaccttagaatctgagaaataccaggaagtctcccacatggtgatgagaagcagcaaatgttgtgtctgaggaggaagttggtgaccagagtagaacagtgccacagcacaggcatcaagaagggtcacaagccatctacccccaatagcctctgccatcctcatgctccagtcaacctttagctctctgtgcatctcgtatgtccagaatagctaatgctcatccattctagatagcagttttattttttctataaatgttatttttaactaagttgtttgattctctactattatggattgttgagagcccctgacagcctgacaaatgtaccctgtggaacatgtgcttagcagtgatgacagaatagccaacagaatgttacatatgtaaactactcagctttgtgttcactctgggcaaatgaacaacatatggacatttgaaatatatgtgtgttcaaaattctgtcatgtgaggttagttgtggaattcgatagtccattttgtatttgttccatgtgaaaagggccttataatggcatcaccagttgttcattaatctcctttcccttatgtaaagtctccttttgtcctccctctgccagtctgt

SEQ ID NO: 127712 - DNA, 3291 bp, Homo sapiens
aaggaaatcttttccttaattcatttctgaaaggacatctttttcatactaaaagaaccttttgtttagtattatattttaaataatttctccaacactgctttcatttattttatttattttattttattgagacaaagtcttactgtgttgcccaggttggggtgcaatggtgtgatcttggctcactgcagccattgcctcctggcgaagcgattcttgtgcctcagcctcccaagtagctgggattacagttgtgcgccaccatgcctggctggtttttgtatttttaatagagatggggtttcgccatgttgtccatgcaggtctcatactcctggcctcaagtgatctgccctccttggcttcccaaagtgctgggattataggcgtgagccaccacgcctgaccactgccttcatttcttctgaggagtagctttgtttcttgttaggccaaagtttatgaaacaaaatttcttccttgctaataatagaacttatttctaagatggcaatatgtgattacagtagtcctcccttatccgtgtgggatatgtgccaggacccccagtggaggcctgaaactaaagatagtacagaaccactctatatactatgattaagttataggccagacacagtggcacctgtctgtaatcccagcactttgggatgccgaggcaggtggatcacttgagctctggagttcaagacaagcctgagcaacgtggtgaaaacctatctctacaaaaaatataaaaattagccatgtatcgtggtcacagctacttgggaggctgaggcgggaggattgcttgagctggggaggttgaggctgcagtgagtcaagattttgccattgcactccagctgggcaacagagtgagaccctgtctccaaaaaatatatataaaataaataaaaagtttaagttataaattagagtgagaaattaacaacaataactaataatagaacaatgatagcaatatactgtagtgaaagttatgtgagttatactctttcttaagatatttgaggaaggggtgaagtgggccagtacaagatttcatcacattactcagagcagcatgcaattaaaaacttattaattatttctgtaatttttcatttaatttttttgaactgtggttgactatgggtgactaaaaccgtggaaagcaaaaccatgggcccaggggttaggggaggtggggatgggactgctgtattatttagtagtattattttcttatcaaattttatctgacaaagtttaggaataccaccatctagattttaatcgtagattttcagttaaaatgtcatggttgatatatgagacaaaataagtttattttctagatttgttacttgtagaacctgtttattatagagagttctaggcttctttgaaagctgttctagagttgataaatctgaaaattcaagtggtaggatgaaccaatatcatggataaagctgagctaatggttgtccaatgaataagtgctgactagagctttaaaactgcatatataatatgcataattggcagtccatagatttatgggttttaagttactgctattttgacttaaagattgaacgatctatctgtagtgctagtgatgtttcaaacatcaaaagtaacagaacttcttgcaacataagcagtgcaactcttgccatgtctattgtatcccaaatcatacacctttattatttattaactgagaattattgcaataggtttaccctctgagaaaataaattataaggaataaattatgtgagctgtttgtctccttccaccttggaataagccagaatgtctttggttgatatgcttcattctgtaatcaatatacgtgtattctgcttttattcatggaggctattttgtaaagataagtacatttttatcagttgaaggtaaatgcaaaggaggtgaaagcacctctattccagccattatcattatccattatcattaatgatcctaatttcttcttgcaagttactgtgactgaatcctagaatcactgtatttatagggatcaccagattctagagaggtcaccatgtggctggaaaatatttgggttttagttttatgtgcccagaagaaagaatggctgcaccaaggtcaacaaaatgggcaataattatatctccactgtgtgaaagtgccacagtatcaggaatcgtaaactttgttgcctttatggagcacactaccataattcacattcatgcgatcatatcattgaattggcttaggagggagaaaacttgagatggaactcccctggtattttggtaaataacagtaagccacattctgtactatctaatcaatgtctgatatgagaaaacttaggaaacatcatgaattgaactctgcaaactcccctgaatggtgtggataatcatcttgaacttgaaggcaggtgtaccttcccaagttctctgagctcatttttgggctgcagctcctgccagtatggaatcaggtatcacagagcccaggatgaaggacatgataggtggtttggagaattgagtcactccacagatcacctaggtgacgaagatacttgtggtgtgtagcacacagaaagcactcataaatgctgtttaagctaataaaggaaattacaggaataggccatagaatttgaagaacacagataacacttcaggataattttatttgcaggattatttgtataagccagcagagaaactaaatgtagttcaatggaatggaagaccactgaagaacactgagagctccttcagagcataaactatcttaatcatcttttcgtgggcaatacctaacatagtgccctgcattcaataaatgctcgtcgaatgaacagaaactttagtgaaacgttaatatttgtgttgggccttgaaaggtggttgaatttgatttagtgaagggaaatgacatggcttttcagaatagtaggactcaatgaataaaggcacagatgttggaatgagcttacttaattttgtgagacacaggagaggtcagtctgatgagaggcccgtggtgtatgttgtggtggtaatggttgataagaggttgttattgattgaacacacacaaaaagactcagtgcaagcttctttggggaaatacaaagggatgagacatttttgtactgagaaattctgtctcacagactagtctcataactcctgatcaatagccttactataggctgttgatcttgaaagggcaccagcaagaagcaagtgcagtatatag

SEQ ID NO: 127713 - DNA, 1068 bp, Homo sapiens
gggttgacagaaggggtgtttttcttaataaatgtatacctaaagaaaagttatttttactggctagatatcacactacaaatattttctgactttgagttctgtagttattttgtctagaccactacgcagctattcatctcattcattattgcacttattggttgttttacctagctcctctgaagctggagaatctgagattaagtattagagctggaataaggacctgactctgggggttgggattgtcatttatcctattgcaggatgcaagccctcgcaaattttgtgaagtgcactccaaagacatggttttgctttcaactgtgatgacactataattgatcaagtatattctttcaaagaatcataaattcttattggagtttgaggagatgtcatattcatttgtcaacatgtcactccagggacacaggtgcagcaaatttatggaggaagcaccttgtgtttctcctgagtcacataaatatgaagcagaattgattgaaaacgtgtggttttagattactcctcaggtggagagcaattaagatctctctgtaaaggcatttcactctgcttctcaggttttcttgtagcataggcagagatcaggtctgaggggacaccagagaaatttttgaagacctgatggtgtcttctcagaaaagaatactaagacatttctctggcagagagaatattgcacatttttagtcaagtgcatgattaactttgacatttggaaatggaacttcacgtaaaaataagcatggtacttctgcatgtttaattaagatgtttagttcttgtcaaggctgatagccctccctcccacccccacacccccgccctgtgaagggcaatatattctcaacttctgaaatttcagaaacctgtacttaacctttaattgtcactccatttacatggaaatctgattaacaacttttaaagttcatgagctcctggtaaatgcaattaagacctttttggagtttgttattaagagctggcatttaaagaagactaggccctggctactgttgctgtcttctctgtagc

SEQ ID NO: 127714 - DNA, 1055 bp, Homo sapiens
tggactccttaaagaacagaaccactgtatttgtctctgcattctggtgccttgtactctcagtgcttccaaacccccttatctcctggtctttacaatgttccccttaaattccaatgagaaggtatgtaacacagttcctggcacttagtaattacaaagtaaatgctggttgaatctgaatttgcaattgttatctctaaaaattctattttgaatgaactataggcaaatatttttttataagtgtgacaatatttacatattacagataaacaatataaaatcatctttagtaactgaactgctaattgaaaatgctgggtcttagccacttaattgagtaaactgtctccagagagtaatttgggtcttttccaagatgcattaactctttcaggtcgttagggtggcacttatctcattggagcagaaatgtaataaatggtattcctataatgtaagtaaattaatgtacctcaaaaagcctgaagtttcaccatgggtgttgtagttgtactccaaggagctcatctgtgaatgtgaaacagcaataagtagctgctgtttggagcatcttactttcaatttaggtaacttaagacattgtgcctagatgttgacagagatacaaagaaaagacctggctgacaggcggcagagaaggcaaataactgctaaatgaaatccttgagagatacaaactgctgtatgggttttaattagagtgagatatcatagttgacagtcgagatagatggtaatctcccagaagacaggcatcatggcttttttacacaatatgcttattcatgtttattctcagtatatagacatgtataagtataaatattaatatgaacaaatatatttgtaaatatgagttgaataaattgtaaacatattttacaattttcatatgtgtgctttttttccttgtgagaatatgaaatattaatgtctggcattgatctaaagtgactatagtaagtaggtggaaaccagaaaaaacacacggcatcttttagagatatatgctactcacaggttccctg

SEQ ID NO: 127715 - DNA, 1071 bp, Homo sapiens
ttgcctgaaagggatctaccacatcaaatacctcagagatctgagtgtttaattgagtagctgggataaatggagaagctaaagacagaagatgtgttaattctaagcctatgactctcatatttatttaaaaaaaacctctgcatgtataaccacaaacagttataggcaaaaggttaaaggagattaaatggtaaatgaggaattaattcagaatgatgttaccaatgttagcaagttataaatctcaaaatttttgtcctgctttaataccgtgagattgctaagtaacatcttaggaactactaatcaaatatagcagaagagatgcctaaccaacctagtttatatgttctttaaaacactctgtatctttattttgaccacagagccattcaacgtaataggtcctcagaaaaaaacagtgaatgatgatatcactggaatatgtagacttccaagtgctttccaactgttttgttgttgttgttgtttcttgcctttagtttttacagattataccttttaagttgacacacccatcaattttgactattatttttggggctcttgatgaacaacaaatagaaattcatggtacttaaaaatagtaaagagattagtatctaagatatgaaggaattgagagccaacaagaatgtgggatcctgcacattttctgtagacagaatgtatttgatattgtaagtaatgctctttgttccagaatttcaatcttgggtgattttcttcacgcaaatgttaatcagaatagcttgtttacttttatgaaaattaaaatttgaacccataggtgtgtgcttagaatatatacaatttggaaggtgcagtacattatccaccatgatgtggaatcatcaataaattatatagttatattttaatactaggcatctgatgtttgtgtcaagactgtgtagtagaagatttagcccaattcaaataaatttcaggtatcctagaaataaaggcttttttgttctttgagatactaaaaaattctggccgggtgtgctggctcacacctgtaattctagcacattgggaggc

SEQ ID NO: 127716 - DNA, 2093 bp, Homo sapiens
acctaaatttaaaatagtattttccagctggtgatgaatggtattagacaagagaggcaaacaatgaagcaaacaaacacaaattgcaaacatttagcctgtggttaaaaattacacccatcctttttcttttaaattttatttgtattgtagatttttgtactgaggattaatttacagagttcattctactttgaagactttttaatttgcatataacaacatattcattaaagcttctttatgctttttttaaaaagttcagcaatttgttgtatttttttgatttgctggtctgttgcatggccctatggtggaagtaaagaaatgtaatgctttaaggaacatataaattgggggtagtaagatgtctttattattaaataaggactaataatatcaggcagtttttgatgaatacttattgaatgatgtagaaaatgggtgttttaggagttcaggaaagggtatagccaactagagtggcctggcaagggctccttgaagaaaaaacactggaattattcttggaagtatttgttggtatttatttaggagagaaggtaatccagattaggccttctagaaatgagaatgcccacatatattcagggaagagttaagtaattttgattgcagtgttgggtttacgtttgagagaataagatacgcttggaaatatgtactaaagtcagaatgttgtagatgatgaaaggagtagccttctgatgatagcagcagtgttttaggactgtcagtctgttgatattacgtgagaaggactggaagggaaagagatgagaggcagaaaattaaatgaaaactacatgaattgaactaagttggtggctgtcaaaatggacaggagtgggcaaactaatagggagttgaggaacagtcattaatgatcttgaggactaattcccttatggacacaaaggatgtggaaatgtatcaaaagatggttctgaagttttaaacctggaaagtagtgaaaataagaaactaccaacaaacaaaaaggagacagaaggaattaatgtttttatgggaagatgatttaggtttcagaggagttggttttcttagtgaaatatgtgaatatatatcaagcatgcagtcacagatgtgggactggagctcaggagagaaatgaggaataaatcacattgtgataaagggaacagtagatgtaaaggctactttttaaagtttgggactcaaagacagaaggaaaataagattacagataaagcataaggaccaatgcaagatttttgttgagaaagtaggaaaagtgtgtgtttgcagattgaaaggagaagtgggtggataggaatagactaacaatgctgagaggtaacaattaaggggactttactgatgataaggggactttactgatgatgagaaaaagaaaaatgatcttaaaatacctgtgttttgaggtcagtattttattatacaaggccccagtcattggattctagaacagcaagtgcctcaaaagagttacttggattagtgtattttcatgctttggtagaaacatcactctgtcatgttgatgttaaccatctgaaatatgagtgaaacaatgcatttatatacatctttctgtgttatattaatttgaaattcttttctggtttaccagtctttttttgatcacaaattgctgaaaatcttattagcagcagtgccaaatatacagtataatttagtccctgagttgagttgttactagagacccaactcaatattctccctgatcattgggtagtttgggtgatgtattaacagagctagtacttatcattatattatttcatccacataccgaataatactctagtggcttcataaataaataaaaaatatttaccagtctgttgacatgttttgtattttccaagtgcaatccttattggacagaaaattaaataaagtacatttactgccacctatagacctgtgcttatttgggtgctctggtgtcaggtgcatatatatttactattgttgtattctcttgcagtattgacccctttattaatgaccttttttgtctttttgtacagtttttgacttaa

SEQ ID NO: 127717 - DNA, 1187 bp, Homo sapiens
ctttgtctagtcctctacctgtggaagttaggcatgagttctgctctgaggagccagtgtgtctgtgttggtagctggcagtcactggtgacttctgagctggatggtaacgtaattagaatgacttcataggatgctttcgttgctgcatgtataaggatcctggctaaaggctgatgggggtctgaaagcaaaaggaagttgggacagatcacagttgtaccagttgaaatgcagaataagcaaaagatccaaatacggttgtaaaggagccttagccaggaatatcgctcataaatcaaggtctgcggcagctggccctggccctgtcatggtatagccaaagtgtcttcatcacggaacatcggggagcaccacacagaccagagtagaataatgtggaatacagagctggtcagcacttaattggtttacacctgcttgtctgtttcccctgtgtttctctgcaggttcgaatcgtcctcccatgccatcagtatgagcgcctatctgcgagaacagagaagggagctctatagtcggagtggagaactgcaaggtgagtgattgagcttctctggaaaaattaattttctggaggagtatttcctttattacacatgagtttgtgtcctgcattcacacgatcctttcaaggtaacaaacacttagtgacttaataatttgtttcttctgtaatttcccagcatctgctgccaagcaggtaaaactattactgtggccataggacttgtagacctgctactgttcaagtgggaattcaaagcaaaaagagatgaggccaggctcgtcttgcttaaacagaagacctgagtccagtcacaatctaggagaatgttggtcttctgcgactgccactgttacttctaattgttgtttttgacaccttctagaatatgacaggagtacctgagatttgggaaagggaaaatgcaaccactgtcattatttaaagggaaaaagatgcctctaaatagtatgttataatcaatataactgtgatgaacaggctatttgatacccatgtatagttaccaaagagttgtaagctgaagaagaaaatatttagaaaataaattaaatataaataaatatattagactgataacatttccttctgtgacaaaaagatgctgatcatgtaaatgtaatgagttaagaaaggt

SEQ ID NO: 127718 - DNA, 6983 bp, Homo sapiens
tcagcactttgggagactgaggcaggcagatcacttgagtccaggagttcaagaccagcctgggcgacatggcgaagccctgtctctataaaaaaatacaaaaattagttggacatggtggcacgtgcgtattcccagctactcaggaggctgaggtgagattgcttgagcctgagaggcagaggttgcagtgagctgagatcatgccactgcacttcagcctgtgtgacaaagtgagaccatgtctcaaaaaaagaaaaaaaaaaaaacaacaaaaccacattggtgagggcctgctaagtgtaagacatcttaggtgttggaagtagtggaagttgggtacaaagaaatataaagcttaaagatctagttatgaaagtaaagtatacatatgtgtgtgtgcatatatacatacacacacagagatacacacacacacacacgtcaataacaatatcaggaagtaaatactaacaactgagtgggtggtatggataaattgctagagaaattacaagaaaggagtgattacataaattgttttagaactctgggcttttctccatgagggatgggaacgaatacttttactgtcttgatgcgttgggctcacgtagcattttgcagtgactggcctgtgtaattaaatatttagtctttaagactcataattctgtaccaaaacactatgaagtaaccactcaacctttcttgatttaaagactattgccttgtcattcctaacttcacctttgttattaatagaataacctgtaagtttttccaaagatgctgctgtactctctcatatttatatcacagtaatagttctacagcccataaatgtggtcaccagaagtaaaagcctagaagtatgtttagggtattaggaagaggagattagcctaccaacattttatttaatatgaaagggttgtcatgcattctggaagacatgcaatgtgcatgtcgagagtcttgatgtagaggagtacagactgtcattagacctggaacaagtgaaaggacagaaaggagtgaaggaggagggtgactcatgctctagcaggctttctctgcctcccaggagaagaggctaggctgccaagagtgaaaggaaatgatgataacagaacatacattattgcaggaggtaggattgtgctcgaactgcccttagcaggctatctaaggctagtgtatcttccacactcacggtatcctaattttaatttctcttcagatttgccttaaggaatagtttaaatttgcctccatattttctctacacctgtcttctaatacacataaatttatttgatggtgacaaagcatctcctttcttctttttaggttgagtcctaattattttctttcttaaaaattaataaacactatctgttagagcagttataaggtcccagctaaattgagtggaaagaacagagttcctgtgtgcccttgtccccacacatgcccaccttcctccagtgtcgacatccgtcagcacagtgcagccttccatttgacccttctagtgaacaggcagagcatgtccctatggttacatagggaccgaggacctctcatcgctcactcacactcaagcataaatagtcaacaagggcacaggactagtggcagattctttatgcttgtatgagtgagaatggagagcactctgcagcagccgtgggaaggcttttcagtcctgccccagtggtccacgctctcttgagagacagtatagggtggcagtgcagagtaggtggctctgggcccaagtcacctccatttagatacctagctccccagcacttgctttgtaacctccagcaagttccatggtctctgtgcctctttttccttttctctaaatgggaataaaagtaacactccctactccatgaggtggttatgaaaattaggtgagttaagctaggaagtgtttcaaaaagtgtctgacatatagtgaatgctatgcctttcttcttctcctctatttctagtactgtggtgtgacttcagagtattcacacacattctgtttgtcctttctgtcatctttatatggctaagccctcctgagctttccaagttaaatttaggtatcgctcatttggatgggcttccctgttggtccctcctctctcagcctgtcacaaatacacacacattctggggttgtggcccctgctgtgtgttactgccacatctttaatgatgttcttctgagtactttccatactgcattgtggaacaatgctctcttgtttgagtttgccacgaaactataagctgcaagagcaaaatactattttatttcctgtgcttctcacagcacctggtacaataaatgtttgataaatactggttgacttagtgacagaatgaatgaggacagttaggatctaaaataggatagagagcaccatggagaggcaggaagggcctgaaaggaaccactttcagctttatagttttccattagtctttaagttgaaggcaaagtagagggtatacatatatggttttgtcctctgcagttataagctttattaaatagaaatattgcccttgagctctctggcccaggacaaaactactgtatgtaattgaaaaacattttaaaatctaagtgacagaggaattttactctgtgaggatggttaatggagaaatcactacaatctaactaggaattttcccatccttcaaaaagttaattgaaatatgggctttcaagcacaagtcgattgaacttaccagttttcagcaaggaatatttctggttacaacagaagaaaagtaatagttagcaaccacattatgttcctaataatcattaaaaatactttaggtgagctgacatattacacacttggtgagagaataaatcagtggaccagtttttgtaaaagtctgatggtgtttcattcaggaggaaaagtttctctgatgaatgcttttaacatttcaacaggaaaaaagagaagaaaatcatacctgtcttccattaaaaacggctgtcctttttcagttattccattaatgactggtccaaggaccacaatgagatctgcatttcagcttgtccctgaaaaggcataattgaatagttcagtcaaaccgtaagagactaagggaagatttttgtttcttctgttaacaccatatagcggcaggctttgcttcccagtaatttcggttcatacgtcaacttttccttccgttgcagggtagcggcgaagaaatccaccagaaagacaatcaaagtaacattaaaaagctcaaattttacaaaagttaagttcctgccaacattttcaatttatcatacaattagaaatgtgactcagtctaacaacacccaagaggataaaaggattaaaaaaatgagatttctttggtgttatcaatgcatctcaataggctctaactgttatggtacagatggttcattatatagtctgctgttggcagttgggctgcggagatgtgggtgctgcttcaaaatgtgtgagataccaggtggagatctaacttgtgggtgtgtcagtgttaatcataggcttcctgtggttttagtctctgccgcttcattgtacttagcagtgctgggagtgaagaaagatacaagttttaatgaacattttatttgaatatagcttctcaggtttaatgtataattcttcaggggaatagataattgatgaacacattatctggtgagggttaaaaaaaaacaaaaacaaaaaacaatctaaagactaccactcatgaccaaaataagctcacaggtttatcaatgacattctgcctcagatttctcataggaaaaaattagaactgttttcagtcctgactactttaggggaatgttgtgactattaacttaaatattaaattattagtattagaaatttctaaattagaaacattagattagcaatgttgatttaaatgataaagtgatgttttaaaaaatcattttgggccagacacagtggcttatgcctgtaatcccagcactttgggaggcctgaggtgcacagatcacttgaggtcaggagtttgagaccagcctggccaatatggtgaaaccccctctctactaaaaatacaaaaattagcctggcgtggtggcggacacctgtaatcccagctacttgggaggctgaggcaggagaatcgcttgaacctggaaggtggaggttgcagtgagccgagatcgcgccactgtactccaacctgggagacacagcgagactccgtctcaaaaaataaataaataaataaataaataaataaataaataattaaataaatgagtcagtaataaataaataaaaatttaaaaagtatcatcatggagttaagggtgctgcatctacttcgttacttcccattttctcttcaactccagtccactgagttagctctcctccaagtcaccagtgacctctgcttggtagacttaatattagctttttctgacattcatttcacttgatctttccgctgtttttcttttcttatcctcatgttctttctgagtcttgtcaaaagcctgttggagtatctcatgatttggtcctgggatttcttctgtgctgactttgtagactctccccagatgatctcagccaagaccaagcttcactcagtgcccgagcacagctgacctccatgtctgtgtctcctgcccttttctcattgttgtctaaccttttctagcatcccgtctccctacaatataattctttatcacaatatttaaaaaaattttctcattgtacttttcttaatatgtacatgtcttttttaactttgttaacttccttcacttcccttgacccagagtgcaagccttattcacgggtacatttcagtacctaggataatgcttggcttgaattaggcgctttaagacatatatgatgaacacatatgattctatctttaatatctccttatttgtaggtacaagcctacttatttgagaaaccctagtggttgtttaaataaacagactgggagtcctgtgatttgtcttttctcatttttaaggataataaaactcatgaatgagtaagagtatattaattgccattgattcaaatagaaatgtatactcaatttccattatgttttcttttctatctcggggctacttaatacttttgtttttattcaatgatattacctttagagtgccatttttatttccattagtttaatgagtggcctttctatagccctgacattaaaatgttctgtaaatctccaaccacttgagacctcacttctttaagatgatttgcattacatagtaaatatggacatactggcataggtaaaaaagctcttatactggcctaacctgaattttctgagtttttctctctaatgggttgtcggtgactgggattgtgaatacttgtatgtaattaatctcttcgggggtgtcttgccttaagaaaagacagtatttgagatagattcactctgagttgattatccatttctactaaaaggatttataataggagtctcttatatagcaagctgttctataatggagcatttaaggcaatatttcacttttgcacacattttcagggtcactttgattgaagtgaggtgcattattttgtatagcaatattatgcttatgacatatatttgttctgcagccttaaatataagaagcactttcaaaactttataccctgaagtttgattagaaaattctttgttgccttctagaatttgcttaatgacttcattaataactatgcaacaatatgcagggaacatgaaaaaaagtacatttttcttctgaaaattgcatataattattacaaaataacttttaatctttcatagtcatcttttctgttttagcctctaaaatagtgtttaaaaattgattccccttttcttcatggatttatattcttgcttttttttaaaagaatgaccttaacttacttatatgtaagatttgtcttataataaagttataatagaatttttacaaatgctcatttctttgtctatccctaagacattgtaactaataaatatactttcctcaagtcatgaacagattgcattatttcaaatcatttaggaaataaaaatattcttatgccaagattgttatcaagtgtactactttttagccttaattgatgtagacatttatttaaaaatattctttagttatggatttactttatataagttggatttgttttctgaataaatctgatccatgcagtattttgtctagccagtagacaaaccatgcatagctgaaccatatggaagagcctggaatttatggtaaaatggatcttgagaatacaaaataaccatcacaaagccgattactcagtgaagcctaagaacctcgctcttgagatatgatacttggtcatcacacagaaccagttgatgacatctaaccttatttctaaaaatattctattcattcatacagatgtgagaaaagaaggaatgctggtaaatgaaacgtaatgtatttgagttttaaaagttgaacaaatgcatttctctacatttatattatatggttttttaaaaaagccaaatttatggctgcgcatggtggctcactcctgtaatcccctctctttgggaggccaaggtgggtggatcacctgaggtcagtagttcgtgaccagcctgaccaatatggtgaaactctgtctctactaaaaatacaaaaatcagctgggtgtggtggtatgtacctgtagtcctagctagtcaggaggctgagacaggagaattgcttgaacctaggaggtggaggttgcagtgagtcaagatcgtaccactgtgctccagcctgggcgacagagtgagactccatctcaaaaaacaaacaaacaaacaaaaaaaacgaaatttgtgtaaaaagtttttgttttcagaacaaaaacttctgaaat

SEQ ID NO: 127719 - DNA, 5277 bp, Homo sapiens
atgtgatatctggaaaataaaacagtagattttagtgctagaaagtgctttagaactcatagtctagtgctttttaaattcatttttagttatagaactcttcttctatttaatcttatttcacagttcaaggtagacaacaggtaaaagtggagatagtttaacaaagtgggggtgaggattcaacctcacttcatctttttctttttccttcctctgtgtgggcacccagggtactatttaaaacactaaagactcagaggcagacatatggaaatattatatgagggagaaatgactttacaaagtttaggaagaggacagaccagtcaataaagaatggtgagacaattgatcatgcatataggaaaaaaacaaagaaattggatttgtacctcatatcatttagggaaataaatttccaataggttgataactcaaatgtgaaaggcaaacctattcagaatgttcatagcaacattgttttagtagcaaaaaccgagaaacagctcaaatgcccatagaaagaaggatggatatgtaagttgttgtagagtcacaaagtagaatactatgtagcaatgaaaatgaatgaactatgctatacattgagttggttgaatctcaaaggtagtcatataagaaaatattagataatatattagaaattagattatatatagaaatgtaaacatttataatgtaatatatataaaatctctatataaagtctaatataaatctaatatcttacacatgtaaacttaatatgtaatatatatgaatctaatatataatatctaatatatttaatatatataaaatctaatgtcatttgtatgaaggtcagaagcaggcagaactgaatagcctatttcataggaatatatcctgtgtgataaaaaaatgaagaaggtaagggcataaatataaaagtcaaggaaaacatcacctctggagaggatggaggagggttgtaaccaaagagaggatctcgtggggattcaaagatcctagtaatgttctctttcttaagctgttacagaaatactgttgttttattcttttaaaaactgtacaaatgtcatatgcactcatacatttcataaaatgtacagatataaacaattttttaagaagcctcttaaagctttagagacaaaaccatgtatgtagtttaatgttcctgtttagaaatcgagaacaaatgtggagttttctggacagcagcacttttgttgcaactcctggtatgtgccaaagctgtgaactacccctgaacgagtactgtaccttaagtcgtccatgagaaggcatctttgtggttagaagagtttcctcccaacttacctgctccctccatcatcctccatctgggatgtcagacacctaacattaattggagtcagcagcgattatacttttgtttcctgtgttaagggactttctgtttatttgttaatcctgtataggtttattgtatgtttacttgtgctggatacttcactaggccctcaggataaaataatgaacaggactgcctttgaaggccaaaagaaaagaaagggaccataaatgtgtcacttatatggtcacctgcctcccagcatttgttctccctttcctccaaattcatagagtccctgatatttcgctagtcacagggccacccaaaataggaacatttctaacttgccttgcagccaacatggacgtgtaatttaattctggctaataggatgtgattgaaagtaatgtgtgtaactttgggtcattctcttattgggaagaaagaggctgtctttctctcccagcccagcctgtgtgtgaaggtgtggatatgaatggaatgtggtaagtcctcctagaccatgcaggtgaggcagcactgaaggaaagctacaacaacaagacagagggggcctgggtttctgatactgtgtagtgccatacctcagtaacttcctggaccagagtcaccgcatcatcccggacttctgcatgagagatgagtaaactctgacttgttaattcactagtgttttgattcatgttacatgcagccctacttatatcccagttaattcagcaggaacacaagtgatcacagctctgtgatacacactatcacggagttgtgtgtatgtatatagacaactgggatgcatatacaagttctgggaaaggcagggaggcatctataagtatttaaagcttaaactcggttataacagatgaagagaagttttccaggtaaagaaattgaggcaagcatttcaggcatcaggcacagtatgggtaaatgtatgaaagtatgagagtataggctcttctctcatcagagtttcacaacatgaatcggatatttttctactaattaaggaactcagtttatatatacagatttttactgattataatttgttactttcaggagtcagatgaaagtacatcaaagctattatgaatggctttggccattgttcatcctagtaagagattaagaattgataagaaccaatggtgtactggtgatatgggaaaataaaggtcattattatacctgagcaaagaataaatgtaatcacatacaggattttccgagtattgttcaagtgttgtagctatgcagctttattattaaaaattctataggaaaaaataactttgttttaaatgcacttattatagcatattatattagactctgcatggtagctgaggctggaaatattggtagggcccacggcacaacctatttctaaagtaccttgcgttaaaaatagaatgttcagcttgaactgcaagtgatcatgatggcagcctggttctatatggagattgcagagctctgtgtgctcacatctgatttccagcttgtaattttggtgtggatgaaaatatgcattaagttacttttggcttctccacaattttaaactggaaaagcccatattacagtaatatatgatagtatgtatgaatgcgacatgaatattgtaatagtcataatataggatgttcattcctagaattgtgatgacatctactgaattgcagccagtaatttgcatattcatgcccacttagctcaaataagtccctgtttgtttgcacattaatgtctgatttcagcaccagctaactcatttacatatcctgttcagttggttagtgatgttcatatgtggaatattggtgcagctctgtttgggctttgagtagcttggggtttagtagaaggatcacctgttactcatcctagcttttctaggcaaggcactttacttttctgagctctaggttattcatctgtgtaatgaagttaatgctggttagttcttagggctgtcatatcagttgacacactggaggttatggtgtacagtcaacatttctaggccaactatattctggggcctgttcctggaacattttctgcgtgcagaggggttctagatgctgtagaagataagacatgcaaacagtcacagtttcagtgaatattagaagtactttggggagtacagaagagaaaacacttaacattttcaagggaagtcataggaggtattacaaaggtggaattcttacgccgaactggtaagatgagttgaccacactgaacaaaggaagggaactcgcggcaagtagggagaagatgtggatgaacacacagatgtttgagaatctcatggaactggaaatattttattgtggttaagcataaagtgtatggggaagattgaacatagacatggaagactggtaggcagatctcaaaagacctggtatgccatagcaagaaggttcggtttttgtcctgcgggtgataaggagtcctccaaaggtttaaagtaggagagtcgcataatgaaatgtgcattttagaaaatgttttctgatgactgtgtggagaatgaattgagtggaatgagagtgtagacaaagaggcaagttttgttatttcaggtgagagctcatagaagaattcttaggtgaggtgggaagtgacccagaacctattttggaggtacaatcagttggacatggtgactcattctgtgtggtgtttcagcaagaagagatgtattttggtgtcttgggtaggtaatgatgtcatttgttaagacaggaaatataaaaagaggagtagtttttatggagtgttagataggggtaaagatagcatttcattatgtatgcttttatggttctcttttggttgtgtttagttctgtctaatctaatctagcccaatataattttactacatagtctaatcttttatctttccctcaagtgtaaggctttcagcagtttgtgattactcataaccattcctcttctcaagttcagagtaatggagttacggttttcttccatcccttttcctctttttattttttaattgcaaatactactttcttttttttctaggctttcgttgatgtattagttttagtgcccactttagtctcttaagaatatgaattctttaatttttattccttgatgtaccctgtatttttattattaaaatcaaactattagcgatgtctcttgataacttgctctgactttgtgcaagtcacttaaccagttttctcagttgtaaaaggaagaaggtaagtgatttttttttttggaatctcatttatctccaaagctctaggttcttggattatcagtcactggcccactatatgttcctcacagcagagtctggggactagttagaggttcggagtggtgggtctctggaattgggcttactacctaggtgactttgggcacagtaactccttctatgtgtcacattcattttcttaaactgtgaatataatatacctaacctcatagggccatagtgatgacgaaatgagttaacacatgtaaaatgtttaaaactgtgccttgggcctggcacggtgactcatgcctgtaatcccagcactttgggaggccgaggtgggtggatcacctgaggtcagcagtttgagaccaacctggccaacatggtgaagtcctgtctctactaaaaatactgaactctactaaaaaattagctggacatggtggcacacgcctctagtcccagctactcaggaggctgaggcaggagaattacgtgaacccaggaggcagaggttgcagtgagccaagattgcaccattgcactccggcctgggcgacaaagcgatactctgtctcaaagcaaaacaaaacaaaaaactgtgcctggcacatattaagtacagataaatgttaacaact

SEQ ID NO: 127720 - DNA, 3417 bp, Homo sapiens
tggccatttttcttcaaaaccatttggtctgcagtggcacgaactctaaattttactacacaaataatttaggacggttggaatatggctagtaaagaggttaaaagggaaaggacagcccttctatttatgaattaatggcagctgaaaatttggcattgttttatgtacattattgttttgccttcctcttgcctccagtttgacatcactttcttgctgcttgtgaaaacaaaaataaaaatgcagttgtaatcctttaacggattgggtaatacgttggtgagggagagcttctttcttcaagtctatctacagattggaaagctgacctcttcagaagtacccttatagacacactcagaaataatgctttactagctctgtgagcgtccctagcacagtcaagttgacatataaaggtaaccatcacagaaacaaagtttgaaaaaaaaaggttacagctgatctgaaagggaaatttttgacttggcttagaaagcaagcaataaattgtttatggatatcattccccacagcatgtctgctgaaagaggactgataaaagcaaggcaattgatgggatgaatcattcgctcatttatgattatctaccatttctagattataggaatgttattgaggaccattaactccatatccacttaaatatgtcatgaatcattttttaaaatttctcaagacaagaactttttccataagaattctttaacatgtaaattgagtggttgactatcatttctaaattatggtattcaccctaacacaatagatgtagttgccctaaaatagatacagaatttggtctaacttattctaaccaattgaaatcctttgtcatccccaaattataatcagtatgatcttctttttactgtcacttccaggacattttttaggcaagtataatgcccaagaggaataattagctctttttaagtaacgtctacttttctatctgttttagatggtttctgtttagttattagccatatttgttgcattttacactttgaaatttgtagttcctataatacttttagaagtaataataatatacattatattaaaaaaattgggcgtggcatggtggctcacgcctgtaatcccagcacagtgggaggccgagctgggcagatcacgtgagatcaggagttcgagaccaacctggccaacatggtgaatataaaattagttgagtatagtggcacatatctgtaatcccagctactagggaggctgaggcaggagaatcgcttgaggctgggaaacggagattgcagtgagctgagatcacgccattgcactccagcctgggtgacaagagcgaaactgtctccaataaaaaaaaaaaaattgtgcgtaacactggagttttagatgcctgtacactgaatcttttctgttctttctccccttttttaaccttagtttatttattaatattattattacactttaattagatttcacttattattgaggtgaatgtacctgcagtgaagtgtgtaatgtgcactcatcttaaatgtacagctaaattcttgcacatatgtattcccatataactaccacccagaagatttcctatgcttcttaacactccctgagggtcaacactattctgatttctaactctatctcttagttttacctattctttaaataaatagaatcatactctgttttgtgtttctggcttctgtaactcaacaaaatgtctggcacattcattcttgtggatttgcatatcagtttttattattgcatagtattttattctatgactataggacaattcattcattcaccttttaatggactttcatcgtttccactttggggctactatagataattctcctatgaacagttgtattacaaatgcactaatttctcgtgggaatatacctaggaatggaattgttggttcataacataggcatgtgtttggctttaggagatacaaggattttaccattatagaaattgataagaaattgtatgacaatatcagttgctttacattctcactaatgtatttttatgggctcaaatttttaccattctcttgagtgtgtagtataccttctttttttttaaagaaaaagagtctaagctttccttacttctgctactcttcccctgcccccatactggcaggaatttctggatatgattatttgctatacagactatctgccaatttactgatttacagtacagcattttttgttgttgttgttggttttttttgagatgcggtcttgctctgtcccccaggctggagtgcagtgcaccggtgtgatcataactcactgcagccttgatctcctggacatcaggtgatcttcctgccttagcctcccaagtagctaggaacacaggtgtgcaccaccgcatgcaccatcacacctggccaattttagcttttttattgagacaaggtctcacttttttgctgaggctggtctcaagctcctggcctcaaacagtcctcctgcctcagcttcccaaagcactggggttataggcttgagccactgcacccagccaatatagtttttcatagttcagtgatcttgtattccttctagaagaagtcctgatcatgttcatacagtttctacccagaattctttagcggcttttcttactagaaatcacctaccatatttcttcgcaccttcgaggtggaagataaaggtatctcctctctttcaactttttgtaattttttggccagtggttttctattttgaatgatctttttattgcatgtttcttactgatattcccactggtagtaggcagaattctagaatgaccccaatgaccagacccatgcccatgtatttataatttttcccctttgggtggtatccatgattctgacagactgtcactctcggggttagttttttatatggcaacactgaatggattttgcaagtgtgattaaaatccctaataatttaaatttgagtcaatcaaaagggagattaccctggttgggcctcacatgacatttgaacccttaaaagagacaaaaagcagcagaaggtgctcttctgttagcctcaaagtagtaattcttgtgaatagattaggccatgttgtaaggacctggggtcatctctgtctaacagccaacagaaaaataggacctccatcctacaaccaaaaggaacagaattctcccaacaatcagaatgagctaggagcaggtccctatgccttagataagattgtgaccttgcctgacaccttgatttcagcatagtaaaaccctaaacataggactcagctaatccatgtctggacttctgacccacagaaattgtgagatcatcaatttttgtttttctgagctgttaaatttgtgaaattgtccct

SEQ ID NO: 127721 - DNA, 6145 bp, Homo sapiens
agtctcgggtatttcttgatagcggtgtgagaacagactaatatgccttattatttcatttctattatagctaaggaaaaaaaaaacatggctcatggaggttaagttacttgattatagtcacaaaaccaataaaggacaaagatgttacataatagttttattatatagggtttgcaaaataacttgcatttgaaatggcttgtgtattttccactttattgagataatttctatataatccacatttatttaaaatgaacagtttgatgagttttggaggatatatacacctgtgaaaataatgtcactattaagatacagaacattttcattacctagaagtttctttgtatccttttcagtctgtttctccctcaatttcaagcccttggtcactggtaaaatgctttatgtcataatagatgagcttacaacttctataatttgatataactggaatcatacaatagacaattttgtgatcagcttctttcactccacataatgatgttgacattcatccgcagtgttgcattcttcagtagttgttcctttcactgctgagtaggactctgttgtatggagatactgcttattgcttatccctgcagttgttgatatacatttgggttgtttccagtttttacttattgtgaataatgctgccctgaacatttgtgtgcaggtctctgtgtgggacagtattccctgaggaacacatacgagtgggattcttaggttatatggttagtgtatgtttaacttttaaagaaattcccagttttgtaaaataaatgtattattttatattcccagcaacaatgtgtgtcagcacttggtattgtcagttcttttaattttagacattactctgggtgtgtagtggtatctcattatggtggtttatatttaatataacatcttattgatgtaggaggccacacaaatgtggattcaggccttggaagttagaatcaacctcaaatcctttttctcttgtgagaattcatctagacctcttattatatgtcatgtcttttagaataacttgtgtctacctccatgaagtttttaaatacagagaaaatacatgtaactattttacaagtcaactggaaagccatacatgtatgtatatgttcgtgtgtgtatggcatatatgtatatataattattcattaaaaataatgcttactaaaactactcatactcattattgtatatatctatatttccagcatcttctgaaagtttgtaagttctgaataaatcctgctttgaagctaaaaattctaaattgttgctttattagtaatcacagggctaatgcaaagctctgataattaagactttatgtttttctttgagtgccaccatggcagcaaatggtatctgaaactgacagactgtagattaaaactttcagaatgtaaggcctagtctagggaaaatgaagttatgtataggtgacttgttccatttgaattaatcaaagggctgctggtgtagaccagctgtgttctctgatgacaaaaacgaatcttgacattttagataatgaaattcagttcagcacctcttagagatatgtgtgataatatatgtcagtcagaaacagagagaaggggagaagctcaaaccttgtcttattaaaatagacattgtgacaagtggacattgctgaatctctggtttctaggggaaaaaatgtcaagggaaacctctttaaaaaaatgatgggaatggctgttttatggaagctgggtgaaaagatttgacttctgatgcatgacctctttgacagttgcctttgttcatgattcctagtttcctggtttattttattggggtacagggtgaggtctggaagacctggaaaggaaactcacttttttggtttgacagtattaatgcaatcatctagttcataccttgtaagcccacttattatttcctctgcgtgtgttttttctggtttagcggattagctgcactgtctcttcaaaggctatccaatcaaggaggggttattaaaaccagggcgatttatgactgagaattaattagagaagcattttcatgcacaacatccaattttttgattagcaatggagcagggccgcaattaacactcgaggaagcttaaatttccagctttttgattctcaggaaatgagattatcaaaccagggtcagacacttgacagcaaagtgggagtgggggagtgtgaaattatatgtaaaaaaaaagaaaaaagagtcgtttgattttgattctgagattgctattaagacaatgggaaattcagaggagggaaagaacaaaaaatctgaaatggaagaacctgaaaggactgattctttggtggcctatttgctatgcacaatatctgttgtaaatgtttgctggaagtatgttttagaagcacagcaatattgttgtgttccttcattgttacttattattcagtttttctctcataaatttttcttggatattcagtggctgaacaaatatttaaaatgtttatatatgttggagagaggccaaaatttttcttgttagaaaagagagcttcttttctaaatgctaatttgcttttttgtgtgtggggggagtctgcttcttttcattggtgtttttaattttttcaagtcactcaagacacagtttaggtagtgagttatgtcaagccatagatgaccacttattgctaagtggccttgtcaagcttaggtgcctgagataagaagtaaggcaaccgcaggtttgctgtaaaacaaagtgtattctgtcatcagtgtaattggtgctccccaaggaatgcaacataatgaaaattcatttgttctggaaaatatttttcatcttgtctcctcttaatttggacatctaattttcatggagaaatagcagagcagcaaatcttttaattcattctgccaagttaaaactcatatgcatctcttctttattcagtagattctaagatttttaagagaccttgtcagtatttttgaatcatccaaccctctcttcattgccctgttttcatatttgcatgtatgatgaattgcctatctataaatagtgtaagactagtacaatctaaatattaaaatagtaatatgtactatttatagattgcttgcctattggtcttagggaaattgttggcatccagttctaagaggaaacacaagtgatcaatgtgtctttggcccagggtgggagagggactgagaattggttgatagtcttgtgtgactctggtttctctcatattctcctagcattggtttctctatttaaataagggtggggctttttgttacaatctggggagttattttaaaaaacatcttcataagcagattccagaatacaccaaaaatgaatggaagagaccatacgtcatttatataatcagagattgttgctatggcatttttctctctaaagcccctctggtttaggaacatgatccattgatctagcctatcattcttgcaatcctactatggattctcagctttatttgtcagtcttgcttaatcctccttcctttgttgatgaagagtatctatcactggctggatgaaaattggctgcagtttaatcttggggaaaaaggaagaaaactgccagtcagaggctgaagagttgatcttgtcagatttatagtcatcagttatcagtgctgatcttcatgttcttagatgttgatgattacatgcttttcggcatccaataaacatttgcggaaataatttatagttatatttatggatatttcctttgttgggaaatgttcctgcatttccaggtccatagcaaagggagcctaagcgtatgaattagggattcttaacctatgtgtgttatgtgttgggtggtttgggggagggtacgtgggtagccttcagggaatctgtgacacccagcagtgtcttcagattagaggggtggggagcaggaagaagttaccaagttttcattaggtttacaaaatgctattgttacatgtgtgtgtgtatacatagacacacgtatgtatatgtgtgtatatatatatatgtatacatacacacacgtatacacacacacacactcacaaatacgtgtacaaatacagttcccgacttggagagccttattatcaacagaggaaaacaatgtaacaactttagtaaaagcatatgaaatgatatccttttgtaataaatgtgaatgaaatacatctaacctatatttaaatgcttagtaacatttaatattaattatattaacatcacaggtaggcagaaaagttgaatttataaaaattgagaaaattaatcaagagaggcatagtaattaagtgtgaatcattttaaagaaagcaaggattatttagtggagtagaaaaacagaaaagcaaagctattctaggttggtttgtttgttttttctcctttaatgtgaagatttttaaaagtacagtttgatatagctcaattgatcgtttaattaaggaacttgatttgctttaagaggctcgcaattgataataatcatattatcatgttgaattcccagtggtgaggtgagggtgtcagctgttctactggcgcatttttgctttgcttgatttgctgtatgctcagtttatatcgtggtagatgacagatgtgcaagaaggctatttaaaaatcattgctggtgatgggtggaaaagaatgcctttagtttttagtatgatataattaatctttaatagtgatcgactaatgtatgtttatatgattatatctgaatagatatttattaaatatatattattgatatttctgccggggtaactgtgttattattgagtctctgggactcttttccacttcccatctgaatacttgctttaataagaatatcctactctagcagaagtagtgtaggtacaaagaaccccgttttcttaggttagtggtcaatctatgaaattagatttttgtgagcatgaaagtagagtgtagcccagtgaaatgaaatatggaaacctcagggttcaaagcaatgggttggcagagtcaggtcggagattgaaatgttgtgagtcatctatgagatagatggaaacactggagttgttgagcttttaaaacagtaatagatggaaagaaaaactctagactctgcataaggaaaaggctactagtttgttgaagaagagtagcttgtgagactcgaggagtgtcttgaataagttaggggaagggcaggcaaatggacacttaaggtttatagtgtgaatatcttctatctgctttttgaaaaacacatttaaatgagttcttaatgattcccaggaaccacagtccgattttggcttttgtttcctgtgccctcctgtcagttttgataactgtacctttgtctctgagcccatttttttcaaaattatggtttcattttaattgtttaatagtctgctcttgtctgtaatttccagagtttgaattgtatgatttttgcagcctctatgaaaatggtcagtgaaaaagaatttttggttaactatgacatcctgtatttaatggaaatattttgttttaatgacatgaaaccatagccatgaaaatttttctaatgtaacatcaagaacttctctttgtatattatatgaaccttctgtgaggtccagctaattgcaagacgtcctaagttagatatctcgtgcccattctgattcttctaagaatttactactattttagatcacattaaggttttcagatttttctctaattgcttgataatgtaacacaagcttaatagtgtaataacaaaagcttgatgttctgtagttagattcttttaaataatgtaaaaaaaagttataaatgatttgtagcttggatgactttttacatttctctctgggagtttcagttgctatgattttgttgttgtgttcagcttaattgccattagctactgctgaagtctcctccttactcaccgtgcaggcagtgtccatcagcagcatttagtacaggatgaatgaacgattcctttttgttatgttcaatggaatatgtaaatactttcaaatggccttcttcaactagagttttttaaaaatgagagatacgctggaaaaat

SEQ ID NO: 127722 - DNA, 1023 bp, Homo sapiens
gtaatcccagcactttgggaggccgaggcaggtggaccacctaaggtcaggagttcaaaaccagctgtgccagcatggtgaaaccttgtgtctactaaaaatacaaaattaactgggcatggtagtgcatgcctgtaatccagctactcaggaggccaaggcaggagaatcacttgaacctggaaggcagaggttgcagtgaaccaagatcgcgccattgcactctcagcctgggcaacaagagcaaaactccgtctcaaaaaaaagaaaagaaaagaaaagaaaaatcagtaacaaatacacagattttttttttatccatgactacaaaggtacctaactgaataatacatcatgatatttcttatatcattgtccttgagaacttaagtcttttcaatgaaagaaatgaaatatgaagtatttcccgagacagtgttctctaactttggggtgcatcaaatgcctggaggtcttgtgaacacagcttgcaggaccccattacttgaatttctgactcagtaggtctgagatggggtctgaaaatttgcatttctaacaagtccttttatgatgctgatggagggaccacactttgagaaccactactctaaaccttgtgataaaaatgatgaaaggtgatgctaatcaggatagccttgttgcctgtgaccaactacttctgtttcctctttaacactgtagcacttaggaattatcttatttcccctggagaagatcaaacctaatagaattatgcatgcgctgtaagagatcatcaaccttacaccttttcccttggacctagagcaatttgaaaagagacatttccatcaaaggacataaaacctgtagctacagtcacaagttaacaattatcagggtgtttgtacctgtctcctccatttgggttttatgcatgaattataaaactagagatgggaaagtaggaagaggatgaaggagtagcttccaaactgttactccaatagagatttcatactaattttgaattgaaaatga

SEQ ID NO: 127723 - DNA, 1031 bp, Homo sapiens
tctggatcatatggtcattcggggtttattcttttgggaaactgccaaactagctgctcattttttttttttttacagaatttataccacttatttacagtcgaaaacatttagttaagatatttttactttaggccattgtcttcaaggtgagttgtttattcttccctctttgatgtgtgaacttgtccatttgtgatgtagattagtcatcacatcacaaatagtaaatgtaaatataccatttatacacatccacctaaatctattctttctaaaatgcatatatctatttatctttctgatgaaccaagggacataagtatgccataaccataatgagattgatactaatttggacaatgagagtaaatgagtccttcacagagcaaaaggaattctatacatttatttaaaagacaaatatttgatttgtaaaaataatattaagacagttggaagacatgtttgaaactgcatgggagggagtgtgattaatagaaagtgtagggttgggaaggaggattagttatggcagttccacaatgagtctggaagtttaataaaggaagtgtgcagggaataacagaaaaatcaaggaaaaggtagtacctgctactatcaattgtctgttgagatgggaaaatgaagcctacaaatctattaatcatttgaagatattaacaaagataatatataatttttgttctctgagttccttcccccgctccatgtgtattagctcattttcatgccgctgataaaggcatacctgtgactgggcaatttacaaaacaaagaggtttaatggagtcatagttccacatggctggggaggcctcacaatcatggctgaaggtgaaaggcacatctcacatggccacagatgagagaagagagcttgtgcagggaaactaccctttataaaaccatcagatcttgcgagacttattcactatcataagaatagcatggggaagacccgcctccatgattcaattaccccccactggattcctcccacaatacgt

SEQ ID NO: 127724 - DNA, 1398 bp, Homo sapiens
tgctgacaaatgcatttgttaatcgatgaagcagatttgagaaggggatagaaaaatgttcagttaagttactgtgcaaatgcagcatacattaactttcttggtggaaaatattttaaaagatgaaatatatattccaataaaatatttggtggctattgaagtcacattacaaaatgcagctaccacacattgttagtttatatgaatcaattacaggggagatctttctggtgccatttttaatttttcctccttccagttgctgaagccctaccttcattcctcttgtcttaattttcccgctcccttctctttacctccttttttctctattctcccttcctttcttttcctttctctatcgccttctccacaacagctcagtaaaagagtgaagtttttgagtttcatttatgcctttccctgttttgctataaaaatcaaccaaggatgcttttagatagcaccagtatgatgagggaaataagctttcattgcaggatgattactgttggtgatgatgtataaaataaagggagggatgttatgtggaatgttgacccttcagggcttgtaaatgcacattacgtggtctggatggtaaactaagtgaatttaatattagctactggaaatgacagtgtttataaattttcaaaatgacgtttgtatctgtcaggctttagcttttattgtatcgaatacacttactttattttaatatttttctagagctgctttatgctatgggaaacactagttggaaattgaaaaccctagacattagatgatttttatttaacattatcttttgtattagttgtaattataattttctgtttgtaagtcactctcccaaagcacaggagaaaaaaacaaatttttcttccatgattttctcactgagaataattcgtcttatctacttaaaaatacgttcttttaaacaataaaagtggctctatctaaggctgttactttataaaattggaaagtatttatttgttaacacttatttatttctgtagtctttgaaatttgtattctcccccaatgtattttagcaaaatgggagaaatgaaggataacctagaattacattcccagagcaaaatatactgtatttattatttgtgattcatttcagttccgtgttttttttttgttcgtttgtttgcttgttttttgagacggggtctcactctgtcagcaggctggagtgcagtggtgcagtcttggctcactgcaacctctgcctcctgggctcaagcaattctcctgcctcagcctcccgagtagctgggactacaggcacgtgccaccacgcccggctaattttttgtatttttagtagagacgtgatttcaccatgttagccaggatggtctcgatctg

SEQ ID NO: 127725 - DNA, 1018 bp, Homo sapiens
gtaagtgtaacatatagctttcttgaattgtctaccatactgtaagagctatggttcttggagtgcttcatagtgtcccttctggggtacgttaggatggaggacgcaggattttggatggaggaaaatgtgactcctgatattgtgtttgctgaattattaatatcactgagctgcctttttcttagaatagccactgctggtaggctaatatttctaaggtcaaactgattgctagaaattattcctgttgagatcagctaggccatttcaacctttacttaggttttattgtaattttcaagtgagaataataagctagtgttgcttcctaacttttctgtgtgtgtatttcagaacagaacaattgcatatgtttcttggcagattctttttcatgatgtggtttatgctggagttggtgagactgcttcagagcatttcctcttccccatcttatgcctttctgaaatagagtttttaatactttttaagtcatggaccccttttgacctgtcaggataatgctgtttactgtgttaatgaatgcaaagagtacaaaaggaaacccactatattgaaatacaggtacaataaataagaagatctagtgtcaagtctaataatactataatttcaaagtagttatgagtataggtgtaattttgagatacctgcaacacctgtaatatagtatgaaagtatttgttatttctgttggtgacagaattgcaggtatgttaatactgttgtagttgtctgtaatcatagttgaaggaaatgctaaatttcagtagaggttagtgaaataaaagatacgtgttttccccctctaaggtcatgccctttttgaattctttccatggattccagattaagaagtatttttctaatgggattcctggttttctgattactatttctcctgagccaatattccagagagagagactgcgatttgcctttctttcctaaagggctgagttccccaaacattagtgacaaggcctatagtgct

SEQ ID NO: 127726 - DNA, 1379 bp, Homo sapiens
caggtggtatctatgtgacatgatagaacacctcattgtattaaaaacaagaggaagcagtttcacagttgaaagaagctgtataataaacctaaatggaactctgagccttgatctcaggaacattcaaagtcctctagattcgagagaaatttccttatagtcttaggaaatatgggggtcaatgagatgttaatatttttaattgtgaaagttctgattttacaaataaacttaagtgcgacatcagtgattgtgatttttgaatttggaattagtgattccttgataggagctatagagatctacagctatatatattttttctggtggctgatcattgtattctcttcagattgttgtcactgtcagttggttttcgggaagaggctttcaaattatctcctatggccttttatatgttgattcattcaaatactgagtgaccatataatattttaagtcaaccaggacatgtgaaagtgctcagagtgagagaatatatgagtactccgtgtatcaccagcttaattttctataaacctaaaactgctctaaaattttaagtcaattaaaaaaaaagtactcagagccaacacatttgtctgaacaaaaggagaagaggtgagaaaatgtacgtaagtttggagaagaaagatcctgaatgtgcaagggtttttttcttcttcttaaatctctgttcatttatacatcccaacatcaacagatgtatgatttagcatttgccctgcacctctggctctagggaccctggagttttgtatatggataccctgctgcagtgaactctgtcattgttctcaacagctgggaatggaatatagctcattaagacaggagatgttatccaagcctcccctggcatcctgaagagtagtgaatatgttttgcttcctgagatctaaagtatccctttcgttaccacctagtgttctcttccttttattgaaaaactctattggccccattgccactttgaatgatgtgtacagtttatgccagctgttccttttcttaatcctttctccttcttctttgcctttttattatgtttatggtgtgtgctgtgccttgtatttaaaaaataaaaccctagtgtaattagtacatatcacttggttatgtaattaaaagaatattaaggacagattttcacaataaacccctatcattcagacatccctgctcccttttgtataaaaagcaactttgctggagagagggttgcaagtttaagtttctcatacttatcaggcgagggaacttatatttgagtttttattttatatcagatgcttagtcctattactccatttgattgtagcaataaatctgtgagacataaagatataagaatt

SEQ ID NO: 127727 - DNA, 2596 bp, Homo sapiens
ttatctttataagacatggtatctttattttattgactataaatgtactagtgaaatgtttcctaagttaactcttgaaacacagattctaacactggtattgtacagaacccaaccatccatgttggagagtgtctgtgctgctttaattagttctgatgtaataaaccgtttcatgtttagcattttagatttataatatggtctagttggcttctgactacagatcattgagtgaatttatatccaattttaaaattttgacaagtaggtgaaaactggaggaacgacaaaggaacattttagtaaaaccaagaaagacttgtctttagtcatggactgtggcactaccacttatttgagacccaggcgagacttgcaagcagatttaccacagtcagggtccaaagttaggaagaaaaaaagacatgagaaaagttcttcttatgtgaaaagtatagtagtccttaggtacataaatcctccttggatttgtgattgagaattcagttgtactgcttctttgcagtaaaccttacttttaataatgtgatagcttttttattttcaaaaaatcttccttttgaattgtttttagaaattagttttggggactagaggcctggtagacctacaagcacagattgaatatcccgtatccaaaatgctttggaccagaagcgtttgggattttggactttttcaagttctggaatatttgcacatacatattgaggtatcttgggagtggaacccaagtctaaacacgaaattcatttgttttttatatacatagcctgaagaaattttatacaatattttaaataattttatacatgaaacgggtttatgttaagtacttgtgtagaattctctacttgtagtgtcgtaacgatgctcaaaaagttttggattttggagcactttagattttgaatttttagataaggaatgctcagtctgtacccaatacttactatttctaatgttggggaagccagtaattccaaaaatattctaaactttttctttcttcattaccttgaacttaactcttatattgtcattcatcaatatatgacccatcatttagtaatattttagaaacgtaaaaggagggatgggctcaaaaagacaagatttatgataaatttcttcagtgaaactcctcttaggaaatgagtattagttccactctcccactgtaaacaggagcagagtaaccacactgatcaagagttggtgcttcgttttgtaggtaatttattttcctgggtgccaagtggtttttatatatggagctatggtcataacttaatggcaaaaaatgaagcataatgctaaaagaaaacatagttctaggagaaagcttgcttttaatacctgtttcttctagaagtgaataggactttggtgtgggcagtttaaaagttggccacatcaggttttaagcttggaagccatgtttgattttgaatcttagcccaagaaaaataaataaattatttattccaatataaagatgtttggaggtgtcagtaattgacttatttagcagcaataaagcaattcagataattttagaaaatttacttttgaggaggaattctaataaaggataatttaaacaattacgtgtgagaaataactatttactgaacaggaaatagggttgctataggtggtttgagtttaaaactagagatttgctttgaatgtagttttttctttgagatttcagggtgaaaattgcatggctggagcatgacccagaaacagccctgccattgattgccactgggaatacagtaattgaagatttgcctgtgttgattgactttcagtatctgattacagaagctctgagcaatgtatcttggtcttttatctcctttgttgcctcctttcagaaatgcttctaaaatgtgtctggtttatctatagatttttggattcttagaaggccacttaaccatttctgtttagtatttaccagttcaatcaatatgaatagtaacaaagaaaacctgaattaaaatgtactaggattctgagactgttatgtctggtatataatatacttctctaatttattctttgtagaacctcatctctataaacgcttgtgttgaaatgctttttggtcttaagtgatggaatgacagcctgtgccaggacattgtagcttgtggatgcctactcttttcaagtgactcatcggtacaggttaatattttgagtaaatctttcggaattaaattcagtactgtcaacaatgagaatctggctagtttatgtagagcttaacagaggcagaatatattaatggactttagtgtttttaaaaaagggacattggtattgtacgctattctatacctagctctaggggtagcatgtgcagtatggattatttatggtccactccttgccacaggtcttctgtgttacctttaaaaagctagggtagtgctcggctgactgtgccatctctgtatggattttctgtttatttgttttataattttgttttatagaaactatagtatgatgtcagaaacattggtggctggattaggtacagtatgttggaaaa

SEQ ID NO: 127728 - DNA, 1011 bp, Homo sapiens
cctatctgaatgaccacagctgtgtgaatcctaacttcagtcaagataagcagtaatactggaaacactgtagaaagcaaggatggcatcacagtgtctaccagcattctgtgggaggattagaggatttgcatgcagaccaagagcagcctgagtaatcaggactctggtactgttttatggaaagcaatttaatgcatatttttaaagcaatatcaactcttttatatgattaaaaatgatttctaccttatacgttttaattttcttttatagatttcagccctggaatcatacatatctatcctccacacatgtcattttcttcctctcaaggctagtggtacacgtttaaatatttccagcatacattttgttgctgttagaaactatgaataagcatcatcattttcttccaagatttctgtcactgtcaacatcatctctttcttttctgatggctcacattaatgcaggcagtgctaacacatttgtttcttttgtcttttatgacagtctgagttttaaaactttgcttctattctgagtttagtagtttttgttcagaaatgaaactttgaggcagcagcatcaggtaatgggaagagtgtaggcttttgagacaaagacctgaatttggattcttgctgctccacttactagctttattgagttactcaaatactcctagtcacactgtcctgttcataaaataggggttggttgtgctattgtgaggatttgatagggcaacctaagagaaatgcctgccatggtcccttactcagaataaatgttcaacaaattacaattctcctttatttgcagtactgtttctcatgctttttaattagatattttactccctctgtttgcccctccctcctcctctttttcttcttctctctctgtttacagccccgaagtcctagtaattcttgagatcacgtacatccactttgaagtttactttgaccatgctctgatcatacaaatagtatgtttccagcc

SEQ ID NO: 127729 - DNA, 2757 bp, Homo sapiens
aaccaaactgtattgaagatggggttgtaaagagttttacatgttgatcacaataatacatatttttggttcattttgttttcttttataaataaatgtttcctttctttagtaggaacaactacaagagctttccctgttttttttggtatactttcttgtgactgacaggtatctgaggccataagagtatttttattttaaagatgaggcaattgagttcagaggttggataacttgcccaagaccctataacaggcaagcagcagatcccagaatcaaacccaggccgtttgaattcaaattcacttcctttttcactatggtacaagaattggaaaataagagcattcttttgcatattagagactgaattatcaaaattctttattgctgttctttcattatcggtcatccttcatgggagagccctcatctctatacagtatgattcagctgggatagaattgtttccctttatttgctgttaaatggtttcctttccatccgtagcttgacaaacatctcctttctggttcttaaaatattttactcttagaccttttcccctttcttctctgattgaatgcataatattctttaacagttgtatatatgctctcaaggaattttaaatctcttcagggacacataatacatgtatgaaaaaggatttgtaggaaaggagtggcagctcatgcctgtaatctcagtactatgggaggctgaggctggagcatcacttgaggctgggaatttgagaccagcctgggcaacaaagtaagacctttgtttctacaaaaaataaaaataaaaaaataaaaaactcaatcaggtgaggtagcatgtgtctgtacccctagatagccgggaggctgagggaggagaattatttgaccccaggagttagaggctgcagtgagctgtgatcctgccactgcactgcagcttgggctacagagcaagaccctgtgtcttgaaagaaaaagaaagaaagaaagaaagagagagagagagagagagagagagggagggagggagggagggaaggaaggaaggagggaaggaaggaaggattacacttagctctgtgaaatagcttgggttttttttttcttagtcttctttattggtacatttttaatataaactgctgctgatctgtcattctctattctggaaatgtttacttcattgtctgtctttatcttttacccaggtgtcttgtacctgtggtatgcttaagcctctgctctacctcattacttctagaaagaacaattttatacctagacacacacatacatgtcttatattacagagagtgagacagagggcagtgacagagtgtcctgccctccctgggaatggacagagcagcattctttctgtcctacttaagcaatgtgatgcttcgatttggtatgagacttttttttttcttgtattgtcttctttttattgttttattattttattgtctgacaaaaatggccgtctctcctgtatctctttttacccttaaccttttctgctgggttgtatttttttcctattgcataactgcaatgtctgaaccttaaattcaactcaaattattaactctgaaatgaacttcctttggcaagactgattgttaacagagttctagatctcagttgcattctcttccatgttgatttaagtaaagacaggctgtcttagtacctgttaatcaagaataggaaagtctgtggggtgggggggtatatatattctctctaaaagctaactataaaatcaatgtagtagcttgcatgatttaataacttggaggttttttttcctttttttgtgtgacttagcagtttttaagtataggaaaggaaattataatatggttttataaaaatgaaacctgtttgaagatcccatcattgatggggcctgaattttttagttggtctttgcgaaggagatcattgctctgtgaagtttatgaatccctagacctgagaatttctaccattatcttactaaggaaatgtctatatgctctcccagaagattctaaggaggcatgccctaggggcacatgtgctgtagaggtaatgagttcactggaggaaatctcacaatcccttcttgcttgatgattttttgataattctgtaattcaggtgtgaaaaaaaaatcaccaccagcaacctctaaaacctgggaggagcagttcgctatttgctggtagtagttttgaggactttagaaggaaggcactagataaacataaggcattttttgttattactattgccattacttgttatcatttatgtagcacctgcttcactaatgcaattgcttataggagctgcaattttactcctgatggctactttctgtcattatgtaatctgtggtaaaccacataccatctaaatgttgccactggatttcttttttcttcaaactccagccctggaatactgttgctgtcctatttgtcaacgaaccactaatagaaatttcttaggaacatactgtactagatgcctaggaaaagaaaatatattaaaaaccagtgtaactccaactgattaccccatcatagttcttattacttcagaaaactattaaaagaacactaataagttttccatgcatgggttcatttttataaccaattgctaaattgctaagttgcctttttattcactttcaaatttacaaacaatttccaagtctgtgctttcatttactaatgcaaagctctttgca

SEQ ID NO: 127730 - DNA, 2658 bp, Homo sapiens
ccctttctggaattgggcaggggaaggttttatgacctatagtgaaacaagattggtcagataagttacttttggccagtttttacacagaaatgtggagagaaagttagggtaatatttttaggttttatgactggccttggggtaaaggttctggcttctgtgaccagccttgggcaagagggattctagtttctgtgggtagccttgggggagaataggactgaggaggggagaagatcagagaaaaagcagcttctgaggccacttctgaacccttcattttgggggtattgtcttctgagccctaatacatgtcacttggagagggcccacttaaaggtgttcagaaaatgatttgaaatggtttgaaactgatctaatgaatggcatttaattctatgtttgattgtcagtaccattttagtttttcttctatgtattcagaaaaattttattttttttttgaattgttggatgcagaataaaaacttacaggttataaatgttaataatattaagtgtgtttagactagaaatatgctaattgactgcctgaagacgaccatagctatcaaaagaatgttttgcttattttcagttatcccacaaacataacagcttgaatatattgagaaacttgagctttttagatttgtccttgaactcttgattggctttgcaagttgttttctggatggtgtggtaaaggatttaataccctttggtattgattttaaaaggtaatgagaattttttttttgatataatcctcacaaaatatactttgtgtataagttgagtgtcctgacataatctcaatagcctaaggttttcccctaaggcaaatttttaggtttctgttcaatatttatttaagctaattcaagcatcgatgatataatttaattaattctgtttattccacccaagctcttatcagttgatattccctagtgttgagtctcagaggagtatttttatattttcatctctatattttatatttatactgtgggcattttttcccctcattttacctggtctcttaattccatttctcctgagttgctgcccccttgaacagcctcatccatccttcatacaacaagctttcatatatttaataactattattaggttatccttatgctgtcatttcttcagccacaataatcccagttcctttaagctttatttttatcctgcttttatctagcctttaatattttagtggcttcttctagatcttctttagaaaagagtggtgtgagattataaaacgaacctgctgctagaagtgtgcttgtcacttctcctctatagccgtcaaattctttgagatcctcaaactgaagcatccatgggaacatttattatttgttcaaatatggccataaaaatcgactttgcaatcatattgagtcatcttgacagtgctgtgagtgacagaaactaatcttatctgctggctagcattttaaaaatgataaatggaccctcagtctttagtttgcctgtaaatgaaattaggtttatcttatttctcccagaaatagcattacttagaaaattttgaattatttctttctgaacaaagttaaatggcccaggctaggggctaaattttgattattattacatacatatattttttgccttttatcagcaaataatggtgcattgggaaaattcaagtattaagaaatcagcatatattttctaaacagaacaaagattcctcaccatctatacttgcagcctgagaaatatatgttcaaagtaaattttactgaatatttgttctttgaatttttttttcagatctaaaataaagttccaaatcttgataatcacagcacgtttaggactaatgtcttcattgttttatctgtcttccttttagttgcctaatcatttaaagatcaaattaaattgaaatctaatataattcctgctggtaaagtgacttttatagtaacttccaccatttatttgttttcttagtaggaaactgatttaccttacttctacatgtgtttttggtatctttattctgaaattgtcttttctttgtcaatcaggatctaggacttcagaacccatttgtatcaactcctataagaaactaaattaggtcacctaacagtgtcaaatgcctttttcttctgcgttttcactgacattttagaactccaatactgtcatactgtcatttttttctttcctctattcttaatctctaggaccatgttagtaagtttgttagatattttgtcaaatgtgatttttaaccaaatcgagggaattaaagcaataacctttttatgttctgtttctaaagcaagaggacattgctgtgcagggttgattttttgaaaaaccttgttgtcttccacttgtaggtttccttccctttttttttttttttcccctggtcactgtttttcagggctctttgtatcttgtacatgaaataatatgaaaagaagatttgaatgaatgggaggataactcttcactttttgtctcgattattatgtttttaaatttcatttcactttgggcctttaaaagcatatgtgtgtgtacgtatgtatgtgtgtatgtatttatgtgtttagtatttggaaatttgtgagggatgaaaaggttact

SEQ ID NO: 127731 - DNA, 2179 bp, Homo sapiens
aaatcctacctctgggaatcatactagctcctccatttttagatgttgaacaagttataaatttcactgaccctccatttcttcttttctaaagatgtgcatgtaatacctattttaatgatttgttcaggggattaaataagtgtaaaatgcctagaaccgcagaaaacttagtatttttgagatatcaagaaaactggataccttatagctgatcaataaatactaggttctttcccttttcccattaaatgccatatcttgatttaaattatctttttcttatttcttcctacactcatagtcataaaatcagttagattttacattcaaattttaaaaaattttcctttctgtatttattacagattctccagttcacattctctttatcattcacttgaaccattttcaatattaaagagtcttagaagcaatctagtttgactactgtcccaatagttgaattctgtctgcatcctttcttcaagttactttgcagtctatatctattgcttaaatgtgctggtgctagtttgaccctatataaccacaaagaatgtcagatctcagtttcatgtggcacccttccaatacatgaggatggttggcatgttctcactgagcctccctttttccaaatgaaaatccctgattaccaatttatattttggggtttccagtgccttgacattcgggttactatttcctgctgcttcagttggtttaacttgctcttggattggaatggattctagtctagatatgatttaaccaatccagaggagagtgagatgattacttctcttctagatacttctgttaatgtagcctgatatcactctagataatgttttatagccagtcactctgttgattcatagtaacttttaagaattctttcttatgggtactgtttttaaactatatctattttattttttaagatcagatttattgatatatagtttacatacagcaaaatttcaccctttttataatagctggaaaactttttttttttttttttttccgagatggagtcttgctctgtcacccaggctggagtgcagtggcacgatcttggtcactgcagcctctgcctcctgggttcaagtgattctcctgcctcagccccccgagtagctgggattacaggcatgtgccaccatacccagctaatttttgtattttttgtttgagatgaggtttaccatgttggccaggctggtctcaaacttctcacctcaagcgatctgcctgcctcagcctcccagtgtgctgggattgcaggagtgagccactttacccggccttagctggaaaacttgaagagttttgacaaatgtatacagtcatataactatcaccacaattgagatataaattgtttccttccttttcaaaagttccctagtatccctttgcagccggtccatttccccacccccagcctctggcaacctgattcctgtccatataattttgtattttgtagataccattctattcttatatggttggcttctctgctctggtataaaactttatttatttaaaatttctacatcttagtttggatacatagctctagactgtcatgatatttttaatcccaattctgtttttattttcttccctatctcataacatgcataaatttgatatgcattttagctgatcctccatgttattggggataaaaggccaaagataagagccaacgaggaaaaacccacaaaaattccttatttgacactagacaacattatcgaaggtgacatttattcattaatcattctcttttgatattgtgctttaatccactaaactttattattgttcagttcatacttatataggcatatgttggaggtattccaggttcagttccagaccaccagaataaagtgaaaatcactatatagcaagccacatgaattttttagtttctcagtgcatataaaagttatgtttacactatagtgtagtttgtaaagtgtgtgatagcattacgtctgaaaaacaaaatatatatcttaatttattgatcagctttattgataaaaaatactgatgatcatctgagccttcagcaaattgtcatctttttgctggtggcgggtcttgccttgatgtttgtggctgctaactgatcgggatggtggttgttgaatgt

SEQ ID NO: 127732 - DNA, 1228 bp, Homo sapiens
ctgagatgcagttgcaagaatactgtccagagttccctaacttcacaaatgagggcatgttcctagcttccacattagaacctgtaatagcctttttgatttaacattgctggactaccacccccatttattcagcaaaacactaatttaagtgctgctgcaaaggtattttatagatatgattaaaatccataatcagttgacttcatgtatgggagattatactagatactctaggtgggcccaattcagtcagcaaaaagttcttacacgaagagttgtggctttccctgaaaaagaaatttcatttgtggacagcatcttcagctgatttccgagacttaggccccaccttcctgacagcctgtcctaatgatttcgtacttgcctacatagctcccacactattctaagccagtaccctgccgtgtatttcttaatctggatctccattggttctcctcctctagttgaaccctgactgatatattacccaatcagaatgatggctcctgataattttataagaaatagtgtgatgctaagcatgattcctagttaatcattctattcctatgcaacatatcaaaaaagacccttgttgcatgctgaattcttggactaaacgtactttttagttgcacagctgccacaaaccttactattgtatacttgctgattttgtcatttgattttttttttaatttctaggtttttctaaggatagattcatcatgttatttttcttgtctagagtacagagaaataatattttgattattttagttgtttcaaaattgctctcttttttggaaggagaaacgtaactgccgtgcattttactgtagtcagtagttaaatgtataacatgttagctcaaagattaaaatgtgaatattctagagcacgagtacagagagttgatacaaagggggatgtcagttgctctgaagttaaattccaggattctgtcacatgctgatatagtgccaaagcatatggatctccatatggtgctgcttttggggtttataccacctgtaatctagctgattttcattcacttaaatttgtccaagaggtaagcaaactaaataaggaaatgaaaataatatgcctgtgttaaaatgccgaagtttgggatgagttactgttattacagtgattaccaagaaaaaaaaagattgattagaggagtgcattagtaatatagcagtagtgtttctat

SEQ ID NO: 127733 - DNA, 1723 bp, Homo sapiens
ttaataaaggaaggaggaggacttacctttgtaaggtctgatccatttgcttttggtataattgaaggatcattgactgggttaacatgcactgagctccagtactatccttgccatttactagtgggtatgtgacactgggcaacttacaatatctcaggcactgattgattctttattgataaggtaggggtagtattatatatcccagtttataggatgattatgagaatcaaataagataatggatatgaagtgttttataaagtgtgatatacatataaagggtattactaatcacagtgtgtctgtaatttacgtcttattttattctgactgccccaactaattcaggccttttgccatctcacacttggattgttcctatcttctgctaaatcaattccgtctcttgcttttataggatgtgttgagtagccctgaaataatgttctaaatatgttactttccttttcaaggctttttgctgtaccacctgtctactcttgtagccattatcttctctttatactccttcctccgatttcattccctgaactccttgctattcctgagctctttatgcttgccacctacgtgcctgtgcatgtgctgttatttctacctaaaatcctttctcccttctaacctcataatgtttctactcaacaaaatctgatttgtctctcaagactcatctcagatatgactttgtcccttaattttttttcctcttttgccaggcctgatgtttcttttatggaaatggaatagataatggtaggaatggggatggcagccggggagagaaagtattaccgaatttgattttctgttgttcccaacaaagtgagaggtgatcctaggttttattttgctgttggagaatttaaaattgtggtaagtttttatcgctcacgtaacatgtcaccagtttctcccgcctccacccatgtctattctttggtgcttacatttgtactttaccgatcaggggattttatgtagatctattcttattttatgtaatatagataataaatttttaatacatcatataatataaattccataggaaatagctgtttaggggaatgaagaggtgagctatctagaaagcaaagaaccagtttttacattgaaaaacctcacagtttatctgttatgtagactcctttatattagcttttcttaagtcgtgctttatctcaggtggatctttaggaaaatagtaactttacagcccaggcctattcctgagactattaaaatctttgtagactgtactactatagattgatgaaatgttttattttatttctcagtaatttaatactattccctagaaatcattcttaatattatttgagtatcaaaaataatgtaaatgtcaacagaacagccatctatgtttaaattctaagttcctaagctctttacactaaaaatagaattgttgttatacattttctcaatttaaaaataaattgaggtctgaaagagttgtttattgctctgctcgccaaccttaatctagtgctggggcagtatctgtacctatctgcctgatctgtgtttcaaaatgctactaaattgatgccttttctttgacaaaatcaccatgaatcagaatggcaatcacagggcccccttgagttttaggttttgtggccattgtcatttcctcctcattatttgaaacctgtcctttcctaggcctgct

SEQ ID NO: 127734 - DNA, 1030 bp, Homo sapiens
tatatgtaaggtagttctgcttttgtgagaagattggccagatacattaggttgtttctgatagaaataggatgtgtgcatcacttagaaaattataaccacttgacgtgatttttcataaacttcattttacctgttagttgttgcctttagttaagttgttgcagtgcagcttggtacctacaccctttaacttgtcaccagctatgttcttcgtggattgtttgttgtaactttaatgaaatctagtcttgctgaatcactaaacctgttctctcctagaaggctctttattgggacctgacagatcacctctccagagccttcagacgtcctagctctctaattcttctccataatgagttttgtgctgcatgataaaatattcatgttcaaataggttctaaactaattatctgtggccagcagtcgccactgcagtcatttgctgttagcttggctcaagttaatggcttgtatttcagtacaaatagtcccttctggctgtttcctgtcctgattcttatcctaaatggaatttccatacatatctagagttaagtcttcttcttttgaaaggagattttttgccctaccttttttcatctcattttattaagattagcttattttagtgttcagttccttattgtttcttatccatcttcaaatcctacatccctgccaaattcatgactcccacactgtccaaaaagaaatagtaaagcaccaactttaatcaaatataccatgtcagattttggaagaaaccaaaatggggtaccgcggtaaggatgggatctagtttcagtgtgtatgataaacatttctgcttagttgctagagacctacacagggaatgttacgataggaattaaccactttgggaagaattatggggctggacatgagggagataaggcactaatggaatatttttctgtgggtgttgttgaaaatgatggatgacttgctgaaggagtgggagagttcaatatcagaggactaagggcttgatcttcggggaatc

SEQ ID NO: 127735 - DNA, 3399 bp, Homo sapiens
tctttatagcttcttggtttttaaattttctttggttaagctttctctacactaatactgaaaacacacatttttctagacttcattgtttaatttttctgtattacatctaggcctttaatctatatagaatttatttctttgtaagatattgatttaatttttcctgatgtaaaaaagggtctcagtatcttttgttggtcagttctgtccattcccagtgatttgaaatgcactgtgtttcccaattccaaatgcgtaattagaatttcttgatttcagttgtaaaggactcagcttaatgagcataaacaaagttgggtaatttttaaggagagtaggcttttcctcaggaccacagagcaggtggctgtgccttgggaacaactatttacaggaactcaaataccatcaggtttcattctctttcttttttcctttgtcttcatttctcatttctttttcatatatcggcttcattgttctttctcactgtacactttttctgagtggttcctgagtgtttcatctactcagaaatcacttttttggttaccagttgaaaaatctcagatttgtgtcagttgaccttcactgtgttctggaaatgaagtcattaaaaacatagccagccctgaccataaccatgtggatgaaaggctaattcttctttagaaaaattagatagcttaggtacatatatctcattctggactctctagaagttatatctgtttatccatgcctatttcagttcagtgctgtgtcaattacgtcaattactgtagttttatgtttggcttagaaaactgtaggacaagtactttctcattttttttaactttcaaaatattactggctggtatttattcttcacaatgaaatgtagaatcagcatgtcacgttccagtatacatcccatgttttttgatgggaatatattgaatttatagctttctaagtggaaatttgccttcttattttgagattttattttattttatttatttatttttttagacagagtctccgtctgtggcccaggctagagtgcagtggcgcaaccttggctcactgcaacctccacctcctggattcaattgattctcatgcttcagccacttgagtagctgggattacaggtgtgtgccaccatgcccagctaatttttatatttttagtagagatggggtttcatcatgttggctaggctggttggaattcctggcctcaagagattctcccgccttggcctcccaaagtgatgggattataggcgtgagccactgtgctgggccaagattttttttccggaatcatggtgtgcctttccatttaaaaaaatctttcttttatggtaaagtgggctggtgtggctgtatttctgtcaaatgaattcccattactaatctctgcttaattaaataaaacttcattgaataataataatttagaaagcaaagatgagtaaaagaagaaaaagttttcttataatcttgtcatttaaggataactgtatatacatttaggcatatcatggtgctatatcttccacagagattaaatgtttaggatacaatgaattggcatttgtatcaggaatgcattcccatttaagtgaaaagaaacctgctaagagtatgattttattattcataatcaaagaggtttaaagatactagatcagtgactcagtaaagtcaaagatgattctgtacagttcttttggccttgctctggtagtcacaagatgactgctactaggacagtcattatgtacctggttgaggcaagagggtgacagatgtttgacgtcagtttgttcccttgttgtcagtaaaacgaaagctgttttagggtacctctgtttctgcctggtcacatgaactcttctccatgcaggtaaggttgacaagcaagcacatggctttttaatctctgttgtgggaagtgggattggattggcctttaggtagccagtcaacaccatctgcctttgcaaataaggccagaattactcttgatcttaaattttacaagccaagtttttagacagtggataagttcttccacgtcttctcaaaccagtgtttttctaagccccttaatttattcatttctttccctcagtgatttccaggaagccattacccctatttgcctggcacttatacagtgcggaaaaggtcctgaaaacccgaaaaatcatttatagtgtgttttccttcatttttaaatgctatttcttgattgcctaagactgaattgccttgggcattcctcactgagctggaatgctgactctacagcaggttcttgaataacattgctttgctataacgttgatgagaaaaagaaattgattcctggagggccccactgtctgtgtgaagttaacacattctccccatgtctatgaattttctccagatactccagtttcctcccacatcccaaagctgtgcatgttctttgaattgtcatgtctaaattatcccagtctgagtgagtgtgggtgcgtgcgcgtgccccaagatggaatggtgtcctgttcagggctagtgcccgctttgcgccctgaactgccgaaataggctcctgccacccgccacccagagctggattaagcaggtaaatatcttacttggtgtcatttatctcaaatgtatgcatagctcacatttatttcagtatttaatattagtgtttttgtcttcatttagaggtttggtgatgtttttgcaaccagaaatatgccataacaactcagctcttgtttatgtcagttagccagtggggaaattggttttgtggtacatcattttgcttaaagttgaagtttctaagaacctatagaggacattaagtgaagaacttgttgcatttctgcttatttatttgcttttactgtgaagaaatagctgaacttctgtgaagggtgcagttgcttttagtccactgtgtgctgctctaggctatccaagcccaggggttggtttctgctcctatgatatgaaggcagtatgagaattctcacagggccctagcctgacctctggattagggttctcatggtgttgctctggttcctggtttctgcaatgctaggttccccggcttgcctgaccttgccgccttttgcttccggttagtgtggttctctcaatcccattcatctgatacttccagacttgtcatttttattaggtctcattgcttcagcagttatgccattctcctgacaaatagagttctttcttacctaggaaaaatattagctttactttaactagagctgttttcacaagtgtgtgaagacctggaaatttgcaattagtttcagataagcacagctgaaatattcttgttttgtactaaggcaacaaattgaaagaaaga

SEQ ID NO: 127736 - DNA, 1032 bp, Homo sapiens
aggctgagtgttatattttaaactgttagatttcatttgttttatttgtactagtgggttgtcacactctggcattagtggtcattttttaatggccatttctaatggcatatgaaattgaaagagactgaagtgttggaaagaaggaaagttaggtttttttttaattattaaagtatcccaaataaaaatggaattttaaagaatgtctcaagaaatgtatgcgttaaagaagtcaatcaaaattgggcaaatgagcttctgctcatgaacatctgtaaagcattgactttaattgccctgcagctgctgttggctgtgcggtttctagttttactcgtttctcctccatcttacatgtcactttatttcctctttccaatgttgcctgggtcacatgcatttgcttgtgtcgaaaaagtaagatgatttagttatttttaagatcccaaagacaaggatgcttatctgttaaagccttttcctccaagcacctgttaagagttgaatttaatctacaccagctgtagcctagttatgtgtagctcgagtaggaggtgtctgatacattgtcttctcttttcattgaaatggattggtaaaactaggcggcataagttagtggggaaaatttagatacatcttagattagatgaagacctttcaaaatagggctttaaaacatacaattcaaatatacgtgcttatacttttacgtgaattacaaattgggtaaagatagaaatttgtttctacagaactgccaggaattatattacacattgagaccactgatttttgacactggccactttgtccatttgaattttgctgctgagttactcttttgggcataattctgcagagtggaagtctttaaagataaaggaagggctgagaatgttttattcttgttgacatatgagtatgattcaaattgagttttatggaaagatcactcacttcatagaaatttttttattttacctactcagtagcaggttgtattagtccgttctcacattgttgtaa

SEQ ID NO: 127737 - DNA, 1061 bp, Homo sapiens
ttttatccttaatgtctaaaacagtacctttcatagaatagatactcaataaatatttgtggaaaaaacaaaaagtgactaccactggtaaatgctttcaataaactgtttttagatgattttatggttatgtgtagacaaagttgttgtatcagaagattatgttcccatggatataacaatagactaaaggttcagaatatctcaaacaatgaacctggacacataaacagaatcatacagaatgtcaagaaaaatggaaatgttttagatgtctgatgtaagaacagtcacttggtttttcttctccttttttaaccttttgatatactatgctggcttaagaaaaccagctttattattcttaaaagtaaatttaaataggcaatacattcccatgcttcagaatttaaaagtataaaagtatacatgttaaacatctccttaaaactcctctccaatagataccctgttacctttcccacaggttaatttatatcattagtttcttatatatcattctagaaattttttggcatatataagcaaatatatatatatattcttttttttcctgttttacacagatggtaacattatgaacactgttctgaacatcatttttttttcattttgtatatcatggagttttatttcttctttctttgttatggcaagagtattacgttgtattgttacaccataatttatataaccagtcctgtgttgatatgcattcatgttgtttctagtcctttgttatcacaagcaatgccacagtataaccatccttgcatgcatgtgctaatatgtctgtaagataaatttctggcagtggcgtttgcaggccaaaccgttatattccagggtttgtgcatttgtagttttgatggatactgccttagttcattttttgctgctataacagaatatcatagactggataatttataaagaacaaaagcatatttggctcatgcttctagagactggaaagtcccagagcatggcactggcatctggtgagggtcattccgtagcagaaaggcaaaaggcagaaa

SEQ ID NO: 127738 - DNA, 1035 bp, Homo sapiens
tgcatagacaggaatgattcatcctttctttgtatgggaaagaacaggactcagaataaggaaatatttataccacactcatttttgaaatcaggaatatcttaaaacagtttagttttatgaaactgaaggatttatttagaagaacagatacagtctgaattagaatgttgatgtaccgtgtgaatagatcaactgatatgattcacgtttgttaagactggcagctttctactgatattttttagcaaagtaaaaataagtaagcaaataaatagggctaagaaaactaatttgagagagtcagttttcaagatgttggagagggtagtaatatgagaacacaaacttcccaactgtgtgattttggaactccctttgagaaaaaaaagaataattaataaagatttttttttaaaaggccagattaataattaagcaagaaaagcctcagataacttgaaaggtgagagaataaattgccaggtgataacaataaagaaatttaatcatgtccacgaatgtataatactttgtacagccaataaaagcaagtaagaattttcagtcctgtagaggactttaatgcaagggacaacaaatacgttagatatgcccaaaggacatgactagtaagagaagcgcttcagttttgaaagtaagataaaatgtgtaagttgacataatctttaggaaagtgaatacagttcccatgttaggtacaagcaggcagttattttcaactagaaagatatgaaagtcttttaaaaaccaagtgtagatatgtaactttattattaaacatgcattcattcagtgttactgagagagtaaagaattaggaagataatattgaggaaagatgtgtggattatatttcaaatgtatatacgtaggtatgtgtgtgtaagacacacacacataatggtggagtgttgggttttgtttccagagaaccaaaagaagtataaaatatttaactatccttcaaattttgacagtcttttgcctttcattcatgaagatgaatattat

SEQ ID NO: 127739 - DNA, 1056 bp, Homo sapiens
tcttcctgtgtgtacaggaaagatttctagcatttgaaaggttacagcagaataaaggaagtacaagcaaaaaaatacataaaaataattccttccagcataacaaaaatcgctttcatgaaatgataaactttagtgtagatacattattgaattgaagagccgttggcattccagggaagcttttggggtccttaaatgtcattccactgaaacagcatgattgtgattgctgattaatagtccaagaatagtgatatctgaatatggtctatagtgatttaaaaaggcttatgaccagcttctcatttgaaacttctagacagttttcaatttaataatcttagtttcccactatgaaaatgaggattgcttggggaaaagagtctgttatttttgaatttttgagttagacgtcttccattcaccagaaagcactatccagattctaagattatgtttcaggatataaccatatggcaaagcacttactatatataggtaatttgaaactataccagttctaaaacaaacaaataaaaggatgtggtcatgtatagcagtggtaatacatgaatagttagatcttgtgtatagttaatatgtttctgtggagttgtctgattaatacaaacaaaaaaatactaatctgtgatatataggatacttaccactttatgtatattgttagagatggaagcaaccgcatttttacagaatggcaaaacttagttctggagaggtgaattgactagctattgacagagataaataggcaccagatcttttgggcaccagtgcagataaaccatgatgctacttagaagaatagaggaagaaccagtttcagcgccagatagtatgcttaggatagcccttcactcacctcattgccttctctgataagtcatcatctctggtcctctacttaggcccatttagttgaggtatcaccagaggcagcttctgtaatggggagtcaggtacctggaaagctgtggtaatacgccccaaagtatacagtcctgtggaacttggtgcatttacagtcacgtc

SEQ ID NO: 127740 - DNA, 1405 bp, Homo sapiens
atgaccattgcttctcagaaatgtaaattttctcactcttgtgaatatcatacttacacctcatgctggctactctcctcttcttctcttcatgatctttctcattataactttgtccgttgcacccagatacatccgaaaagttgtcacctgcagagatgctatttggtgaagatttgaaacctcttaacggttaagagtgtcctttatcttcagcgttgatgacaaacctgttacaaacaaatttttggatgggatattgtaatacaaatgaaactgtttgtgaaacagatgacctgattgtttcatatgcgtttatattatctgtattggtgatgtgctccacaggatcagataattatgataatacacacgtgttgaaaagagatgcattcaattcacagctatggaagttttaaattgatttttttttccccaaaagaagtcagaatgtattcattttttctcgtcatttccttcttagcttagagttaccccttgtggcttcctaatttcattgctaccacattgtccgagtcttcatcacctgaaacctgagttactgtacacttaatgcttgtctctcctgtttctggttcattctatatactgtatacttcagcacacatttatttaccatggtggtgatagtggtgataagattttagttctagactagaaggcataatccatcaaaaagtgcacaagagaggtattggtttgtaatttttagaacactaactttaaaatagtcccccacccagttaaaaaataattgtggacctataacgtatacaatactgctttagatggtgaaaacatttaatatatttattgaattgaaatagtttgttgatttaaaaattctgctatgatggtaggatagggtaatgggacaattctagagaggagcacatctggtatgtggcatgttcattgtccgaagagaaccagttctggtaatgagtagagcatttcttgaaattaacattgtaataagcacagcaaagcaaagagggtttaaatcatagtggtgcctctctcctccctggcttccctgatgcccagtggtatacaattcagaaatatctgatgagtggttataacatttctctgattttcccctttcttttcttcatctccaggttcatcttaaatgaacctctccttggtcccataaggccagtctgtttttgcattcctcagttctgatttcttttggcaggaggactacatgtggttgacagattatatctgaaaagggctttggtaattgctcgttctcttcagtgactgtgttgctgacagatgggcacagtgaatattgaaagtgttctggacctccgcttactccttcagctcatgagtgctgagcactgccagcacttttcttattatctattag

SEQ ID NO: 127741 - DNA, 1121 bp, Homo sapiens
tatattactacacttaaaaaattatttaacccatttatagagggcatctgtcggttgcatttgatttatttaaaacgttttcttacatggccaatttagtaacagcaagcaaaaccaaaatgagcaaaggagaggatcccaataatcccagatctataaagcggatttctcaagggggtagagataaccacctagctattgctaaatgtgatctcactcagttgaaaaagaaacaatcagaagtgagcaatgggagccgtgaaaccatctcaatgaagacttgttgccaacatggagatagaggatattggtctacagggtactattggagaggtaactgtgaggcttttacacccagacagcccttctgtgcatggcaagttttactgaactcctcgagatttagggccaattaattcatctgttttaagatgaattcatcgggtaatgtgttttaagattaaattaacttgtttgttcttgctttccagatctcttattcactgcatgtgtgtatgtgggtaggtgagtgagagtgagaaagataatatgcccggggttggatgtctgttttcatttattattaagtagaagaagatgctcacatacttgtaggtacagaagcttcaacatagcagtctttcacagtgtgagttatgatagacgcaatctaagagtgaattataaaagtgatagggccggaacagacttttattaaattttgggtaatattgtagattagaaaagtaaaatgtgttacctctacttatctttaaacattcactctatttaatgtattcatcagacctcaggaagcttgcaagtatattctgaagttacaaatttgtattttctttgtaagtaatatttagtaatattttcctttataaaaaacttttaaagtctaaaaatgccactgtgtgtcaatgtcctgtatcacctctctctcaattttcgttctctttcttctaataactatttctaaggaaactatttttacaaattattccaatgattactatcaaattagaagatctcttaaatagcatctaatgtgatttatagcagagataactaaggtccccaaaagttaagttacatgtttaagattacacaacaag

SEQ ID NO: 127742 - DNA, 1366 bp, Homo sapiens
tagttttgtttgacatatgcactttttctgactttcaaaaaaaaagttaaaatcagaaaagaaaccaaaatggatccatctggcttatttggaaggacattattgtgtaatgaaataccaacgcagtcacattatataagtcagtgttcattatcacagacaaatcagcatggtaaagatgatagattttcagaatagcatagggattcttttaataaccccctaataaatagatgcaaatagttttccaattgaacatacctttgaattattacccatattattgtcttaatttgttgaaattgttgtatttttgtaatgtgattgcaacattgcttttcaggaagaggagattatgattctgtatccccttttggtcctatttatcccttttaaatcagtttcacctctcatcttagacttatcgggatttttatgaatgtacctgactatccttggtacataaaaagaagactcttttcactttacttaatgctacaaaattttgagtgtagttcccagatggctaattatttatttggtgactaaaaatatagcttcttgttctccagtcacatatgtgattttgggatcttaagataaatttttatatctcatatgagtgatcgtagaatttccagccattatatttcttatcactatggctagcttgaatataataacatgattttaaaatatatataaccctgacatggtgatgtacttttgaaagctccttgtattagcaggttatttgtacagctgtatcaaaaagacttgcctcacttcagaggattatcgattaatttgcataaatgtatttatgcttgagagttaaagtaatgcactattagttttataaaacagttggcatagctgtcaaagttcttaatgttctttgcagtgttacagctagaatttcccagggcattgaaagaaaaagcaaagaaacaaatctttaatagtgttacattctgcttgttctcctgggcttgtattgaagcacaggtgttaaggtggtgttgaaattagtctggaatcatgaaaaaataaaatacaactctttgaggtagctagggcaaaatgactttgcagtgccacgactgctctgcccctatctgagaaaatgcttcttgtgctcggtagctcttgttaacttgaaaaactctagaattacataaataatgaatggatgcaaaaattcattggtttttgtaatgtagatgaaggtaagatgtcctgtcagaactgaaatttgcatagtagaaaaatttagttatcctatcttgttctttaaagcaataaatgactatgaatattcatggtcaattaaaatattaatggtatactgatactttagttttag

SEQ ID NO: 127743 - DNA, 1736 bp, Homo sapiens
ttcagcctcctgagtagctgggactacaggcacgcgccaccacgcccagctaattttttgtatttttagttgagatggggtttcaccatgttggccaggatggccaggatggtcttgatctcttgaccttgtgatctgcccgccttggcctcccaaagtgctgagattacaggtgtgagccactgcgcccggcccacaatattactttctatgaactggactccattgattcatataagtgaaataatacagtgtttgccttttcgtgactggcttatttcacttagcgtaatgttctcaaagtttatccatgtgacactatgtgtcagaattcccttactttttaaggctgcataatattccaaagtatgtatacatcgcattttgtttattcattcttctattgatggacatataccttaaatgtgtgacttacatggcgtgtacattatttgggttgctttcagcttttggcttttgtgaataatgctgctccacgaacatgggtatacaaatatttttttgagaccctgcttttaattcttttggatatctactcagaagtggaattgttggatcatatggtaatttttatttttatttttttgagggatctccctactgttttccatacgactacagcatttgactttttcacagtagtgcccataggttccaatttctctacaacctcgccaacgctcctacatttctgtttaatatattgatttttaagttacaaaagttgcgtattgtagagattcaaacgattcagagaggtgtaaagtaaacttgaaaatccttctttattttccctttgactcttaaaacattgattaacactgattgaatcagatccaagatgaggtttcaaattcctctaaaaatcttcctaagaaagctttttaatacctcccgcacatatgtgtagataactgtcctttcttttgagcttctcttttaaggtactgcatcttagtgtagtgacttccatttagtgaatgctactgaatgtggattcgtgtcagacactgtactatccatatgtttttcaaccttatagcaccagcagtgcctaagtcattgtgcctggcaagtcataggtgttcaatataggtatgatacatgaatacacatgtccagtctgggaggaacttttcaggaagtaactaacataggcctctttccttccgagtgctgtataagcagtctcatgctggtgttgctttgagcatgcattttccgtgttgtataatatattgctttagggtacacactgggcctgtgaagactgggcctatgtttcctgctgcttttgatacaggatcagaaaatgtttggaccccccaactgttctctgatttattaacactggctcagaattatggaagtttgaagttggctggaagctatgagatgattcactgagaaccttatttgacagctgaagagactgacatagtcaaagacttctactgttgttaggaacagcacttgttttaaacctttattttaggtcgcgggtacatgtacaggtttgctagataggtaaattgcttgccacgggtgtacagataatttcatcattcagatgataagcatagtacccacaggtactttttcatcctcaccctctgtattagtttgttttcacagtgctataaagaatgacctgaggccgggcgcggtggctcacgcctgtaatcccagcactttgggaggccgaggcgggcgga

SEQ ID NO: 127744 - DNA, 1038 bp, Homo sapiens
ttgtttatctagatatactcattctgtcagctgtgccctcacctctgttatgggctctttgtattccttatcccattttttttgtttgttttttgaggcagagtctcactccgtcacccaggctggagtgtaatggtgcgatctcggctcactgcaacctctgcctcccgggttcaagtgattctcctgcctcagcctcctgaatagctgggattacaagtgcacgccaccatgcctggctaattttttttgtatttttagtagagacaggatttcatcatattggccaggctggtctcaaactcctgacctcgagtggtccacctgcctcggcctccagaagtgctgggattacagcagtgagccaccatgcctggccctgatcccatttttattgcagtagaagtgtagtgacaaggaattggtaaggtatcaaaatagaacaggaaataatggaagaggcaagaccttcacatctaggaagagactggtggaattctatgaaagttaaatatttaatacttgttttgtccagtttttattagtccagacacttgcaaaatgaaaacgagaagaataaagactacctgcctctaccaggcattattaattgccctttggagattttgaatgaggatgttagtgtctttgagtttcataatgaaaactggaactatggggagaaattgcttgatctcagaactaactgaagctccagtgctcagagtcaaactaaactagacgggccttggacaggtggggagttagcagccaattttattcacatcatttgtcttttataaaaggtgtttgcatgtcagattgagcaaaaatcatggaaaatgcccaagttttaacatcattgtttgaacctatcagcaaaatcagatggcttgaatatgtaattaacagttaaatttgtcctccagatttgttttagcttctagcataccaggcaggaaattggaattagaaagaagaactcaggatgtgaaactctcatttctggttcagtttttttccaaagaagttatccag

SEQ ID NO: 127745 - DNA, 1490 bp, Homo sapiens
agaaaatgttccatggatttttgagaatttgtgtgatttctggctgtttctttatgtttcataatgtgctgcctcattttggagaaaagacaaaaataggctaactttgttttacaactagggaaaatgtgcatagaattgttcatatttgcaaaatgaattaatagaactacttaaaattagattttcctgctttaaactcccgttctttatcctctgtttccataactcagctatgtatttttgtttgtttataatcgtttgtttgttgtgtttggagcttggtaaaagaatgaaatgtttttgtagagaaattcactcttccccccaataatgtggctcccccataagtgcaacaagatgtctctcaaatagggtgagctttagttacatcataggtggtgggttccagcttcatttccctgccaatatcatggtttttcccttttccaagtacaaacttcatcttcagcttggttccaggatgggcactagtgtgcccagcatcatagctctcatagctataaaatccactcaagacgttcagagccagcaaaggctcatctctttctcactctcctttataaagcaagtgagcctttacgggaagaccctacgtctcattagcctgaattgtagaccttgcttgtatctatttatggccaaggacttcgggtcggcctcccatgaagcatccagctatccagaagaatacaatcagggttctttttagaggaagcaatcagggaggatatgaatctaggttgacagccaaatttttagtttgtcgtcttcagtatatgtggaatatcccctcagccagccagattgtccagatcaagtttggtgaatagtgcagagataattcatgtcactggagcagcccccctcctcacctttattggtgtggattagattctgctgcaagtagcaaagacctaaacaacggcctctacaagatggacctttccctttcttacttacaagtcaggtgtagttcagggctgatatgacagccttcttgcatagaatccttggaggctgggcgtggtgtctcacgcctgtaatcccagcactttgggaggccgaggcgggtggatcacctaagattaggagatccagaccagcctgaaccaacatggagaaaccccgtctctactaaaaatacaaaataagccaggcatggtggcacatgcctttaatcccagctgctcggcaggctgaggcaggagaatcgcttgaacccaggaggcggagattgcggtgagctgagatcgcaccattgcactccagcctgggcaagaagagcgaaactctgtttcaaaaaaaaaaaaaaaaaaaaacccaaaaaaaaaaccccgaatccttggaaagttaggcttcttctagatcattcttcggctatacagtggtccaaaatggtggccgttgcagctactgaatggagaaaggaacacagtatttaggttagtgcaaaactaattgcggtt

SEQ ID NO: 127746 - DNA, 1084 bp, Homo sapiens
agttcttgtactggcaatggctttgattaagcagtgtagtagggtcatatcctagaataacagcatttccaaatccctgactgtttttgaaagaattgtgattaaagttctggctcttttcccatgattactaatgtctgctgagggttgagtttcccaggttgttattggcgattgagttgtgtggcagcccgttgtgctttcttgtcagtatcagtggcattctctagggggaagtgatttcacattgaaatgcgagaactaaaagctgtaacaaaattaacacggggtctagggtttctgatgtgactacaaaactagaatgggaatgtttcctaaagcctaattcatctgtgattgaatttcagactaaacaaagctgccatgatgagaaggtagagaaacccttctaaaagagattatggatgaacagattgaggaacatgatatggcagggcaaagtctagacaatcatatatttcagcttcagctgggcctttcttcttgacaggtgtgttctgtgccttggcatgagcagctcacttgggaaagcccgtgctgttaggaatgatctctttgcatgccaatgggaaatggaaaatgaactccattcttatataatatgtaggaaaaaataagtgttgtgtgtgttgggtggcaggcatggctccctaggttttaagatgtattgtggaattatgtttgtctgaaaacaattatttaatgtctactactaccccagttaatgatatgctcttttccacattgaaaaaatatgcaggattttagaaatcaagaatatattaggtgtttttttgttttttagttgctaccaaatttaaattttacataattttactctttcatctgctggtcttttaccttggaaattctagaacttaggtgttgattctctacctctgtaggttatgaagtgcttgaggtagagcactgtattttagactctttgttttctctctaggtgccatactcaaaatagttttgtaatgcctgtctggattgatttagagctgcttctttgtgctctacaaaaaataatttttaaactcaaatgcatcttcat

SEQ ID NO: 127747 - DNA, 1027 bp, Homo sapiens
ttagagaaatgaaaaagcatctgtaaagttgcactgagtatgcctgactctccggcctccccttctactttccccacctcctccacttcttctgtctcttccactcctgagacagcaagaccaacccctcctcttctccctcctcctcctcccccctcatctactcaaaatgaagaaaacgagggtgatttatttttataacgattgacttttagtgaatagtaaaattgtctcttccttatgatttccttatctgtagctttattataacaatacagtataacacacatacaaaatatgtgtttatttttctgtttatgttatcagtaaggctgctggtcaacagtaggctattaacagttaagtttttaggaagtgaaaagttacataaagatttttgactggaatgggagaagcaaccctatcctgctttgttcaaggattagctatatttgaatttaatctgtctgcagtctttttgttttaatttctgcgttctctattggtggagtggtgcttggcgattgagataaaaagtgtttatgctgaagttgtgctccatggaccattagtttttaggcttaagttgctttgtctagtattatcagagccttttcgttggtaacctctacctgtctctgttctctcctcagctaaatcgacaagtacattttaataaaagctttatctgtatttcagacttttgaaaaacaacatttaaaaagcagaatcaccaatctttaaagaaatacaaagaaaaagtgtttttccaggaagagattgtagcagtaattttatgtgatgtgtttagaaactgttgataagtagcttctttgttctgtgattgagtcactgtttttgatcagtcaaacgtagtatgtattgaataccaatattaggagttctgtattatgtgttaccattgccagtctgtttacctatcttattaatattggcctattttgtagaggaacagtgtcctgttttctctaccaaacaatggtaacttatgtttgtccctggattt

SEQ ID NO: 127748 - DNA, 2034 bp, Homo sapiens
aaagtactgctaaagccagttttcaccctaagggtatttaccaaacccaagtgaactagcatggcacaggagaacaggaacaaagcccaggacctgtgcaacctggggagtctgacagaagcatccccatcatctacataaagcatatggatcatctaaaaatatcatctctttcccataataccccacctcctataagagactaaaaggaagttggtcaccttgacacaggctgaggggagaaaaaaatccctaaagaattcttaactagatatcttgtcaaaatatacatcctctgggtagtgtgaggaaagtttaaagtgagaattgagttcaaaatgagttccaggttggtagtgcccttaagtggactagcagaactgttgctaatgtttgggataggacctactttcaaaccgggccttaaagaattgctgtagataaagatctaaggaatatgagagtataaaacatgcaaacatacacacacatgatacacaggataaagttaatcaggattcagtagaggtgaaaggagaagaaccagatcagcaaagacttccaataatgtaattatcagacacatgatacaggcttattttttaatatgattttaattaataaactttcaccttaatgactcctgccttttatacctttttcttgctttattgcagtgtttatttttaatggctgcataatattctagttatatatatatatttatgtgtgtgtacatctgtatttatgtttatttaatctagtttctgttttgcattttgagagcttttttttttaaagttcaatataccattctgtgaggaacatctttgttgccaaatcttaatctcacccatgctattattttttaatgaggttgggagtaaattcctagaactgaaattttgagatcaaatagtattcaaaatgttaattaacactttgtgcatgtgctttataacaatcaagactgagcaaatggaaaatgaaaattttgggtttacatgtaagtgtgctagacaaatgtggagcaaataagattggaaaaattcactactttttgctttggtgggtggtcgacattgaatttactgaattcagtgaaggacggaggtcagtacttcaaacatagaacacttaaccttttttctattggttggtgtcattattttgattgtagatatgtaggagtgctgtatgtccttttgttatcaatatagtactccatcagagcaaaaatttaaagtgtattctaccttggagatctgggaaatagtctgagtctggatagactataaaatgatgattatttttgtcaattatttattgaacatagtaaatgtacaacaagtaatattatatatcataatatgtaacattctctgtgaaaacaggaaaaatgcctctagcaattgtaattttgagtattgatctcgtcatggctcatattttgctggcttggaagactgattttgattttgttagaatattacaaaaattgcttcctagagtgtttggaaagttgactgttgccagttaagcctaaacagcaactataggtttgctggtaaagttatttaaagccacctgtgcctcagtaatccagatgcttctaatgagtcatgaaataatgctgtttctgtttagatgccagctctgattatctttatcagtaagctaaatggcaccatgttttgcaacctgtattttgactctgattttgtatttacagagcactcgatctctccggcttctcttagtcattttgagttatgcttgttatgccaatccgttcaaaataatttctttccaaatttgggagtacttagatttaagcacacctctgtgcgtgaagacaatgacagcatttaaacaacactatttcttctatatgaactagtactaatcatttccagtggcctaagctcttttgtggaccctttcacagacaaaacaagattgataggctcaacatgttttcagtttgaggtttattcacatcagaaatctactgcccaactggcaagccgtcat

SEQ ID NO: 127749 - DNA, 1038 bp, Homo sapiens
gttttatctatctcaggagttggaaactgcttactggagaaatctactctgcacacgtatttttaaatacatttttattgacacacagacatgcttatttgtttatgtattgcccatagctgcttttgtgctacaagtgcagacttttaattgcaacaggactcatatggcccacaaagcctgaaatacttattttctggccctttacaggaaaaaattgcaaacccataatctgtccctctcatttacaccaatgtctgagatatcctttgagaattggcaggtctctgaaatatgatttataaaaaatgaaagacatatacatcaaacatatgtttttatatattgaatgataacatgatatgactagagtgaaatctattctaatgctcagttcattgtgataacatgattataggaaagtaagaatccatggtgcctccattaaagaaaaaatataaatcctaaatacttttaaaaaggtactttatgagagtggaaaaaaggggcaattgttgagtagataaaacgtttcagtttatgataaaaaagttctagagatctgttacataaccatgtgcgcatagttaacactactgtatggtacatttaaaaaaggttgatggtaaatgtaatgttatgtatttttttaccacaatttttaaaatgcaccttttgggatccagatatctaatatatcaattgtgtgttttctctgtaaagaaccagagtatatatttgtggcattttcgcataatagagcagaaactcctggatttactaaatgttaggtacttcagaatatcaccttacctttctcacatcacttctataatatttgaggcatttagaataacagttaaacaaatgctgttgaattgaccagatataatattatgtatattttctccaagcataaacagtttattactacaattatcctaccttctcattaaccgagacttactaaattgataccattagaactaattacattctaatctcttatatagctaaccagtgttctaaatcgtagtg

SEQ ID NO: 127750 - DNA, 2106 bp, Homo sapiens
caaggcttggtaatactcccagtggttttactcacttacttggtttctaccttcattcagaattttaacttactagtgattaaaaccggaaaaagtttgttccctgatgtagtttatcattcattctttctctgtgtatctcttaatggaaatccccaaaatattatgtggtctgaaaggtaagttcattctttgataaacggatgactatgatggagtttaaattagcccttggcccaaattgcaaccttgtcaaaaactcctgattggcttgtggaacttgaaatgactaagatcttttagtggatttttactttttttatttgagttttcacacttcagcatttcctgagtgttggatttattatttcttctaaagttcagaagtttagtttttgtaatgaaacgaaccagtgttcattatcacgcttgtgtattttattagtactattataattcaaaatttttcttttatattcaacaaatatttattgaatacttatgatgcatattttcctatctccaagttagatgtggtctcttgttcagatgtagttactcttatttttatgagactatgtaaataaaattgtgtagatatgttttctattctttagaatggtcattgcttttattctatgctagtttaagtgagtatgagttagcattctgttatttgaaagatagtgtagcctaatgggagaggcagtgcagaagaatgaaagctggaaaaatgtacaggattgcaaatttcaaatgaaaaacatgacaaataatcttggttcaggactaggctccttcactttagttttactcaatgcttgttactagactctgattatgccatgtcctggggaaagaaaaaaataagaccatatccttacctgcaagctcctctcttggtagctgcatgggttgcaaaaatgaagaagcctgaaaacaccacatattggcgaggacatggatcagtgggatgtcctataccttgtgggaggatataaattggttcagcctctctcaaaactggtttgacatgattgagaaatcacatttcctgttactcagcagttccctctcctaatgctcttgaatgtgtttctacttgttatcaactgactcatattatttttctgtcccaatttgccaaactctttttctaattgattacaataattattctatatttataacttagctcatattaaaaaataagtttggctgggcacggtggctcacatctgtaatcccaacaccttgggaagccgaggtgggtggatcacctgaggtcaggagtttgagaccagcctggccgacatggtgaaaccctgtctctactaaaaatacaaaaattaaccaggcatggtggcatgtgcctgtaatcccagctatttgggaggctgaggcaggagaatcacttgaacccggaggcggaggttgcagtgagctgagatcgcgccactgcactcaagcctgggcaacaagagcgaaactccatctcaaaaataaaataagttctagaggaacttatcacaagttgacttttatcaaaagtcaggacctatttaaacattgtatcatttttttttcttacgtggtctcttggcaaactcagatttgttttcagtggagggagaatccctttcaagtgcgtaggtccttcactttcctttgctactttttccctatgtctggtgtcactggtactctgtcttcctgaaactttgcatgactgttctatgcacttcatttattaaaatcattcagttcataattttcattcagctagcagtgcgttctttgcagcctagcgggtttctatattgacaattccaaccacccttctaagaataccacagagcagtttcccgttatgctggtttatatattctcagcagtcgtttttactctcctttcataaaattattataccgggtcctcaattctggtaatcttgctaacttatttttatactgttctcatagctactgcagttccatcactaggaaatctcacaggatgttagcgtcaaatatactgacttctaatttgttcattccccattaactccgcttatccctttacttgtttatttaatgctttccttat

SEQ ID NO: 127751 - DNA, 1016 bp, Homo sapiens
gctctatgggatcagggccctgccattgtgacctcatttgaccttaattacctcctttagagaatatatattaaaattcactgtcagaacagactattaattaaagtggtatttaatcgtccttttagcattggagccctatttcaactggaaaggagttttgtgcattgtatgagagagagagaaactagaccactaaaagtgaagtgttggggctgggtagaaatgaacacattctaagttttgatgtctgccaaatcactgtgagcctttgtttcccttatctgtaaaggaaggaaaaacattcattaagtgtttgatgacagtgtcttggtaggtaaagagtaaagcaagcaagataatactatacctcatttctttcagaaatttactctttaagagacaacgcttaaccagaaagagaaaacagcaaggaaaagcattaaataaatgagttggttggtttggatgttgctttctacctgttaagttttgtgattctgtgactgggcagtgcttttataatatttagggaatctgaaggcctggcattttgaaatttaaaagtttatgcaaaaagtgagttttatagtatgttggagaattgctgcttatttgcttcaactggcttttaaaaggcatttggctctttagggtaatgaacacttggcatgcatgaagtaatatgtttcttacaggagaaccaaagaacagttgtttgcagtcttgtagtgacatggcagaggcaggaggctggggacatggggatgatgatgccattcaaattgcaaagtgttactgatgctggttctgttgaacactgctggaatattgaatatctgggctatgagcatttttcactagtaattattcacacctcattaagatcagacatcagttaatgtctttctaggtagagcaaaaagtgaaatatttattggtcagtgagtaaagtcctggcatctaggtcagttaagaagatgaacctctcttggcaacttgggcttttggtgata

SEQ ID NO: 127752 - DNA, 1370 bp, Homo sapiens
gtatggttggctgtgtaacattcttaagactagtaacagtcagaacaagtagttgtagtcatatcatctaatgtatagagaataatttctaaaaattactcttagatgtatatgttacatgtagaaatcgccatattgcagcagtacagggtactgtttcatggcctgtttgtgaaatagctttgaaatgcctatgattaagagatgcttaaagttaggaggacaggaagtaactaaatccaaacctggaggagtgaaaggctccaaaggtgattatgctattaactagtaatttctgtttccaaaagtgacatttcaaagtaaaagacaattgtgattaacatttttattttatactttttgttttaataattatagtacttataatatcacatattgccaatatttccagatcaaaggcatatataatttgctgttataattaagcacattttccctaatatttttatctttgaaaaatgcagtgacattgttctacccatgtcagtttgatgtgtacattgatacttatttagcagaatattattctcagtgttcacaggtatgtgatatttttatacagatgcatgtttgttcttaatgagctaaagcctatgtagacattttgaaagatgttagtgattagacagcctagcaaataatgttgtagatcacatattattcatgcatgggaggaaatatagacaccttgttgcatttttatgaaacacagccatttttccccctatgctcagaattatgaaaaaatattgctagttttcagtctgcctgacctgtaaggtctgtgaagtgctgagtggttggtatacatagatttcaaaccctgtatttgagtaacttcttttgaattaatattataaatgttaaatgctataaaccttcaaaccacctaacttttggagattaaaaaatttcattctaaactttttttacttttatattttcaaaatgtatgacatatggctaaacaccgattgcaactaactgggcggttttatactactgaataaaatggagagccagtcaagatatcaacccatgtatctatgcacatttcagcagtttctaaagaggtgaggcatcccaatctagttagcacaaaagaataggcggtttctcatgagaaacagtagggaaaacgggaaatgttagtgaaaaacagaggagaaacagaagattttttatctatttacatatataaagagatcactttatatagaaatcacttaaagagatagttattttgttatttgttgcttcataagtatggattataactagttggttgtatgtttagagagattctactctacacaatgagaattttcaaatgaataaggcagcagaaa

SEQ ID NO: 127753 - DNA, 1371 bp, Homo sapiens
ttatcattggcagagtcaaggagtatagttgacttctgtgtcgcttcagcattgactttcttctttggaacacaaagagactcatggaggggttgttagacgaatgccacccctccctaccatatagttgcttctgtcctctttctttttttcttctctgcttttgtttttgtatttttctttttccttttcatgtccagtaactggtacgtacgagtataacttaactcttccagtgactgttaaaggaaaaagaaaactagctttcttctgttgtaaaagctaatgtgggaccaacgctgtatttccaaataaacctaaaatcagcatgactttgctgctgtgattttgacctagatttaagctgatattttagatgcaggttttcgtctctttatcaattatttttttttattatcgattaaccttattagcagcttatatataaaagacagtagaaaagactattcagaacaaaatgcttgcataatttgtatgctgctttttatgtattctgaacatgtgttcgtcttttggactgcagtacccaaaatgtgcttattcagcatttgacgaaatatgtttatgtccagccacagggccatttacatctgattttgaaatctgaattgataatgtaatttggtgttaaaaataacataggcatacctagggggaaaatacagtctctccctttaataacgtatattcctttgagtgttggctatgcattgtttccttgtatgatttggaaaattattttatcattccccttgctcctcagaaaacagaaagacacacacaccccctctttccgatttgttctgtttctgttttgcattctttgttactgggtctgctatataataccaaagactcttctttggtcataagtgtcatttgaacatttgatcattaatattgcctactgtgtttttaaaaaatgtgtcatactgcctgtgaagtatttttcatttcatggtcatgaaatcttttttattttccttttgtagttaaacaaaaataggccccaaaataagcaatgctattttctcaggactttattatttattaaccgagaaaggaaacttctttgattcagcaagataagtgagaagagccagctagaaaggagaagaaggtggaagcatcataaaggaagttttagtttttaattaccttaatttcattttttggtaagagtagtggttatgaacctgggaagtgctgggtctgactttcttgttgcacttgaaataattgctggaatgtttgatgtttttatgttgtttttattagttgtgaaagaatagtaattttgacaattgctatttttaaactcgatgagcattcttcaaagtccatttctgt

SEQ ID NO: 127754 - DNA, 1046 bp, Homo sapiens
ccaaggaggttctcagggcagtaagagatcttgcggtggagcagtgtccagcagagcagtgagccagcatagctggaagccacattctcttcatgatgaatgtagactgtttcctacagctttggtagtaaaagctagcggagcaaaaattagttgacatgtttcctagactttgggttttctgatcagtcagtgaaaagataattggcaattaacatgagttgctacttttattaaagaaaagggatttttcttagaattaagatccatcctttttaaggaaagataattggcaacttaaaatcgacattctctctctctctctttttttttttaagagagaggatcttgctgtgttgcccaggctggagtgcagtggctgttcagaggtgcagtaatagcacactgcagaatgcctgggctcaagcgatcctcccaccttagcctccatacctggcgtaagtcaatgttcttaagccaacattaatatgtaggctagtttttggagacagtaaattcagtcaaggagggaggagagaagcttgacatgagggattagccaagaaccagatgcagaattatcacaggaagccatgagcaggtatggacccaattgagagaccctaacatagttgtagtgagttgggaatttacttttattgattgtaaatcacatccttctggtccctaacaggcagtcactaaaaatgttttgagtaaatgagcaaatgaattgaaggtaaaagtgatgggggcagttttaaatgtataaggcaaattggatggatattgaatattctttcagtatgtctacagtacctttcattgtaattcttgaatattaaaagatactttttaaatctctacactgtcctgagcacacatatatatatagatacacacacatacatatacgtacatacaaacacacacactcattgccttcactttagctagttgattattagaatatattctgtacagtcacatttgttccagccactttgtttttgaagttttagtacatctgcagcctctcctggtgg

SEQ ID NO: 127755 - DNA, 1044 bp, Homo sapiens
taatttgagaataagagaaaatctatgataaaggagtccctcattccactaatgctaaatttcttccagtttccttttttacacgtagaagattatctgttgtagaggcacagctcttttcatgccatttctttttcagaggcagtttcacctctgatcttcatcctatttccctccatcccctttgggatccagatcaaaaaatcttgaagttctacttagaagatccttgtccctcttaccccacacgtctagtgttgctagtttctaccagtcctgctttataaatatgtctcaaatttatccattccctgcttttgatacttgttgccattgctttagtcgctcagtttcctaactggtttctgctactccaaacctaaacttctttaatccatcttctacactacttccggagtgatcatgtcactcccctccttctttgtgatttcttatcctcagcccttgaagtggaattccttgttgtagaatagaaggcctgactttctgactttatgcacactgatctcaggcccccttgtacacttcaaagccacgaatccttcctttttccaggtctgtcatgctattttcaaaatttttttctttctaccaaaaatgcatctaccaacactgacctttgacctccttcattatctgaaagacattttatccttcaagaatcagcgcatgtatccccttttcttccaactttttcctgtgcctgctcttactcacccttacataatgtaagtggattgctgtctgcttttaaaaaattattgtgattttgccatatttttattatagcacctggcacattgtctggagatgactcaaaagagaacacaggtgttatttgatgtattagtcagggttctctagaacctcacacaatcacaaggtcccacaataggctgagggacccacaatagcctgcaggctggggagcaagaagagccagtccaagttccaaaactgaagagcttagagtccaacgtttgagggcaggaagtatctagcatgggagaagatgtaggctgg

SEQ ID NO: 127756 - DNA, 1048 bp, Homo sapiens
gcacacactagattctcagtaaatatttggtgatttttatttggtaatgtgatttttttatggaaattaaggtcatatagttctctgtcagaaccaggatatcaagaacagggttgttaggaattcacacagttcatcgttcaggttttgtgctcctgtgtacctttggaccattgccccctaaaatagattttcatccaatgtttcttcttggagttgcttttgatatccaaatagacaaattacaaatatgcacttccaaatgtattttgtggtaaagttatgtaaagaggactagtttttatttaggtaattgtaaagatgaggctgaagcagataaagaaggtcttttgttttgcaatctttattgctttatgttagctggcaggctgcctgtgtttgattaaaaatgatagtctgtaaactccttaagttagaccattaatttcccatgacagcacacgaagcttctcctctcctcctctccccaaacagcatacatatcagaggagcctcctatgtgagacatttgtttaacgttgcctgtcagaaaaggtgctacaacaagtcagtcaggtttggagtttgcaaacatacttccaccttactgaacatcacaaaggctgtcaaaaatttcatgtccttatattttttcttctttccagaagaaaaaccattacagatgtaaatgttagagaaattttgtcatacactttggagcttctccaagaagtatttttcatagcttggaaaagaggaaggaggcctctgctgacacatttgcaatctttccagtagtttgtgtgaactttatagtttactaccctacaagaggctagatattttttcttctaaatactacttatatctcattttctttttttttcttgctttctctgaaaatgaaagtgtaagctttttcaaatggccttgatatttctaaaatttctgtttatttttccttttactttcttctcagtcttctagatgctttccaccaaacccacttctgggaattatccacatgtgtacttacttgggagtttga

SEQ ID NO: 127757 - DNA, 1031 bp, Homo sapiens
ttctgatattattttatttgatggatgttgaataactactaagagagaaaccagttgctcttcaaaatataattagcaacaccaggcctggagaagtttacatttggttgtgacaaagttagtagtatgccctctgcaaagaagagaaggggaagatggatgcatttctaatgcaatcaggaaacccctctataatttaaatatattagcatatcctaagaaacccaggtatttgaatgttcctaagacagctcgaagcctttcctaaacaagcatgattaaattacttggagcacattgaaacagcacacatggcccttaatggatcagcattatcaatatgcattttcacggccaactccaggaaagccatcactaaagccataaggagtcaaattaccgatgcagtcctaatgattttgcttgcattgctcacatccagtttgccactaaatgtttgacggcacgcaaacactgaatttcgcaaacattagtgtcatttcctacttgtccctagaaatagtaatgagcatacatcttgaatcctcttattttggatcatatacaagaaagtaaaagttttcaaatattctgaagtctgggcatgttaggataatatgacatggaactaattatgtaagggtacattctgggtcatttgaaatttgcgtatgtattgcaaaggtcacaatcaactcaaataaataataataagagctaaaatgattgagccctagtgatgagctcagctatgttatcaacactttgcatgtagtatctaatttagtattcctagcaactctgtgtggtaggaaatagtatcacccccgttttatagctaaggaacctgaggcatggagagatgaagtagcttgacaaagaccaggctattgtaaatgggtggctaggatcaaacctagacagaaggaccctagagccccaactcttacctccaactctatgcctcaggtgtgtgcctccatttaaaacccttaccagaggaggctcaaaggctcgaggactcttccata

SEQ ID NO: 127758 - DNA, 1315 bp, Homo sapiens
tagatacatttatatatttatttggaaaaggtcgaataaaggatttgcaatttgattcagaaacgtcattaatttttaaaatttatttacttgcttatccttttctgaaaagactgtgaaacagttgcctgaatatttcgtttgaggggcagttaaaaacagaagttgtggaaaaacaatgtcggcaacaatttatgaaaggaaagcattggacatatttaatttttcttacccatttctcttgaaatacctgtgctttcccatttagtgcctttaatatcacaaagagagatgaaagggattaattttgtcgatggtggattgcactgaagcttgagtagacttttttggtagttttacaagcctcagtataccactcatacagggaaaagtcaccttggcttttaaatttagttgagcattttcttgagctattattttaaaataatagtgccccctcctcttttaaaaattactggcattgcaaacccttttttataatttcttcccaatgtttgcaaaatcccccttaggatacttatggttctatggaattcctcttctccagatattgacagaatcattaaacatgcctgaagcttcattattacttttccagcaccactttctttgctctttatcattgcatttagttatgtttcatctagttttcaatacacatgatagggttcatagcccagccaaatggaatgaatttgatagctaagcatttcacaggctggctctgtaacatattctgccagaccctactgtgtgtgaagcattactactttttcttttttttttttttttttaaccagtaaagattatttataactttgatttctttcatgctcatttgtgttcctgaagaagggatggaatggtgtaccccatcagagtgtttctcttggctttcctgtatgtaaacctcactaatactttcagtcaccaccttctgtgtcattccttttaagcaaaaggagaagaagtggaattgggttcaaggccatgctttgcttttcacaagagagtgctctcagaagcgctggtgtagttccaacaccttatttctactgctgcctgatagtggcttgaagtggttatttagagggagagggtggcttggtaggaatgtacttcattcagtatttttgttgatgctgtcattggaatgaacctcagtgaatgattttaagagcatagttcttagaagttatgatgataaatgactgaatgagaacctatttaatattatgtcactactttggggaaaaataattttagctgagtatttcaggagtaagagaaagtt

SEQ ID NO: 127759 - DNA, 1969 bp, Homo sapiens
ggttatatgtttgcatctgtaatagaacagttgtatgtaatgtttttctacatattacatggtgggcctgggggtgtcttcagagaggaagaagatcattattaatattaatatgttatattagtaagtagatgctatattttcagattctctattactttgaattggtttgtaatccaaaaccataacttagctttcactggctttttcgccctaaagaccaattgccatgataaaatgctctcaacatatctacctataacagttgagaatactcactgtactaagatgcccctttacttgtaaaactgtgtatcaagagtaatttgttaaagtgtacaggacctctctttactatttttgcactattttgtgtttgcacacaaatgcagcagtacatttatctctcagaaatttcaattctctctggcaggttgatagggtaaataccctctctaatctttttttctctgggtcttcagctctgcaaatatcccctcattccttgtaaactgtccaaagctcagcaaatacctttccctatatagctgagtattctttcccatgttgctccattttcctcccttttgacagataagaaaaggtaagcctgactttatgaacctttttctgagttgtcactctctaaacaactttcctatttctgaactgcccagcagaatttggagtgagcaaattagagatattgagaatggtgtactctctgtccacagctaccttttatgagtacgagaacaggaaaagggcaagagagtgcccagggcagcagagaattcagggctagagaaattctgtttctgttggccaaggtgaataggacacaagaaagtctaactacaattaagaaacctagtcgggaaaggtagggatagtcatggaagaagtgagtttcctctagaaatttttccccctttgggactcataaaatagggtttctaatagatggagttttgcctgaataagaaatcgagcagtgcactgggtggtctctgtcattacagcaccggttctatgcatgtgtgaataagggcttatccaaatcaatcctgcatgaaagaatataccttagtaggaatttaaaggaggaccttaaattcattagtattccgagaactgtgagtgaaactgtttagccctgaaagcagcaatacagctgaggttcaggttttagagtcaaactaatctaagttccattcttgttttagtcactgaacttccctaagcctcagttccttcatctgtaaaatgggaatgatattattaagttttatgggattattaggagaagatgagccgttatacctaaattaattagaattgtacttgaaacacaagtgttgttaaatgatattggtacaggtggtggttgtagaaaccgaaaaatggatggttaaatggattaacacttttagaggatctgaggggccttagcatttgggagtgttggttatggatagagcaaactgaagggtatggttgtattatctgctccttccctcttatctcagtactgggcgcagcagttctctttctttcttttccctattgctcaggcgtcattcataataaaatatagtcacacatcacttaaccatggggatgtgttctgagaaatgcgccattaggtgatttcatcattatgcaaacactagatgttataacctactacacgcctaggctgtatggtatagcccattgctcctaggctacaaacctcaacagcaggttactgttctgaacattataggcagttgcaacacaatggtaagtacttgtgtgtttaaacatctaaatatagaaaaggcagagcaaaaataccatacaaaatgtaaaaaataatgcagctgtataggtcctttaccctatgaatgttgcttgcaggactaaagttgctctgggtgagtcagtgagtggtacgtgaatgtgaaggtctaggatattactgaac

SEQ ID NO: 127760 - DNA, 2580 bp, Homo sapiens
atagaatatactgctttcttttcagcctgtgaaaataaattaatgagtttgaatattggaagaaatagaaaatgaatttgatcttataaagcatccacagtatgtatgtatgtatgtatatctgtgtgtgtgtgtatatatataactggaacagtgagaatcactatttttgaattctgaaaatattaagaaggtaataaccccctcaaatacagaaaaagcgctagtaaaatggtgagtgatcctattaaggtaataatgcaaatgagacaacagccaactactaatgaaatgacccatcacagacacatatgtgttaaattaattgtgaagacttcagtgaatccttacagaacaaaaacacaagtgcctacctattttaaattgtttccatcttaagcagaaaatatttccagaaatagtagaattgcagttatttgtactaaatgaatcaggtctgacttactacgtatgatttgtgccagtacactaacataaatttgaatgttgtgaaatgatatagtatagctttgtagtgatttgtgtgaagttgtatatacttgtctgaactttacttttgatggtttaggaattaagttatgattttgggacttgaaatgagagtaattcagaagagcatttcaaataacaaatggcacttaggggaacaaaagctcatttatctaatttaacatatgctgtgaagatgtggagacagccaaggagaatatcagaagtggcacatattatctcttgtctttttgttcttagtctggaaaggtaaaatggcatttcctctaggaattgaggcatgactaagaaaaacaagttttgctaaatgcatggtgacagttgctggtcccttcgggtttcatattaaattaatgatgtgaatgaagttcagcaaatgagaagcatggacatcagtttctttccattcctagttaatattcaacccaggaagggatggtcattcacagctactattaagaaagctttagagttttgttactgagcatagagaaataaaattttaaatatcaaaattttacttccgagcattttttttagcatggatgttaaacaccatcaacagttctgtattagttctatcccaactcccttgatagatacaattaaattttactgatgttggtattttactaaagagggtcattatacttttagtataaactgtaattctaagcagaaatgatcttcagtttcccaaggacagcattttgtaagtggtgtgcgtgctttttgagtttcttctcatctaaccagagttgtactgttatgttagaaatcagtgtggatcctaccttggttgagtttgggctcagcattgggagataattgagttggttacgaaggctgtgtggagaaacttggaactgggagatacaggttctctgtgcatcttgtaatggtatgcatggtttttgctctttgacactttatactcaacgcttgaaataaatcttatagaattggctctgccatgaacctactgtgggtccttggactttgtcaaggcttagtttgcttgcttatttgttcattggtttattcattgattcattcagcaatcaattactgaacacccattgtgtggttggctctgtactagccaataggaataaaatagacatgagtcattccaaccctcatggtgctcacaggttagtgcgggatataggcaatcttacagaaagcagttaggtaccaaaaggatgggagagtatagtagagtaatctaactctacctttagggcagggaaatcctcctaaaataggagatgtctaaactgagaccctagaggatgactaatattcagttagggatatggagaagaccttttctgtcagaaagtacagcatgtgccaaggcggtaagaaaagagagagagcgagagagatcccaatacatccgtgaggactgtttgagtctaagatctaccagattatgccagtatgaacttgtttctccattagctcttgcactttctcacctatggtttgaaaatgcaaccaggtgattataggccacacgacccttctgccagtatgttttagggcctttaaggatcccagcaggttaaaatctacttatctacttacatctgccctgtgcccaaataaggaggtccacatctgttactgtgtctgtccctgccgaatatcctctgtatggccaggctgctatggggctcatgttgcccatgccccaaaagtacatgattgcacctagcctgtgggctgctgtctcttcacagcctgtgctaactgaaatcatgagattggctatgtctttggggtaacgctgcagtttacagtcacctcttctacagatttattatgatagtgaagtaagttgtaagcacaacggaaaattccgacaggaaaggatgtgtggggtggatgtgtgatcaactgaagaggtttcctaggaaggtagaaatcaaatgagatcttgagtaaaggtaacagaaaggaatactgttgcaataaggagtaaagatgtggtgtttaataatcctgtttaatctcaatgcatagtttatggagagactagtg

SEQ ID NO: 127761 - DNA, 2536 bp, Homo sapiens
tgctgtgtaccaactacttttcatgtcttatcttaattctcataacagtcatttgatattttaaaaaaccccagaaatctgagaaagagataaagtggtttgctcaaggttatagaacagactaccatgtgttgtatttcagattttaattcatgtttgtctgattttaagttttgttcgcttgccagggtaccccacaaaaatgccaggcagggcattttcatgatgcacttgagatacctgaaatgacagggtagcatcacacctgagaggggtaaaggatgggaacctaccttccatggccgctgcttggcagtctcttgctgcatgctagcagagccactgtatatgtgccgaggctctgagaattaactgcttaaagaactgccttctggagggagaagagcacaagatcacaattaaccatatacacatcttactgtgcgaggtcattgagcaatacaggagggattttatacattttagcaactatcttcaaaacctgagctatagttgtattctgcccccttcctctgggcaaaagtgtaaaagtttgctgctacaaagaatacagaaaactcagaaagaaatgctaacatacacatttagctggccctatggatatatcatattaactgcttatcgttaggggctgtatatttgtaaaataaaagaattttgggagttccatctctcggctttggagcccccctccttttgtctctgtatggaggagcttcgtccttctgcctttttctttacctgttaaattctccactccttaaaactaaaaaaaaaaaaaaaacaaaaaaaaaaaaaacaagaattttgatcacagtcagactctgtattttaaaatacattgtaactagtgagctgggtgtccagcaggagtttgatatggcaccatgctttataggactatattggtagtcctgtaaagcatatatagtcctataaagtatggtatcacatcaaactccttagtacttagagagtagtaagaaattaaacgtgaaattaagaaaggctggagctaggaatttgtatttgggagccataataatagccagcatttttaatatgcttaatatgtgccaatctctgtgttgagccttttatgtggatgagctcattaaatcttcacaaaaactccacgaaggtagtattaaaacccacattttacagatgaggaggctggcgcagaaaaggtttttgtaatttttctcggttcacacaactgcaattgttagggcgagattcaaaggcaaacatttgtgatgtttaaatctgaacttttcattcctgtggtagtctgcatagaggtgattttggaaccttaaatatagttgaaaacagggctccatttaatcttagaacatacccgtattaagggtgagagaagtgttgaggtagcacatgatgagatagcaaaggacacagaaagaaagccagtttcgggaaaccatgcaagggtattatttagagaagaagagagttattaaaaactacaaagaactcaaggagaatgggagggaaattatcagatatagagattatgtgtctttagggactttgacaagaacagttttgagtagagcatttagtcatatctcaatatgccattcattttgaagctttggattagtttattccatgattatcctcacctatcacgtatggctagtttaagagcgttatttaatctagagtaacagttctgaatgttttttaacaacaacaacaacaacaaaatagcgcatgtgacacttcctttacttctttgtcccattcctcctcttttctaaaataaacaaatatgtgtataaaacaagaaaaaaaaagtgtgggatagtatctgctttactgagaacagcagaagtagctatttttctctattttgcctaggaagtattttgctaagaagcagtagatagaagatggcagtaggtaacggtaaatgtgttagtggactctcttgaaagtggaatttcctatactttttactaaggtactcaaaacatctcacagacctgcttcgtttttataagtatgtattgtgcaagtgatatggctgttaattttctttgttttcccttttgcagtggagaaagtgaaacagaaaggagtggtgtgggacaaatgcaacccccagttttccttttctgtgcagtgtctcctagtctgcatttttcctgctgatcagaacaaagtgtcaccaccattgtgaccagctattctgacttgttgctaaatccatctatagtatttgatgtggctcactggtatatcctctttgaaagactcccttcacttagctgccaggatacgcgctcttctaatttttctcctgcctcattgtctcctcccaactctgtcccctccatctccctgacctcttactagcctgtagtacccaggggttagtcattggccaccttttcttctttcatgtacactcacttccctggtaatctgatccattcctaaggcttttaataccgtctcaagctgatcacttccaaatttatatctc

SEQ ID NO: 127762 - DNA, 6645 bp, Homo sapiens
taggccatcctgttgaaaactgtgatatcttcttccagcatgccctactttttaatttttttctgttgcccttattaccatgcacatattttatctgttatctggaaatagaatataagttccaaatgggcagggatttttgtctgttttgttcactgtagttttcgtaccacttagaatggttcctgacatacagtaggccctcaattaatgtttgttgaatgaatgaatgaagtttcagagcctaaaatagagtggttgagtcagggtatgtcagtgtatgttggtctgcgagtacgatttttctactgatctccaaactacagtctcaagacaacagttttccacctctgaacagaggtgcctctgaatacccagatctttatgtctgtgaacaagcactgcctattagagccaaacaagagaaacacatattaccatctccaattctttagaatccttttggcccagaatgacttcaaaatgctaacccataaaggcaaacaaatccagagacctttgtagtttcccttagcctctgctgcattagctgaagataaatctatgcagaattcacttaagggaacagacaactacattaagctgtgtaatgatgaacattaatggcctgtgacaaaatgggtctctgtaggctgagcaaccatgcaaggtggggatttttccctgtttttggtaaggtaatgaagaaggaaaaaaaaagtctcatccaaagatgcaaagaaacaatctgctggcccaggtcattttcatggtatctttttgtttctcctttctttgttttgtaagtacatgcattttggctgaaaaagatacaggcaccattttacagtggtgggggaatctctactttgttaaagaaaaatgcaatgctctttatttccaacctggtatagttcattcattccttttcctgtggtattcacatgtcttgcaaattgttatgttgaattttttagttccttgttatttttacttgtagacacttacaccatggtcacaggaatctatactgatttcttccactttccatgcatttgtttccattattaatttaagtgagaagcatgtgtgtcattccccttcccatttgacttttacatggttaactggtgatctcaagttgatcagttaacttttcctattgtgcatgattgttgtggggatcaaatgtgtacaaatacgcttcataaattgctgtaaacatttaagttaatggtgcttatgtggatattagaccagttgatttgtagacttgaatcattctaagacttctgaaagtaatccttctggcaaattctataaattaaggtaattgggatatatatacatatatacataaaatttggggtttctacaagttgaccatgaactattgaatgatctgaagtggcctaggatttttttataatctattcagaatgtcactgtgacacacatactatattttcagtatttgcttctcagatattcagaacactttttaccctacagcagaattatttgacaacacatttccttcctgccctctgaatctccctggatgatctacaaaaatatagcatctccatttgtgacaatataaaaccctggtatgactcttttctataaattcagttttattgccttcttccaaagtaatttctgttaatccagccagaaccttcatttttgttttgtcattttcaagctagattctgaagtaacagaactgactacaattttagcctaagaacaaaagagtttcaaggcctatttcaagaccctggttttgctacctcatctactaaatttatacattctaggaatccatttactttttaaaacatttcttttcttattttcagtaccaatttgtttccttcagctttcccacatgcatgacttttatagcatggcataaagtagagtgctctgccatattgatttaatggtatgtttcaataaatttcccctgttacagttcttgctccataccaggcatccaagagggaaatagacggatgtgctggttaactaattttaaaagcgaaaaaattccattttctccatcctttaatgtcatagctgtcctgccaatgacctgatactgagatatattaggttcctctgacatatgttacaggaagtagtgacctgaccttttaaaaattttattaacatttataaatttgttttagtgtattatgttggaagcagtgatttttctccagaatggattggggtgactggtgtacagattgatagccatgtcatatattaaggtggtggacattttgtagagtccaccatctctatactcacaatatattgtagagtatagagatgctgtctttttttcccctccctcttctctcctgcctttaagggttatgctaatggggatggaaacattcaaaatcttactttaatgcagtttataagcaactagaaccattactgtcagctttttggtagctggttggctttgactattgcttgataaaacattgagacatggacattcatccatttattcactcaacctttgctcagtgcttaatgtattccagacactatgccagtcactaggcatgtaagagtgattgccacaatacctgcttccaagtaatttatagactgatggattaggacccagtagtatacaatcaagatcctaatcaaagattttttccttcttcaactctgttcaaagcccagataagtatcatctctctgtctctttttttaaatttttgtttatttagagggtgcaagtacagattcttacatgcatatattgcatagtggtgaagtctggacttttccagatgggtgtcttctttttccctcctttccctgtttctctttccttttcttccattctctcttagcacttcctaggaaataatttatatatatattttgtaggcacaaatacttgtcatacattaagggaaatctttattgatgtaaagcattggaacttagctatatccagttttattgccttagcaattctcttctttcctccataccctaagtaatcgaggagagtgtggctttagacaaaggacacctctcctgtgacagaaaacacaggagccaggagagttggcatgctggctttctaacctgcttgctgcaagagcagttgtgagcaatgatgatgactgacactcacatccatcatttgccttcttccaaatgcttctgaaactgaaatgaagcttcccaacacctcagtgagtatagatggctgttttattttatagtaagtatttgtttattttctagacagggaaattgagggactgagaatgtaagtggatagataaataagttatggacactgctgggaagcattagctaatgtttattgagcccgtgtggagtgtaatactttcctaagccctgtgcagtgtattttgtttctagttttccactttgtacttgagggaagtattccatggatcttcttgttttgaatttactcttttgtcttcatagaaggttattgttttgttgttgcacatttcacaattacatttgcattttcttcaaacattttgttttttatctttgctatgcaagacttaataacaggaattttcgctgtatttccaggctcactcactcagttttggaactttaaattgttccaacagtcactcagttgttggaactccaacaactagtgcatttggtaagaactcttacataaatagcctttacaatcaaatagacaaaaaatagactgtgcaaccaaaaactttttgctgttttcccacaaaattatctgaatttgtttgacttgagatttttctttgtaattttctcatctgctgcctatcctaagatttaggatgtttttaccttaatagccatatcatgttttaggccttagtgggcctctctccttcatgctctacagacaaatataaagtgactcagtgttaaaatctgatacactacagaagcactgtatggtttatattcggaatggttttttatgtcaaaggaagtgcaatgaatataggcaaggaattaaagccattaaatgtatgaatggaaaataattttatagaaggtcttatttttctcataaatgtgttccagaaatgtaagtccaataaaaatgtatacatacagaatattcagtggtcatctttcggtcgtgttcacagtcatttgcctaatcgcctgttttctgaagcttttctataagcagggcaccccattataatggtaacaatatagtttttttcttgtaaatagattatagttcatacatctgattcacttgttagtcaattgtttggaattcagaatgcattttctcatagacatcatcttatattatcttgattggtgcaaccctttgcaacacaggtttatccataatgtatttctagtatcatactgtggctttctgaaatttaactgaagtgttaagcatgtgtcctgggaatggatttagagtttgacttgagattctaggagcacatttcttcctactgaatgctgtttgtgggatcagaagctcatgtgatgttaggacatggtcaacagaggggatgttaaagcttatttagtccaccttcctttgttttgagaatgagaacatcacctccaacattcccgagttatggttccaaggacctgggccagaggtgcctttctggagagagccaggtggtgaggggcagcctccaggggtcactggtataagaggcaggatgtggcctgggtcagatgacagctttggggtgaggcatgggaaggggaggaggtgatgggggtctgaggataggagtgaatatgtgggtcccttttgttatgcacaatagaattgttctcccaattttttttttttttttttgcctgtcacttcatactctattctatttacttccctttctagttagtaaggcatgttgggtgaactccccttttttggcaaaaaggcatttacctttctcttccccattaccactaccagcacaccaatacagattttccccctcgctcagggaggccatgactggagggaggggtaaggagccaaatcgagctgtctctggtggatgcagcctttacagtggtgagaggaggagccgcgggatgtaaggaaaaggagctcctatggcctggctggagtgtgcagtggatgaggctgcctcaatgcagggcgagatccacacatcacatggtgggggaagccattgctgaggtggggagggtaaacaatgctagctttttggccaggccagggcacctgtgtgggtgtggggaggacggttgaagagtgctcagtgcttttctttggaatcagaatttctgatttagtgacaaatcatggaaagtttagaatggaaactttttaattttagaaaccaattaaataatattcaaacacagcagtgaataaagaactatgttcgctaaatgcctgtgtttaacatgtgagaagatatgtcccttgaccctgaatcttctaaatatgtacagttttaaaagatagaaatttatagtgaaatgcatttgcgtatatttggggtaagagatggtgttcagaaagagagggaagctagatgggctgaaacatgaaataaattccttcagagtcccttccactcatgtaaagctccttgaagggcgtcaggagacaacattcctgtttctgaggaacacttacaaggactctaaggaatgttgtttcccttattatatttttatatcaaaacattttatttccacagttattttctttacctaatctggcattgtagctgtgatttggcgggggatggggtgttaggaagttcattttcttttcaaaattgaagtttttaatgaacttggtagatttcctgaaggttagttccttcaacttttggtattacaaagtcatgattagttttaatggtgaacattaagattgcaaataactgctgtggcgagggtgtttctttgtgaatttgaagtgtctcgtttaaagattggtgcctacattgctaaggtgcataccaccctcagtagctatattaacttatctcaggttgcagagtctttggggttgtgcttgggttaaaattctagccatgcagctttgtgacagggaaagttctttaatcatttgaacttgtttcctcacttgtacgatggagcaaatacctagctcaccgtgttgttcaagtgtcaactcaaatgatattatgtgaaagattctggcatttcctagctgcctagccagtgtatggtttgtttcaatttgattccatgtgtgactgcatgctcttggcctattgctaacgagcaggcagagaaacagcagcagtacagtctggctagagggcgtctgttgagcctccaaacattgaaggctactttgcctctttgtcaggggcatgagcctccagaaactctttcctagatgcgctaattgtgtttcttcttcctcactgtgtaacatgttatactgggaatctctcctgaatgtttgtttgtgtctctatctctatattttctatgacagtatttgcctgactgaggtaatcccaactggagggctgaggtgacagatttggagaacattcttacaacatgctgttcaagcatttaccaccatgatgtaataagtgtttg

SEQ ID NO: 127763 - DNA, 1081 bp, Homo sapiens
gagttcaagaccagcctggccaacatggcgaaaccccatctctactaaaaaatacaaaaattagctgggcgtgtgttggtgggtgcctgtaatcccagttactcaggagactgaggcaggagaatcacttgaacgggggagtcagaggttgcagtgagccaagttcacgccactgcactccagcctgggcgatagagcaagactccatcttaaataaataaataagtaaataaataggatggatttggctgccgtatgaagaatgtgctgtaggggagtaatagtagtggcagagagcagaaagccattgtaataattaatggtaagagatggtaacagtggaggggagaagtggtcacattctggatgaagtgtgaagatttgccagtgggtttaatgtgcaggtaagaaaaagaggagtcaagcatatcgcaaaggtttttcacttaagtaacagcacaatggaaatgtaatttcagaagaccataggaagactacaggaagaagctagctggagagtaagatcgtgagtttggtttgggacatgctaaatttgacatctctattagatagtcaagtgtatgtgttgagcagctagttgaagtacatgacactaaaattcgtaaatgggaattagactagcactgtccaaaagaactttctaccatgatggaaatgttttatatcttcactgttcaatataatagccactagtcatgtgtggatattgagcacttaaaatgtacctagtacaggccaggcgtggtggctcacgcctgtaatcccagcactttgggaggccaagacaggcggatcatgaggtcaggagattgagaccatcctggctaacatggtgaaaccccgtctctactaaaaatacaaaaaattagccgggcgtggtggcgggcacctgtagtcccagctactcgggaggctgaggcaggagaatggcgtgaacccgggaggtgaagcttgcagtgagccgagatcgcaccactgcactccagcctgggcgacagagtgagactccgtttaaaaaaaaaaaaaaaaaaagtacctagaacaactgagatatggattg

SEQ ID NO: 127764 - DNA, 3307 bp, Homo sapiens
atctgttcatcaccttcattatagagcaagtcacgtaaggatttatctctttgaaacccagtcttatcccaggccctagcaaatagttattgctttataatcacttttaaaatgaacaatgctgaacaaattaatgggttactcgattagcctttaaaattttttttcaggaaatatgctctcttctttgaggtccaagcactgccatcttatagctgctacctgttggaaatcccagattctgttaatgactgacctcttactcatcagccacccaccatcacccctccccagttcttccagggcttattttagaggagctggattggagatagcctcagtatttcttatttcagcagttgaggttaaagagccaaacatctgcttagctctggactttctctttctcccttactttgctcttctttggttccttaaaggagtacttaaagggagttagtttctagatggggaagctagcatctgtatgtatacttggactgtggtaactggtaggaagttattgtgtatggttaaaaagtagattttaccccaaatctctggtagctagatctgattatttttccattatttttctcatcttttaattcttctggacttcaagtgttgagagttaaccttgcatctcctgtctttctcttttccccttgaatgaagttccattcattgttccggtgtatgccctgattcagagtctttcttggtctcaccacacacacccttgctttgtcttgaagtactctaacatgtctgcatttggaatttctcctgcatgtcccaacctctggttgtattctttgcacctggctctgccttaccttccattctgtatttgatatactgtttcctgtgctctctgagctattacgttagcatagaggtaaatctgaaaaacaagaagacaacacacatgcttcttttccttgccatttttaagatgttgattataggtcttgtgggaattctgttaagtatgtttttcaataattactatggcattctgttactactcatttttcttgttccttatatctgtgttgtaccagctcataatactaaacaaatattgtaattgacaaagaacatgcatcctcattcctattgttaaagccactcacagtcctgtaggaagtgttggtacagcactgtatgaggaagagcagatgctagggttgtatggtgccctattcttaagacctactgtgactttctatagtggagttcaaggaaggcaaggaatttgtgtcactctcaaactctccagattttaaacctgccaaggaaaaaatgcagagctggagcttgccttgaatgattaaaagtcacatgaggaatggggaaagaaaatcccaaaggattgatggctagaaagtagtttatagtcaaaagctataccaaaagcaattgctcgaaaccctagaaaccacaaatggaaatgagagtggattatatatagtacaaaagacaaatacacacacattccccacccagtgggctttactataaaacaagccaattaagacaaaatgcacagtaattaggaacatcttaggtggggtcagggttgctggatttttttatacattcatacacttaatttattttaaattttatcacgataattacattgttttaaggtttgaatttttgcaattcaggtatataaaaatgatagattaccaaatgagtttggtgtgtttaacctcatgattcacttatatgccaataatgtgccttgcctagaatgtttgctttctaatgtttctgtgttactccagctgcctccctttattgctgtcatattacaatgaatgttttctgcatatttatgaagagcctattagcagcatagacttgatttaaagaacttctccagtttatgaatacagttcatctcttgtgaatgaatttagcactttaatgctatttatttactccacaccataaaatgtactataataaataataggtcccttgggcctatggtaaaactcactgatcatcctctcagcaggaagatgaacacaacttgagtggagaagtaaccatcaaagttcaccatgctcactgggatgtcatttatatacctgaatctaataaagacagaattacagtgcttaacattgtgctcactactagcatctgaattcagtgagactcagggagggaaaagactcagtcacattagcaacatcttagaaggtgatacaaagtctaaattggcaattcaaataagaaagtgttctttaaaagcatataatgcttaatttcttatgctaaatacacagtaagttagtgttttccattttcttcacccatggaaaacccttagttttggagggttgtgtttttggtgggggatggtagggggcaggggattgcttcaaaatctcttctctgtcaattccatttggagttttcaaggcgaccccagctgtcagctatccataaatgcaatatctacaagccaggacgtctgtgtggcatttggtcagtagggccattctgttttatggttgaagtccagaaagagtcaatatatgagtgttcaaaactctttctagatgaatgtatgcctgattatattctaagattatttgggttatttttgtgttatctttgtttttatttgatatgatttgcttttgtagatatttgttcctttaaataaatggtcacaaatttgaatgcttaaaatttgaaaccaggcagtgtattatagaaacagtataggccatagttctgtatcagggaagagttgactttattctggaagatttttaggtctgatttactagttgtctacttctatgtggacaaatcattctgctttgtagattatttgatttagagcagactacatatctgatggctctgccaagatgaattagcccctcactacatctccagataacggcgtaggagtgaggaactgtataccgtatccctctaaagagaggcttcaaaaagcacaatcttgatttgggtggttgggaattgttcctttgttggacagctttaattattaaattgagatgaaatatgccagcttatgatttttaatactaatttattcaacctcaaaattcccagtgcaccatttggttctcttctcaggcaaattgttagtttctgccttgtgtattatttatgcttgtactatgaataaaggatgtctcatctctatgtggcaatgtcgtctgcttcatgagctgacagttttgaagaggaacatgagacagtcagatctgttagtgcaactcagtcaagcaggtggtcgcaaaat

SEQ ID NO: 127765 - DNA, 1743 bp, Homo sapiens
aaagaacagaagattcttgttaacatctttgttaccgttaagatgtattgttgtttctaggaacaaatgacaaatcccatgtctttgtcattccataagccttctaccaaatccatgggtcaaagtgccgtatgcaggtgatttactgtgcttgatttgttccatgatttcatctttagacacttccatctttgtcaaggccatgctaatctcaccacagagaatgtatactagaatttctcaaatgtcaaatatattgtgtacacttaaaaaaaagattgtcatctaagtttatcaatcataaaaataaaattccatagtttcagtttgcaattacaagcttgtgtcttaaagtttgttttgctccgatttttaatttggctttttctttctttatacatttcagcttccttctttctctaggttaatttcgcaaatatttcttaaatgttggctatgtgcaaagaattgttttaagcaccttaatagctacaaagataagtaagagcttatctctactttctcctaccccaaggccacccaaacctgctaatcaatcttaaatccttctctttctgctaaatatcattagaaggcatcactttgagggctttttttgtattagttgtaactgagggatttttaaaatattttaattggttattattggtagatatatttgagagaccttacatcacatagtgaattaggatgtttattgaatgtcctataatgtgttcaacagtgtactgttgttaaaaagcatcattataattgtactctaaaacttgcaatttttaatgtcttcattgcctcctgcatttgttgaaatcaataataaccttttaaaaagtatgaactttatgatatgtaaattatatcgcagtaaagctgctatataaaaaagaataacctaaagtatctaaattatattattgggtgttaaaacacaaatagccttctcttgttagatttaatcccacatgtaacaaatttgctgggccattttgcagcaccatagattgactgctttattccacatactacagttctaaaacatgaggaaatcttagttaactaattgaaacactcatttggataagaacttgagcatggttcaataattctcaatttcccactttgcttgtaaaacacaatgtaagtatggaattaccctcttcacagcttattgcactatgtgttcagtcacagagaaataatttaaagcagttcacttccaactgtttccctcatgctgacccctttcttaaagtaacgaatttctcaaggttatgtttattttgaaattataaatttagtcacatacctggttggtttcattctccttttgttgttttcccctttggaatttccacactgtgtcaccaagcaagctcttgattgctcccaccctctttttttttttttcttctttgttgagacaggttcttgctgtgttgcccaggctggagtacagtggtatgaacacaactccctgtatcctcaacctcctgggctcaagtgatcctcctgcctcaggctcccaggtggctgggaccacaggcgcatgcctccacacctgggtagtgttttttgttttgtttctttttgtagagctggggtcttgccatgttgcctaggctggtctcaaactcctgggctcaagcattctccccgccttgacctcccaaagtgctggaattacaggcatgagccaccacacctggccagcttccactgtct

SEQ ID NO: 127766 - DNA, 1061 bp, Homo sapiens
ctggccctggggagtggttttagctacacttgaattccaccttttcctcataaagtggtatggacatcatattaactataacactattataatcagttgacattgccagtcattatttgagacaggtgtttgttcttctagaatttgcattttctcactgcagaacactgtagaatgttaaagctaaaagattgctcataaatggccatatgtgagaacatgcagtacattaacttgctcatttgtttatgatttaattatgagagtaagtggaaaagaaggtttagagtggctaacaaatgatactgtctcaatattaaatagtgggggctttgttgttgtttttataaattgggtgaaagtccttcatgcttttaattttttttatttaagtaatttatatgttttctcccttccaaggaatgaattttattcttcatcataatccctgcaaattagaggctaaaaatctttgttttacatctggagaacaaatggatgttcctgcttcattctcagacaagcaagtgattgatagctttgatatcagattctgaaatgaaataaattttgtctcaatttgagagaaaatagtgataatacaggtcctttctgccaaccaactcaggcatatgggccttttatttttttgatcttttttcattcactacaattctaaattgaaaaatctcacattttcttctaaagttgatttaacaatatagttaacacttaaaaatatctaaaataaagaatataacacattctactgaaataggcagccagcagtttatacatatttggtctaatacattcctcaccttacataaatctccagaaaagctataggaaggaaacacattcccctgacacgacaggacgtaaaatggatataaaccaattactttttgcagttcccagagtctcaggaatactgacccttctgacttcattttcaagcaagaactctccacccccatcttgtaaggaaaaataattgagctgaatttctagcaagaagcgaatcaagattttcaaagaataatttcgctaggacctat

SEQ ID NO: 127767 - DNA, 1034 bp, Homo sapiens
cacagaagtcttttgatgaacttttcccactttaaatacatcaaacgaagcaaagagagtagagaaagccattagaaaatcattataataaataccaacattgatctacttcttccctctcctttggaacctcccctttccttgtttttaaaccttttagttgagctttatatagcaaagtaatcaaactctcacaggccattataaaagaaatttaaatgatttttacgaaaaccattttccttgtttaagatttcagggaacctggtcagtactgtgagggctcagtttttggttgtgactttcaagttgaacctttttgatggtaaatagcctcctgcttatgcctgtgtgttttgacttaaaaaaatcaatctctgagaaaatgggcttccatcttcctttcagccccgtctcctttgatgattgatgttaattcagtaagctgctgacccaagaaaaaaagaattgtttgtgctgttgttttgaataaataaacttacaaagaatcaatggctgtaacttagagaaattaggtagtagagagcataaagtctctgtcgtgtttctcatgtaaataaagcaaagtaaagggcatttcagcaccagatatctttttgaatgatgaaaacttgcttcaagggcaattttttttttaaataaatgttctctctgtatctatagtgagaaaggtctgtagttgtgacaaaaataggacaccttctacttattcacataataattcgaataagtagcgaagcaaagcaaattccttagtcactgggcccagcttacattcaatgttgttagtatgtggacttcagtcttcctaccatagtttagagaaaactttttgaaggactttgtaacaccatgattcaattacctcctcctgggtcccccctacaacatgtgggaattctgggagatacaattcaagttcagatttgggtgggcacacagccaaaccatatcatggagcaaaatgattagcttgcatattgtatgaatttggcctttacttctcggtgttt

SEQ ID NO: 127768 - DNA, 1395 bp, Homo sapiens
catgattctgaggcctccccagccatgtggaactgcaaatccaattaaacctctttttgttcccagttttgggtatatctttatcagcagcatcaaaacaaactaatacaccccatgtctggaattctcataccaggtttataccattaagtttgttggagtaacactcagataagcgtggatggcattgtggaggaagggcaaaccctgagcactttcttaagccacctttctcatgcacacattattattcccctgcctgctagtcatctaccacatgtaaagtagtggcaaacatcagacgcttttaccaccacatagagtttgaggctctcagtcaaaatgactcaaatgccgcacctgctcggtcccagagcacattgttattttctcaagtaccgatacgtgcttttgaaggaaaggaggtagtgcagacatggcaaagggatgtatggatttaccctcttgtgctgaacaccatgaaatgcttttctttaaacaagttggttttctgatcttacagagatgttgtcattctgtgaaagggggaaaactgtgaaggctcatttaaaagtcctcccttctcaccttgattttctgagcactatgactcttttgaatgtcatctctcctcctggtcttttacccctctctttctttgtgggacctgacttctccttccccttgtgtttatattgcatagctcattctagctgacacattttgttagtgttatcagagagattagaaggagtaaagtcactgagagtgttgtttctccttcttccaggtcaacaggcttactttcaaagatagcactccttgtttgctctgcttgggccataattgagcagtatcaagtttgcagtttattctacgtctgacttgttaatttaactcacagtgtactgattttatatgcagcgttggttcatatcttggggctcagaatctaacatatatattaaactgtcaagacactggcagtaggagaatgaatgcttcataatttgatcatctgagccattttaactaatatctgtatcttttgaatcaaatgaaaatatactgtgataattattctttcactgaatgttaattaagtgttgttttaaggttagaattatgaaaataatttctagtaaagcccccgtttaaaagctctacccctaaaaataaaacaagaaaagcaaggaaaaagaaaaaattcctaccccacatagcacattgtctcttttttccaatttcggggcactcatgtgagattgtaggcattcttcaaccacgaagcaactttaccaactctgttaaaattgccacttttaacatggggaaaaacaagataatatttattaacatcaaaatataacaagctggtaaatatctttactatag

SEQ ID NO: 127769 - DNA, 1051 bp, Homo sapiens
gtatacaggcatgtgtgaaatttactttttttaggattagagaacatctatatttgccttcaagctcccttaaaatagtttagggaaccatttagcatcactttccatgccattgaactcagagttaaaatcgtgattgagatacttataatgcaaatagaaatgtcccgaggtcattgtgtaattttataggggtcttcaccaaagcaaggaagaaggcagtaagttttatagcgtgataggtggcctttatgtgaagtgggttgaaatgttgctctctgtgtaggcacacagtgcatggaataggcatttcattatgttcatatctacctgtatttttcctttgatcaatgcatatgtttgattaaacagaatgaaaatctacaaaagtgaaaatacgtattgaaaaaagtaatagcggtaaagcagtatcttgcagctttttactttgagtcccagtggattagcgattttactttactctagaaatgacagtatagtgatgattatttttcttttgggactgataagaaaagaaatggtgcccaattatattagtcattagtattctttgttataagtattatgggaagcttgtggagctagaagaacgtggcctgaatatatttttaaacaagtaaattatctttcagtattggcaaaaaatgtagtttgtctgccttagaaaaataaaacgttcatacataatttagcttgtctgtcattttaaacaattcagaaggcatagccctgtcgtctaggcctattttttttttgtcaagagatgcttcattggttcctgtgtgaaagtgttgacatttatattacactctgaatacttaagaaaccagaggattccagttcttttggaattaaccaatggtatctcatctactagtcaggcattcacaacattgtgtgcacatgctgaatttgtgctaatggcttcttgccataggtacattttgtgaatgtgactatttatatagcttctttcatatatggcccagtcctcattcccttgtagccaccctccttccccaaatgtgtt

SEQ ID NO: 127770 - DNA, 1054 bp, Homo sapiens
atctcaacagatttgtttatattcgccccttttccatgtggtgggaggaaaaactttttcactactttctttaattcaatgcttggggactgctgaattagaataacagaagacagattaacaggataaaagttacacagtttttattaatatttacatacatgggagttcacagaagagaaaatcaaaaaagtagtctcagggtcttgtatcattcaaacataggacagggcggattgggcttcaaggggtcataaattgtggggaagtgactaggaatatgggggaaactaatggaagataggattattttagtaagggttgctaattcagtctcatccaggtgccgactcctcatcttgtgataacttgtgataagagttgctctcctttctgtggtccggaagtacggagcaccctcacaagggaaatttctgccctgcttttaagcagataagggagggcagagaactcttctgcatctgttcattctcacttgccttcagctcaaaataatccttgtgtttgagcagcatattttagggtagtatatcctcatctccttcatccacaaaagatttaaggtggtttttacagatgcaattaagtaagctaaacttaatgatatatgagaaatatgaaactaatgaaatgatggctcaaaaagtcagaagcagccattgatgttagtggttggagatggactgtgaatatgtcttgagctttccagcagtcagcacagagatgcacatagatatacctcatttgattccttgggtctatcatataaaataaaccatttgctcagaagaattatctgttcctgggaatgggatagcttctagagattctcttgaagataatactttgtaatgtaatgcgtatatttttaacaatgaagtaaatgcagtacaacagagtaaataaaatattaataatacatatttactgagtatattctgtatgccagaaacacattaggtatgctggatatgtaatagtgaaccagacagacatgacctgtgtcttcaaggagcttataaatataatgggg

SEQ ID NO: 127771 - DNA, 1049 bp, Homo sapiens
gttcaaggctgaagagataatgcttaccagggagtctcacagagtaacccctggatgaacatctcttaagattgttagaaatgctggctgggtgtggtggctcatgcctgtaatcccagcactttgggaggccaaggtgggcggatcatgaggtcaagagattgagaccatcctggccaacatggtgaaaccctgtctctactacaaatacaaaaattagctgggcgttgtgtgtgcccgtagtcccagctacttgggaggctgaggcaggagaattgcttgaacccgggaggcagagattacagtgagccgagatcacgctgatgtactccagcctggcaacagagtgagattccttctcaaaaaaaaaaaaaaaaaaaaattgttataaatgctaagtctcagacctatggaagcagaaacactgaatgttgggccctgaaatctgcatttttaaagcctttacaggtcatccttaggtatgctcaaacttgagaaccgctataaatgctcagaagatgagagaatgtgacttatttcaagaattacaatattatttccattcctctcccttgcaacctaaaagaaacagagttgtttatcatactgaaattgtctacctttggtctaacagtatgtgtaaagaaaagcaattgaagatatattctcatttcatttatttttattttttaaattgttacataatgtgcatattttgggcgttcttctgaaattttgatacgtgcttacaatgtgtaatgatcaagtcaaggtaattgggatatctgtcactgtaaacatttttctttatgttgggaacattcagattcttctagctattttgaaatatgcagtaaattactaactgtagtcaccctattgcaccatcatactctagatcttattccttttaactgcatttttgtacctattaatcaacctttcatcatcttcccttcccactaccttttctttgtgcaatggcgcaatctcagctcaccgcaacctctgcctcctgggttcaagcgattctcctgcctcagcctccc

SEQ ID NO: 127772 - DNA, 1056 bp, Homo sapiens
accttaccacatatgtgtgagaacacacaacatgtctttctgtgcctgggtttttttatttaacataacgacttgcagttctatctatgttgttgcaaatgacagcttcccattctttttaatggctgagtgatatttcaatgtgtgcatgtattgtagtttctttatccatttatctgttgacagactcttaggttgattccatatcgtggttattacgaatagtgttgcgataaatatgaacatataggtatctttgatatattgattttttttattatatgtctagcattttttttaataagaaagtagactttgtggatagcaggtttccacatttcactttcacttttcacctctttctcaatagttgaatcccttcccaactagcctcttactcttaagagacttcatattatttaataatgttataattaactaatgacatattatttaagtattggggtaaaaccaaaccatcatcaccttaaataagtctgtattgataattgttgcagtgatatagagatagcaccttttctagtccattatcattgatgttcattgagttgtctcagcaatttacaaatttgaaatggaattccagaggcatctgaattatgcttatcctaacaattatgttgtatgaatcaaatgctattacagtaaaagccaaggggaccatccaaattcatttgttatactgaaacacaactgtatgtggggattgcttgaaataatgttttattatatgaagattaacatataaatatggttcaaatgtttttcatgttttagaggttatttgtactgcttcttaggtcattaaaaaataaaacattttactgatcaaggggcatttaaagcatgacagtgttaaagtatgccccggctggcaaagcggacttcctgtggctaactgaggtgctcattaaacagatcaggtggccgtggctgggtgagggagcagtcatgtactctgtgttttgcagagatgctgttaaagtgtcacaggacctccctttctacgatcatgccaaaccagtttctgttgtc

SEQ ID NO: 127773 - DNA, 1382 bp, Homo sapiens
gtttttttaagtgtatgtcttatcaacctaaaataagcaacagaaagaccaactcgccaaagagtttattcaggaatagcaggggagcaatccagaatatgcctgctatgatggatcataggcgcttccagagaggcaagggaaggtaagagtctgtaaaggcaaaatgagggaggttacagtagttgtttagcatcagttcgttagtggaacaggcagttgctgggctggtctccttgtagaactaatctgtatgtagggttgcggtggcctttatgtaatgttgtggttttggcagtctcttatgataattcctgttgtcaagcaaacatgcatgagggcctgtctttcatcgcatcctggctccattttgttggggtttgaataagtgactctcttttgacatggacaactttcacagtcttctcaagtacatgtgagctccttcatgtaaggaccatctgtgggaggtcccatagagtctgaaacattgaacattcactaaatgtttgattttgatttaatgaataaaatttattgtttgcaatagaaaatgtaacagaacaactaatttcacattatataattgtgacatatgttatgattcttattttcagaaaaaccgaggtctgaggtagctaaatagctttctgaagtcatacagattgtcccttagatttagtctgacattatgttcatgtgttattcaatcctatatgcttttcaaaaaaacctgcatttgcccagctacaatccacatgacactattgcttccaagaaatgtaactggaatcatggccagtggaggggaaatggattttggaaaaaactattaagtaaaagttaatagtattttttacttttgactccaggacttttctcaactataatgtgctaaagtgcatagtaccaaagagattgatttaacacgcaatattttacagttatatgttaacagaagccctcttcaaaattacttattttctcttgagggactatttttttttaaggatgtaatttggaggagctacactaatctattctgtaagatgttgattcaagttctttatatcaaagtcatctcaactttgtatgttaacaaaagaaattgaaaatatattggttgtgggctcttttcctatattcgactctgatatgctctataagttttgacaaattccaaaattgcaggaaattgtttccatttattcattagcaagggggctatctgaggagacacatggtcaaatactcagcttttggatttgtgaatttcagcttgtagtcattgttttgctaagaggtcttagttaagatgtatatgtcagatcatactataataaataatagacaatccaaattcatttactttactggattta

SEQ ID NO: 127774 - DNA, 1058 bp, Homo sapiens
acaaacatattagtatttgtacttatatttacatttatacacacatacatggaaactcacaagtcatcattagacatggcttttggttgactaagagccctctctgataggagaaatatagtgcaagccacaaatgtaattttatttccaacagaaataatatgagccacatttaaaaagtgtaaagaaatagatgaaatacattttaataatacattttattgcacccagtacatccaaaatactatctcttcaatctgtaatcaatataaacatttttaacgagatattttacattctttttttcatatcaggtcttagaaacccagtgtgtgttttatacttagagcacacctccatttggactagccacatttgaagtgcttaatatccctgcatggcttatgagtggagcaaggggaaaaggtggagagggaagagtacctgtctctcttcttctttgcttaagggcactaatcccatcatgagatcccacccttatgaccccatctgaatctaagcacctcccaaaggccccacatcctaatactgtcacactggggattagggcttcagcctgtgaatttggggaaacacagacattcagaccatagcatttataacctcaagctttcactgtctctatcccagtaaaccagagctcttgtaagacatgtgtgtgtacacattaagtggccttttttttttttgcctgttcttctttaagaaaaccaatataaaattgaagctaagacactaatttaggacataattaattgttgaggtgctttgaaggatctgtattgaagcatttactggtaaaagtatagaatttaacatagatccatgattagccaagaaaatgacagaaaatgtggtggtgcatgtctataatcccagctactctggaggctgaggcacaagatcactggaacccaggaggtggaggttgcagtgagccgagatcatgccactgcactccagcctgggtgacagagtgaggctttttattgacatatcaaaagaaaataaaagatgatagaaaagccattgttggt

SEQ ID NO: 127775 - DNA, 1043 bp, Homo sapiens
cgtaggagatgacatcaaggaggaagaaaagataaaaaggaagcaagacagttccatgcacagaccagtcagctacagtgaagcatcctgcaaactggcaaactgattatcagcagtggctgtcaccaggctctgccccagcaggtgagagttgctacctgccaatttgtttagacaccttgtttgttattagattaaggttttgaatacatctgatccaagagaatggggcataatcatatttaatgtggatttggccagacctcagactacatagctggaagattatgtctattcattgcctaagtgagtttagcattgttttaaaacattctctgatggactcatcactatcataatctgttttctttttttttttttttttttttcaaagtggtatgtggtttcagtgtcgtcgtgaagactctgtggctttttagccaaatcatcttaatgccaatctcttactacttgtgaaaccttggataaatgacttaatctcttgtctcagtttcctcctctataaaatggggatagcaatagaacctacttgatagcatttttgtgagtaaagcactttgaagagtgcttggcacatggtaaatgctgtaggcattagctagactgctattactgtgattattgttattgctgtagttattattacacatatgttattacaccaaacttaaattggtcaccattatcctcttagcatcaaatgacagatgaacaagagcatttacttttagattcctggcactttgcctatgagtgttgtcatttttatcagccataaaataacttatgagtttaataaaatatcgtatgccatagtagccaggcatttagagaatacttgggaggaagtgcagcagaagcagcaatggtgatagtctgggcttctatcacagggtgggacagaccttggagatatgctgtctcctctgtacttgatctttcatgtgccatccggagtcttccctcttgctcaaaggcctgggtcagtgcatccttagtggctcagtttgaatggggatttc

SEQ ID NO: 127776 - DNA, 2838 bp, Homo sapiens
caggagatcgagaccatcctggctaaaacagtgaaaccccgtctctactaaaaatacaaaaaattagccgggcgtagtggcgggcgcctgtagtcccagctacttgggaggctgaggcaggagaatggcgtgaacccgggaggcggagcttgcagtgagccgagatcccgccactgcactccagcctgggcgacagagtgagactctgtctcagaaaaaaaaaaaaaaaaagttggtagttgcagatacaaaatgctactgcatgagatctgtccagtagcctcaactatttttaatatgcagtcagagagacagaaatgtatttcagggcagctgctaccaatttctttttttttgttttgttttgttttgacatgatactttttgccagatactgttcttttctatagagtaatcctaaatcagaaaaccatgtcatgatatcaggcttaattttaacagccagaaaaaaaaaatcgccaccaagatataaaacattttacaaaatgaatgagggaagagattttgagcacagtattggtaaagtagagttcaaggggtgagagatgtgatacaccacaccgtccccacggaaaaacagcaatacaaaatgaactgtatcattttttactgacttgttctgttggtgattgaggcatttcagtgcacaaccaggaaaataataggttactttcacaatggtagaagtttaacaaatgctcaattattcaccctacatcatcgctgtcattggtgagagttttactgtatgatattgatgcctggcttctttcttattgctgtattcttttcagattcaatctgtctgcaatgggccactaaacatttcaatttgctacctgtggagctggattgcaatgctcagactgaaatgagaaaaatggatttagtgaaactcaaaatagagagagtttcatggatttttgtggaaggatgcacaaactgaaacccactgataaaaatacacacgatcacttttgagtgtctcataaaagtacatggtattaagcaattcatggatgtttttagggaaaatagactcagtgagatggagactgacaagactcccaacacttaggggaactcagactctgtcaatctggggtgtagttgtgtatactcagtgccattatcatagtccttgaatacagtatttgtaaagccgtacttgtttaggtgcacttaagagagctgagctagcaaagaacaggataaagtccaaattattttctggccaaccctagcatttagttttttcctagcaggaatcatttaggagatttcctggttgggagagagggttcatttcatatgggtgcctcttattattgtcatttcctgactgttgcccatagttcttgactgactgtagtactcactgtcttaccatgccttcctgtttatttatttatttatgcccattttggatttatttttctctttgactatcaagatgctctaaaagtttccccacattgcctaaatttgagctccatgaaataaagtggatttgacaaacatcaagaacattcagaagtacttgatagaaaatgcaagtattaagaattagaggcttaaaaaagactgaagtaccacagtaaggtgttacttcaagcccactaggatggctgtaacataagaatgcaaaataacaagtcttgccaggacattaaaaaattggagccctctggccggacgcagtggctcacgcctgtaatcccagcactctgggaggccgaggtgggcaaatcacctgatgttgggagttcaagagtagcctgaccaacatggagaaactccatctctactaaaaatacgaaattagctgggcatggtggtacatgcctgtaatcccagctactcaggaggctgaggcaggagaatcacttgaacccaggaggcagaggttgcggtgagctgagattgcaccattgcactccagcctgggcaacaagaatgaaactctgtctcaaaaaaaaaaaaaaaaaaaaaaaaaaaaaaaaaatggagcgctcctacactgctggtaggaatacaaaagggttccaccatgatgcatgatggcaggtttggccgtgcctcaaaaaattaaacatagaattagcatataatttcactattcactcctagatatatataccaaaaataaaaatttaaaaagggactcaaacaagtacatatacacacacattaataaagctctattcacaatagctgaaagatagaaatagcccaaatagccgtcagcaaatatatggataaacaaattaatggtatatccatatagtggagtattattcagtgataaaaaggaatgaactaccaatacatgctacaacacggatacacctccaaaccattatactaagtgaaaaaggccaggccccaaaggccatatattatatggttcaatctatatgaatatccagaatggataattttatagaaacagaatgcagattgatggttgccaggggctagggaaaggggacaattgggaggaagtgcttactggataagggctcttactttggagtgacggaaatgttttggaaatagagagaggtggtgatagcaaaatatttattgtactaggtgcccctgaactgttcattttaatatggctaattttgtattatatgaaattcaccttaataagttattcctgaggaaaaaaaatagctaagaattcttatctgggaagacaaagtaaagggttaataaagacaagtcctcatatgcagtaggttttataagaataaccaactcatctcctcttctacagagttgcctaagtaagaaaagataatttatagt

SEQ ID NO: 127777 - DNA, 1941 bp, Homo sapiens
gaacctactctgtgggtttgagtttccctggtattccgccttaccacagggcaagaatgaggaagcattcttattggtggggaatacagaggctacttaggaccaagcagttcaatttagggccccagctgcctagagaagttgtctgagaatgtcagctgctttcctagtacttagatgcctttagactgatgtgaattggcagttttctctttttagagaagccaccagtgctgaggagaactgatttgggaggaaagtgttcacctacccaagccagcccattgtccaggcaacactgggtcagctctggggtcactatcagataatcctgcttcttgcactaccgaggttaagaatttgcaccctagaagacttcaattcaaatccctgcttccccactcactggctatgtaacctgaggcccttaatgtctctaggccttagtattgtaaaatatgaagttgggatagtaatagttcatttttcctgggattgtagtgaggattaaataaaatagccatgtaacacatggtgaatgtttagtaaacattagctgaaaaggaaggatcctctgagaaagcgagtggtgagaacatttttatgggcatagccatgctcagggatagtgggtggacccactttcccagtcttgttagggaaagggctcattctagggagaatagactggatttgtggagggcccttaatgtaagaccaaagagtcctcttccagtccatttggagccattcgtgattttcacgtcgaaccatgtgagatggtttggctgtgtccccacccaaatctcatcttgaattgtaactcccacaattcctatgttttgtgggagggacctagtaggaggtaattgaatcatgggggcaggtctttctcatgctgttctctcagtagtgaataagtgtcacaagatccaatggttttaaaaagagcagtttccctgcacaaactttctctctttgccttctgccatccacgtaagatgtgacttgctcctccttgccttccaccatggttgtgagacctccccagccatgagaaactgtaagtccattaagcctcttttgtaaattgcccagtcttggttatgtctttattagcagcatgaaaacgaactaatacactatgacacatagaagaatttttaggaaaaatagtgtggtggtaggcattccacatagattggaaagtaaacaaattaaaagcaggaagaccttttaggctagaagtaatttattttccaggaagccatggatttgagttttttgaacttcgacttccatctagtctgccatcagccttcattcctttcattaagcccttagttgcagtgtgcctcagacctttgtctgtctgctgctcttcatcattgtgtgcatggtttgaggcttagcattgcaaaaaagagttaagaagtaatcaagattattttaataaggcatagtgacaaaaacaacataaatggcatttctctgaagtgagttttggtgatttctcattaaattgaattggcagaaactcagaaacaatactttctcatttcaagaaatagtaattgtttttaatgtagcgagccagagttctataaaagattgcagtgtcttgttcaacattctgttttctaaccccgtctagcataatgcttgtaagaaactaacttctcaggaaaggatggatggatggatggatggatggatgaattgaaggtatgcaaaggagttcagattcattggaccttatcccactgattgtgattgattatatatgattgtctaatatgttctcaccatcgccacgtttggctgtggacctcttggggcaaggtctgtgtctgtttttctcactgtattaccagttcctatctcgttaactagaatagtctttcattaagtgggtaagtgaatctacccctgaaataatgc

SEQ ID NO: 127778 - DNA, 1078 bp, Homo sapiens
ctttatgatttcttgctaaataggctttgccctgtatcccatttgggacttggacgcctgaaaactgttctttcattgcaatgaaatgttggaaatctattgataatgcactttgattttgagagtgttaagacataaaaccagagaaaactggtatctctggccacacatactcagctactttacctgagttcattacattcttgttacctttgcatttatctagagtacagtctctttaaatggagaaaatagttaatgtctttctcctttagaaatcaagattctacagaatgagaaatgctaaggaagcaatatttttttttccacagggaaagggaaactggctattgttaaaccctgcctttggcaattgcatgtctctatcagtagccaatttggaaatattgaaaccctgtctttggtgtaatacaactggtgtagtaagcagaggtgataactgttacgtacttcaccttgaattttaggcattttaaaggtcattggggaagggaaaataatccattaatttttactagagtgttcatgtaagtgtcttctgctgtgaaaatcaatgtaaaatttcactgccattcaaaatgcaaagtggtgtataatatcactactccaaactgccctaaattgttgcatttttaaacaagcaggttttgagttatgcccttacctcgtaaattcagcttcacagattggattattgccatgtggatgtagtagcaggaaaaataaatttgtgtcagtctgaattctacttgtgcatttattaaactactcttaaccttttcttaggtcagtgatcatcatacagatttgcttttatatgccttagagaaaaattcctctatgagtattatttatgagttaagtgttacttatccatttacattagtaatcttaaattatttacctgctttggaattcatatgttacaaatttgccagatgaaagctgccagatgagtgaatatatttgtgctacatgtctgttgctcattaaagtagctggtttgggattcacagcaaaaataaaaagtgttacaaggggtagaaaagaggggaga

SEQ ID NO: 127779 - DNA, 1084 bp, Homo sapiens
ccaactgagaatattatcttgatctactaaataaatagattttatttccataatgacttatttagaattaaaagcgaagccctgagttatatatatattaaaaaaacttacatgcatttgctagtcaggccagtttaacttatgtgagagccaaaaatcttacataattattaacagtttaatgatgatagattattgattataattaaacctaggctgtcagactaatcaatggtaagtttagtcttaggccttgagttgctaggtcagatctggttttcccaggctgatatttcaaaagtcttacagtcttcttttgttgagaatccttcacttttccagttactccaaaggagacctcagtcagaccaaagtttgatggaggtcaagttaaaatttaaaccatatctggaagcaaggtcagtgcagcaaaggcacattctaaagcattacttcatataccttaattcttccggaaactcgtttgctgggtgttttcattcataagttcatttactcagcactcattcaacaaatattttttatttttttcaacagatatttattgagcatctactgtgtacattatattgttctaggctctggagttatattagtgacaaaacagaaaaaaattttgttcttttggaacttgcagggaaatacagatattaataatatcatatctattattttattaatgaatcataagatacagataatagatcatttggtgacaagcaccatgaaggtaaagtggactgaagggctcattaagaaagggatctctgaaggtgatatttgagcagaggccaaaagaaatatgggaacggttcatgcagttatttggagacagatgttctagcaagagggaacagcaagtacaaagtacctgaaagaagcatgtgcttggcatttggaggaactgtgaggggactggtaggattagaacacaatgagtgagaagtgaagggagatgaggtcagagaagtggtgtggaattggggatgaagggtgatcacatcataagccatagcaaagatgtttacattgaattaaaaagctattggaaggtttagcgaag

SEQ ID NO: 127780 - DNA, 1034 bp, Homo sapiens
gtgtcaagtaagacttcatcagtacttatcaaatgctgcctggtacgtaataggcacacgtatgtgtgctgagtcaatgaataactgggtacgtgctattctatactgacttctgttgagttctaatgtacaacacccccttaccccattcagaggcctttaatggctccccattgccaactccttgaccaggaatttgtattttaatatatgactgagttgaactgcaacacctcttcataggcctccaataggctctgcaattttgcatttctttatttactcattctatgcaaattccttcatgtgtgaaatgccattctgtccttctttgcctcttgaaatcttatccctctactaggagccctttcaaatgccctctcctaaatgagtacttccccttccctccacttctcttctaacctgtccttaaacccttgtcatggctctactgacatgcatcccactttccatttggttccagttgttcattttgttttgcacatgatattctaggatccctgtgagcaggtgcatgacaccatagtggaatgattgtgaacatggagaatggtataaacagacctgttttcaaatactagttttttatttacgaacctgtgactttcctaagtaacctaaactcctgaaggctccatttcttcacttgtaaatgaagacaaataaggcgtcatggaattagttgagatagttccattaaatttattcaaatattgcacttattgcctgtcagattcaagctaaattttttcaatttaaataatttatttttaatagattgtcaatctgtttttgttattgatctaagcactatacagtgattatatactttaagtaagtgaatgtcaagctagtgttaacagatagctattgccagcataagaatattccctgcctacccaaaaatatcggaaagaaataagaccagccacttataagagaaggtgccaatgcaatggctaatctttatgagaaagaagaaactttacagcacattttgagtaacttagtgc

SEQ ID NO: 127781 - DNA, 1050 bp, Homo sapiens
ttacagttgaatttctttcttttttatttttcattttacactccttgttaaaattcttttaaatcattgccgacttggcagtttattgccttgataacagcaaatgagtatctgattcttcctttaccccaaattgccacttttcttgttgatcagcagcatcactgagtgaaaaccagcaacagccgaagtcaatatttataactttatcattagaccttaaaatcttatgttagaaatttatggtagtgcatcaggtggagagagaaagttccatgggaagctaaacctctgcttaaaggctttgtgaaacttgactagtaagaagcatagttgctgtttcatgaaagtaactatttgctagggagccatcttgaaaggattatttctgtgacactatgtactggggaaatttttattgagactttgtattgatgttgtcacataatgtttactgtagacagttttttatttcagaactgtagataacattgagagttatagactgtctcaagcttttctgaccatatcgaatgaatcaaagagtgtctttccttgttagatttaagttggattttctgtccttcccttggaaaatggttgtatttgctggtaatttgtcttcatatttagtgtaaacttcccttacttcattgccatctagctatttgtaatttacagtatgtgccactataacatgatgtaaaattcatctattctgtaaacttcttttgggctcttaccccatttcattattagttggccaatagcattaacaagaaggacttctatgtacaagtcattatactgagaccttgaaggttttctagcccagacactccaacacatgatcttttctctagcatcccttcatcttgaattttgtccaccctaacatactgttagtaatacagaactctccaccttttgaggaaacccattccatctctcaatgaaattagctattagaaagccttcctttaatgcaaaacgcagtctcctcccaggaggattatttctgtgacagtatatactgggggaaatttccat

SEQ ID NO: 127782 - DNA, 1751 bp, Homo sapiens
tgtcagctcagttcactgcatattagggagcaatgaaaaggcctcattgtgcctcctgtgattgaaatgatattatctggcatgactggaagggagtgcttacttacagaataacttctttggtcttttcaaagatggtaagacttctcaagctttcttgttattttatttttagttagttatagatttttcttttagagtatttttcaaacttccttattttgatggtaactttttaaaaagtattgaaatagtcataatcagcttttatatttctccttttctaaatgcttccatgtattcaaaagatagattctctcctcactacagaaggctaagaaaacttccttttctaggtctacagtagtccagtctcttggtcaaaggtatacgatacattaaatctttatctggaaacctctcagaggaagataaagtaatcgacctttagaaattaaatgttatagcattcggataaataatcattggctattgttattacttttcttggatttaggtgaaggaaataaaagatgcaggcttttgaccaaattagagcatggctttaatttcctgttattccagcattgctactctttctaataaccacaaatcaaggatgacaaacaaacaaaaccgcacactagatcccaaaggcagctaaaacagcttcttagtgaccttctttctgacctacattgtacaaatgagatgattggaaacaggataataattgattgcaacaatatgacaatcttgttaaatgggcttaaaattacattctctacctggacagggaccttataggggagatcttagaggtaacaggatcctcatgtatggagcgttaggattaattgtttatgatggcactttactgaaatgttctaaattttcattatttctttctaacagattagtaagatggtattaatggtcctgccctatctgctgagcacagttcttaaaaaaacagctttctgatataacgaaagtcaacttggtgagctaccagctgttttagatttggcagatttcacattcgctttgggatgcctgtttggatatgtttataaagtcattaatcttctgtctctcctctcttcctgccttccttcctctattacttgctgaattctggacatacagcaaagtgtaagatgaatctctgtcctcatggagcttacaatccaaagcatattgaaagaagagttcaaaaataccaacattgaatatcaaactatttgaaattatgtgctatattggttttatttttcaattttgtatggattaacttgcaataacagataaacacaagtatggtgcactttggtaattttttggtgaatgctgtggaagacaggcctttagtaaggttaaatattctactttcctctattagatctcatttgacttcacaagattcacttgataatagttacaaagtaaatccagttcttcaaatggaagataggatttaggtattttttactttagattttacttaaaactatagattacatttaaataagcagcatatttcacagagattttcaaaaatattagatttcaccctaatttatgttttgcacaatatttcaatgaaaatttgatgtggttgttaatgttttattccttttgatcattgcaataaaataataaaatgtaacatcagatttactgttttaaccatttaagtgtatgattcagtgacattaaatacattcacattgttaaacaaccatgaacac

SEQ ID NO: 127783 - DNA, 1268 bp, Homo sapiens
tgtcattacacttgacacgtctaggtgtcactctttaattttcattctccctgaactttaatttttacaagtctatggtaactttctcttcagtgtttgtaactaccacatttctatagaaatcttagggtgatctattgagattcttcacccttcatttctaattcctcatgatactatgcaagtgacaaaaaggtggcttgtgacagagaaatatgatatttaaataaaatccttagaatcaaaaaagtgcctaagttaacaactttttaaaagggctattttaccaactccataattgacattctgtcactgctcagactttatttcattcctgctcaactcaatatatggatttttatacaaaccatttaccaaccactagacaatagcgcctctggcagatcaaatttgtacaggtaagttgtttgttatccacaggagagcttcattgtatccttgggacagcttccgttagcagcccagagtgagagttggtgacactcaaaaactcaaattattgatgagaacatcccaagtactaggaagaatttaaaattaaaccttttaagcctgtgcagtcattatcacattaagcagggagatggtgatgggtcataaattggttttccattttacttaaacaggacctggcagaatgtaaatggaacctttgaagttcacttatctcatgataattcttcactttttttttttttcgagatggttatgaggttgaaactttagatctctaattgtttctgttagattccatttattggaaaaattatatttcgaggatttttcccccggtttctgtatgccttccagaaacccagggacttcttgaaattctagttttcctgtacaggttgaatctccctgattttgaattagaaaattcaaaatctgaaatgctccaagtttgacactttttgagcactgacatgacattcaaaggaaatgctcatttggagtattttggatcttggatttctggattagatatgctgaactggtaagaatatgtgatacaaatattttaaaacctgaaaaaaatccaaaatccaaaacacttctgatcccaagcgttttggataagagatactcaacctgtatcggtttcatgcaactttttgaaatattagagatttaacaagtcatgactcacttcattgtctgtatatcgtaaatgttaaaggccaggcacggtggctcacgcctgtaatcccagcactttgggaggctgaggcgggtggatcataggg

SEQ ID NO: 127784 - DNA, 1342 bp, Homo sapiens
cccgagtagctgggattgtaggtgcaccccatcatgccaggctagtttttgtgtttttagtagagacaggatttcaccacgtgggtcagactggtctcggacccctgacctcaagtgatcctcctgcttcggcctcccaaagtgctgggattacaggcgtgagccaccagtgccgagccctgcttgattattaaatccaaattgtcctcctgctatcttaaaagaaatgaaatttctcagtagtagcaaacaatgtcaatctatttgagaccattaatgactcatttataatgtcaacagtcacatgaaggctagaaaaattaaatgtgtagcctcattacctttgtggttagcatttcttggaaatagcatggtgcttacttagtgcaacattgtaaaagacaagaagaattcctttggagaagagctttatagttgagaatgtggataatggaataacaaaatgataacttcttactctttgagctgcattctacgagacattctttgtgattagctatcagactctgcatgtatgaagaagctcagttgttccagtcattgtgacctgtttttcatagataattttgacatgtatttttggagttttgaaaacatcatttttagggaatatgatttaaaatatttttaaagtagtaattattagaaattatctaaactattagcttcttctaatttgaagataatgttacatctccaaggatactgcagaaaggagcttgggtaccatgtgaaccagcatgcctgtaagtttcctatcaactccaagttgtgttggtacttccgttctgttcaaatggttatcagcacctgaaatgaatatgctctagattagtcttcctttttatatatagaatacacttataaaatagatggattactttaacagtttgtagctgtgaagagagcgaaaccaacctgcacaatggagactgaaacataacttgagacccaaagtgtactcttagctataaaatgtaatataaatgtaaattatttgttgtggttcaagaccttatactcttacttctggtgccttttatgaattcccaccatggtataggactatactttttctaatagaacaacaaaagacattttatgaaaggatggcattgaagtttatcgtgacatctacctaccttacagaagcacatgtagaggggtttgtgtgtgtgtgtgtgtgtgtgtgtgtgtgtgtgtgtgtgtataaaaagagatttgtttcaggaacttgacctcgtttaattgtgggatctggctaaacagtctctgtaagatttttgtcttctcaactcatgctggagcttgaagttcacaa

SEQ ID NO: 127785 - DNA, 1054 bp, Homo sapiens
ggggctgagagtcctatagcatggctcattgtttttaagggtaaaggattctaatgtagcaaaattaagagtaaagaaatgaagatattagaggaaatttctttgaaaatttcatcatcaatttatggcatccagttttgtaatatttcatattataatgtagtttgattcgatgagttaactttagcaagcagaaagatactacaagcatgataatagtaatacttgctaccctcatagaactatatgaaataaaattctactgagtgtaaaaaaataatgttagaacttgacaggaagacttgatatgcattagcttgtgcactggaagcaacaagtaagcatatgaccctttgaaaactgtaggaccataaaattcccaatttttcacacattttatatatgagtctgcatgaatgttagcatgtacattaatactaagacctgtcccttaaacttcaggttcttgatcttttattacctgctgggatggcagaattgcttcataaatgtagtccatcttcatttacatagtgacactgctcaggagagtctctgttaaaaaaattatctggaaacactccaacactgttgggcagtttcatagtttgctggttgtctttcattagatgtaatctaaccttctttcccacgatgacaatataaaatgcttcagaaacacacatctcagcaaattgcttttcctcatgacaattatttgtccttctaattaacactattcagaatgagatattttctgagaaacaaagtcccctttctcactcccccttataataataattgcatctacttgtatacagagagtttacatatgtcatttaatgtgatcctctaggaatgatggccccattagatagtaggcataggttctcatgggaatgatgaccctgttcgatgagtaggcagatattaacatcctcacattagaattcaggaaaggaagacactgagatttggaggtataatagctagagtggtttctgtctgttacagtgagaccctatttgccacttttagtcagtttcctgttact

SEQ ID NO: 127786 - DNA, 1944 bp, Homo sapiens
aaagaggaacaaagaaaaagattgtttttgcttttcccaactgccctctggtggcaaaggcacaacagacagcaaagacgtttaacaaagattcttgctgtgtaggtgctgctggtggttcttaagaggctcttaaaccaaagtctgtactgtacatgtgtgcttctgaaaaagaagaacagaatattgggtctcataattatattttacttcccagcggcatctgttcttatcatagtagcaccaggctctactagctcagtcaatacttgtatattaacaagagacaatcgatagaaaaattaaaaggaaaagtcaaggtaattaggctaaagctgctgcttatgggttttcaataattactttagcttcctcttgttttcccatctccagaaaaatagggcctgattgaaggccctgattgaagggcctgggtcgtgtttgactgaggacatgtcaaaattatacaaagccaagcaggaaataaaattaagctgtatttgttttagagcagtaaaaggggctttgcatgatggcatgggaagaatagatgttgatttaaatgtaccccttagcagctgtgccattgttggtacctgtttcatgtcatcagtttctgtactactggcagtagcccactcaaaagcactatgacatgtcatgtattaaattaaagctccagaggaagatagcgaatggatttctccccaaaacatcaggatatgtttggaaactagatgccatcctttatgaaaccatgaaattagtcaaaacccccccatggttgccattgtgggccatacttgggccattgttctttatggacataattgctagagatcactgtccatttagtgaggcttaatcaacaagccacacacattgtgtgaaggagtctaatctttggttttgagctacttgggtgttttcgtgccctgatgctgtgaaatcttctaaatacatcagagccaccctgcttctcactgctgcttagtaggttggtgtgtctgcctcctaggggaaggagaaaaccagaggatttcctagttttggagagagaactctgaggaggaaggataggctactgagagagagatttcattttttatgttcatttacagtcttcatttgcactatttctgtcagctcaaagtactttataaactttacaaccaaattatgtaccaacatcatttcattcattgctgatatatagctgttaaacatctgccaggtacacatttcctggaggcaaaaaaaaaaaatgtggaagagaattagatcttgttaaatgttcagagaaaatgtagatatggggcatattatatgaagatatttattgagcacctatgtacaaggcattatagaagacatcttaggtacaggaaatatagcaaactcttaactctgcccctcatcaccgctgcccccttgaacctcccctccttccctcctaagtttgttaatcaaaagtgagtaatagagccaggatttgaatccaggagagtctgatttaaaagcacaaacctttcattacgatttttacttgatgtttaaaagaaagcctctctaggggaagaagaaatgtacgaagctggtattaactcagtgaacccaaaatctaactgatgatagagttgttggtttgggagagtgagatagaagagtattgaattaaatgtacatgcccaaaggcattgaaaagttaagatgaggaagcacagatagtactagagctttgatgagaactgttgttaattatttttaatgccacaaatggctttatattattccaccactggttaagcttgcatgtgtgaatccctgctgtctgtaaaacctccagcaagtaaaacctttgctgattggtgacttggctctgtcatttttataagactgtaccgaggctcgcagaaaatgcttgattctatacaccctttagct

SEQ ID NO: 127787 - DNA, 1028 bp, Homo sapiens
atttttgaaagttcactttttctcccctttcttgatcctttttatttaatcattcccaggaaaggttctttctactgctctgccttttttcttttatttttgttgcttccattgtcactccatattttttgtctttaccgttttgattttcaccctatagaaagtttgtgtgccaaataccaaataagaatgatgggatattatgcaagcactaaggcagtagagtgtagttatgtaataagagcttacactcgagtacagctgcctggtttgaatctcaactgttcttttaattaattatataatctttagtaagttctttaaacttactgtctaattttatctataaaatgagaattatagaagtatctatcttctagcattgttatcaatattaaatgactaacatataggaagtattttgtacacagtgttctataaataaatgttaacctatttaataacaaaaacttattaaattatgtctgtaaggtatgtgtaatgatacagaaaatgttcatgagagaactttaagaaacaggatataaagtgacgtgatcacagctattaaaacaagcatttaaacatttttgaaaagactggaataaaataggacaaaatattaattatggtttattttagaactattgcctcctgttactctttttttttttttttttttcctgtttgggttacttatcacaatccacagttatagtattggtctatttagttggttttgatggtctctccttctagcatgtatgttttaaatgagaaaggactcaagtcaatctttttctaccattatatattgtgtctaatgccaagtgtctggcacaagacttctcttcaataagtacgtgttaagtgaatatgtttacctcttacttttctgtgtttttcagtcatattaacagaaaatccctgttacaacattttttaaaaaggctatttttaaaacattagctcagctttgttaaaggcttaaaataggtaaccttaaaagtattaccctatagttcatg

SEQ ID NO: 127788 - DNA, 2314 bp, Homo sapiens
tcgttactttgctagttaaatgttaccttaaagccttattgtaggtgaggaaatatccctttttttaattccaaaaattgtagcatgattaatgaactcacagattcctttagtggtttactctgtgttaattatcccagtgccagagtttctacctagtatgctttgactcactgggccacagtgcatttctgcctaaggctgggttacatgtaacttacctgcagatatgccagtgagaggaatacgtgtttctttgccagagactttgctttccagtaaaacttggccttggcattcgttgttgaggttcataaggttttctgttagctctgtaattcagtgctcatttttaaagatgaaacttcagtgaaataggattgtaacgatacacacaggttcatacagagaaaattcaaacagaatgcagaaaccttctcatctgttactaaaaaatttcaaagccagagatgcagcccatctttctcgtgattcctcattcaactgccagactgacagcaggaaattctaccatgatccttatgagtcagggcagcgttttctcttttctaaagagggtctcactgaaggactttagagaaagcaaaaacaggagatgagagaaagagagaaggaaataacttgaggaaagtcagaggttcagactggtgtttattgactgggtaatactagtagtacaactacacctggggaatgttaggaattaggtccagacaaaaggtatgttgtttgaagcagcacttagaaaaacatccacttctctgaatctttggttgaagtgacgtaattagatgtgcataatgaatcttccagtagcattttgttactctgaaggtctgagacttttctgagcccttaactccaagttggtagtatcttcagttttctgaaataccatgctattattgctctatattaagatctgttgtttaatataatattggaaagtattgcagcgaacacacctaaaagtaattactattgaaagtaatgtagtccagaataaagacaactgtacgctgagtagaaggaataaatggtacaggttgaatttttcttatggcagtggtagtactgttggggatggtggtcactatcactgttattttatttttcttacagggaataaacttggcatgtttaacttgtggttagaacgccaagaagactaatattatagtatatagtaacatttatttaaaatcacactagaaatagtcatagaaattgatatgctgtatcaaatgaaataatttgtgaattgattttgaaatgcgtgtacattgaagtgtatgttggtaaaatgatgatggtgatgtacctttctgaccttggtgtattcatttacccttgtcaaaaaataaaggtgatttgagctgttttgctcctcagaggatccaactgaccatataacctgacttcctagccactctgttgctccccgctccttcatccccacgccaacataactgctcctattctgagacagtgttttaaatctgtattattcagcaagaaaaacacaacagtcagggagaatatcaattattttcttgcctatccgtaccatcacataattgcaacatctacatcctgatcgaagatttggtctttcagattcagaatgtctcattagctttttgctccctgtctcatactgaaaaaggagaatctaaacagtcacaaagactagcagaccagtagattttctcttcccgggggcatatacctaaatctttgtgctagaccagccctatttgcagatctaagagctgctggtgtattatgaccagagacactgcaaagcctgtattgcccccagatttttgttttcactgatcaattattgacctgtcatctttctacctggcctaagatttctaccatgatagttaatactttggcttagacaatgaacctgaggattttttttcaagaatgatacagttttgaagaaagaccttagatcttagaactctacagtgacccttcttcactaacacactgtatcagtaatctaggagagtatgagctaggcaggtttcaacatggggaaagtgaagcctatcaatcaatgagccccagggatgagaggaaccacatgaaggcccagattgcctaggcattgcagagttgcactggggtccccaaaattactcccaggtttggagattcactagaaggacttatggaaccttagcatgtaattttatttatggctatgatttattacagtgaggtagtaaggttactcaactggataacaaggggaaaaagcacaggtgttgaggtc

SEQ ID NO: 127789 - DNA, 1030 bp, Homo sapiens
aagggacttgtcacctggtcacgtcagcaactctctcactagcataaaccaaaatttcagacttccagaaggaaatcaggtatttggcataaaccatgttatttgcacagtctagcataggaaactacccttatcagtcagggaaaggtaagctcacttccaaaaccctagttcccaaatgctactccaaggccaaccttgcagacaggcccttcttaagatagcagcctcagactgcacaaagataagtacttggcttcaaggatttcagtggataggcaacatgtaaaaataggctcaggagcctggacagttgctgcctgttttcatacatgagagataaatacttttgtgcttgcattcgtacatataactcactattagtaatctaagggaacttcattacttggaaattaaattcaggagatttaggtgccctgctcttttgtttgagaatcactgccctctgtgataggcttttcactggagcctgaagggatgatggaaaggagagatattcccccagatggcctactttacaattttatccatatctctgggtcctgatggatggtggcccatatttaaaagctttccgcataatcagaatgaagaactctaaaaatgtgacttaattgttttgagtctttttttttgagccagagtctcactctgtctctcattgtggagtgcagcagcatgatctcggctcattgcaacctctacctcccaggttcaagtgattctcatatctcagcctccggagtagctgagactacaggggcgcaccaccacactcagataattttttgtatttttaatagagatggggtttcgccatgttggccaggctggtcttcaactcctgacctcaggtgatccacccactttggcctcctaaagtgctgggattacaggcatgagccaccaggcctggcctgttttgagcttgttcaatctatgtcataagtaaacctaatcttgttaaacttcaaaggaataatattgtgtctaaaatttcaattcaagc

SEQ ID NO: 127790 - DNA, 1050 bp, Homo sapiens
ttttggagaagataaagtttcctgaaatacaagaatcacaccacttggacagacgttgtttgtatttcacgcccacacaagtgtgttagtgtggagaaggaccattttggaagaaagtactttttcctctgaactggtttcctgaatccttttgagtttcatgttttatggaagaccatcaaaatatttggaaggccagcttatttcatggtcacaaaggcagctttaattgcttgcataaagttggagcttgtctttctccttttccaacaaagtgacatttattagcaattctctggtagttatttgtaattgcactagtattcaccattcccaaatgttacaattaaatcatttgagagtctagtcacatttctaagcagatgtaccaaattacagctcaagacttctgcttgaaatctacaaatccaattagtaaaattttggggctgggaagggttagccagggaaagacctgagaaaacacatagcccaaaatagtttgaaatttccttgctgctttgcctccacccaaagttgatttgtcagcatgtaagggggtgttacatcttttcagaaactgcttggttttcttttcattcaagtttaattggttttcatggactgaattgaagcaggaaggcataagttaggtagatgatgtaagtgagcaaatctccatgtatagcagcatcttgatttgggtgtttgttctttgttgttcttttatttctgtcaaaaccacagcttcatatatagctctttttgtcacatgagtttttacgttgtcttaaaactgtgaaacagttacatctagttttcctttttatcttgattcaagagcccttgaaactatccttttacatactattttttttcacttggaacggctactctattatattctctgaattttctaatttattttcttcaagaccagcattagccaggtgttgtgacccatacttataatttcagaactttgggaggccaaggtgggagaatcgctagaggccaggagtttgagaccagcctgcacaacatagtgag

SEQ ID NO: 127791 - DNA, 1050 bp, Homo sapiens
gctttggcaacagacctagggctagactatgttgcctggaagataaagaagcattcactgctcttcccatcccactgtattgcctggctagtgtttgatcagcttttcaatgtgcggtcaagttgttgattgagctagtaacttataagtgaattatctttatgattgtgttcatttctaaccatgtccctgtgcagtttacgaacaatactaatcataagcaaatactttcacctgggcccaatgatttttacctgtactgaccaagtgaacaacttaggctggcttatgccagtgaagtggtgcttctccctcctgacatgagacttcactgaagtgacttgccaagaagaaatgagaagatggcacgtggagagtcatgtggatgctcttctctgcctcaagctcagctctcacgtgcttgatctgttctgtctgtgtcctttaatataaatgtttaaatgtttaaatgtcattgggtacttggttataggaggaggcagagctctgagtggaatccatgatggtcctgagaccagagatatgtatttttttcttttcatgtatgtatgtcttatatccccaattgagaattctatcactgtgagtgatacagcttcagaatcctgaaggctaagctattaggtttgaacaatatgaaattgctggtttgcaactatattatatctacaaaagggcaagttcatatagcttaacctaaaaagtaaaaatcaaatgacatcaggtatgtgcaaaaatgtcataaatggctggtgaatatataagaagttcaacattactaagagccaaaaattgaaaattaaaataagaaaccttttttttacttcatcaaatagtaaaccaacaattagtcctatactttcctggtttgagcattgattaatacaaccagtaagtatgcaaatatttaaactcagtgtttttcactgatagatatttatatcaaggtgctagattgatatgcatataaatatttttgcacaaatatgttcacaatttgtttataacagcagaaaatggaaaacaaac

SEQ ID NO: 127792 - DNA, 1020 bp, Homo sapiens
gaggtgcttaagattgatcaagcttttgctcatctggagaatgatgatgtctgttatacatatgtacagatctttgttctctttgacatctggaaggtggtgggaaggagcaaattcaaaatacaaagactggttttaagccccagttgtgccacttattagttaggtgatcccaaacaagttacttaacctctgcaatctcaattaccacatcattaaatacagatatgaatcgctaggtaactacagttgtgaccatcagctaagttaaaatgtgagaaaatttctacaaccaatgaagtcctacatagaggtagataggacctctagtcctctatagaggtaggctgttgctgctatctttatgttatactgtttatgaaaataagttttcttttctgtaaagtaagcatacctttattccttagggagggtttacactttcattgaactggatattgcatctaatgaggattgctgtttttttctccttgatttcaggatttaacatttaaatgaaagtgatccctgcctgcctttggattgaatttatcactggtttagaataacatgtatgacacaaaatttaaaaagctgaatagctgattctttttgaatgcagagtagatcatattttcaaatggcttgttctcatttaaaaaacccaaggcgaatagaatacctataaggatggtaggcttgggaattgaaagctctatgtgtgtctccagatgtgccctgttaacatggacaaatcgtttatttcttgatcactaaaaccatcatagtttttgtatgtttaggataaaaataaaaagggagtgtggtattttaagatctttgtgtagcatagcattgtgatgttaaagtttatacttgggctcattttagaaatgacctaattaagtcttccttttttctgcattaatcgccttcctttgtattatgatctttcctataaggaagctagcagactgacccatcatttttctttcctcagtgttaaataagaatacatat

SEQ ID NO: 127793 - DNA, 1036 bp, Homo sapiens
ccataaaacgaaagtgaggatgatatctggtaaagttcagatggagctaaagaatcaaaatcaactgaacttttaccaggagtccttagtgaagtaattgattgcattctccaacgcccctccttcaataagatttctgttatttgttttcttttacttgaatatggcttttaggaggcttgtatttagagtttctgtgcttatgaaaaaagagatagctttataattactatgtaagaactatgaagtgggaaagaatacattggcaagacatattacaattactttgtcatgcatctggttatgttggcatatttgtttaattaaattccctgctaattataactgtatgtgcttgtgttaattattatttacctaacactggtaacagtgtaattctttaaaggaaagcaactcgctttctatttaaattaaacttcaatttaatatgcttcctaaaataataatagtgacatttcattagaatggtagttgaaaaatctttatctacctcagtggaatttggactggctaaaatttaacagagttgttttaatatcagattgtaattagggatcttaaagttagagtaaaatggttaacatggccaaaccaccagctgatgctgcacatggttcatctgctgaaggaaacattttcatcctttaaggaaaaccttgcctgcccttccaaacttcctgatcacctactatagaagagagagggaggaaattatacttgacaatgattctcaaagacctaattagaagtgggtctaatatattctctgaagcatttgtttaaaagtcaaattgcccaggtcacttggttatgatcactcacccagatacttagtatatgtgtaagctttttcagggttgcaaacctattcgagttaaaattgaactcccagtggagttgagtctttcccatttcattcacttcatcctctctgtttcaaaattcttctacctctacagatatcttcttcctctcaccctttgtcagacgctagatatttttaaatttcccttac

SEQ ID NO: 127794 - DNA, 2258 bp, Homo sapiens
attcactcacattaatgagtgcccactacatggtaggaactgtgctaggactagacacaaagacaaggcatagtccttcccgtgaaggagttcatagtctggtagacaacctctttgaactcttagattcagcaattctagattcggttaaagtagttttagggcaatatgcatggcataaatggaatgtgtaagtacctaggggatagaaagttgtgcttatccatgaactcatctgagaaggctttctttggtgatgatttgaacagtttgagccttgattgtcaggagcggaaatgaatcctcgtgtaaacaaaaacctctgcaagactatcaaggactaagacagaagactaagaaaccctggtaggaaacaacaaacatattgcttatcacatttatcctcttaaatgggaaagacggaactaggaagctggaaatgaggtagaaggaaagagaaaggaccagttgtttgatgatttgaaataaacattttttattatgaggaatatagatttttttaattaagaaaaagtgcaattcagaaagaatgctattgtccatcttgaagtctttattgtctcccccacaactcttccccagtgtcaactgcgaatgggcaatcaggctgctgtccaggagagagaggccctagggtatgtaaaatactgcagagaaatctactgtgtctacaacagcaactggttctctaggaacctaaaaatagtcaaaacttcttttcaagttcaaactgtcaccaagattagttaatgaaccttaattggcaaaatgaaaatgctgcgttattttttgagaaggattcttagttatcatatgaaatttgtatctggttcatagtaaagtgttatttattagccacactttaatgaattccctaaaatttgttgctgaatttaggagagatgttcagttcaattcaacactctttgagattgactatcatgtatcaggcactgtattaagtgcaagagtaaaaaggcatggcccttcttctcagagagcccatggtctagtgaaggagtcagatgagtaagtagataattatgaaatattgtggtaagtgctatggaagaaatctaaagaacaggttatagaaaagaggatgtcacatcagaggccacgacacttaaactgagtctttcagaatgaatgagaaattaggcagatgaagacagagggaaggatgtcctatgtgccgttaacgtgcaaatcacatacgcttggatgtctgatacttgggccggttaacttctctgaacatgactttccatatcttcattgagtgtttatcacaaaacattgtgagaattgcacgtgcaaatgcaggtaaagaggctactcaatcctggtgcatagtcatttacaaataagttggtttccaccatggcacacgtatgcctgtgtaacaaacccacacattctgtacttgtatccggaacttaaagtaaaataaaaaataaaaatacatagattgttttttttttaagtgttgaaagctgggctttcattgccaaagaaggcaaatgttggtgtttcatagcagctgaatttgccaaccacctacccagtggttaggctactaaagtggaaagtttcattcccaattaatgcaccatttttctcagagactttgaacagacatgtttttgatccatcaaatctttctgtcctggggttgtgtttggtttttattccaattctaaggtctgtctgaacacgctgtgccttgagccatgtagcacacagaaggacaaatgatttcttcttattattctttttattaacaattgaagggaatagttaacatttaagaaaaaaaaagactgacttgagagaaacttttggttattttctagtgagggaaaaaaagctctaaatgcagtatgtcaatcttgtttcctagataacaaagcaaatctaaaacagttttgaacttttttccttattccctttatcatgaatgtttaatatccaaaggagccaatttttgttgagaattagcttccaggtttggaggctattagcaatcaccacagggagcctcacactccagttctatttcccatcctttttcctgaatcagaatcattttctgtgtagttatagcaagtgcctcggttttgctagcctcatctgctgtttttaaatgtcagcctctgccaagctgaaacatcatgaaagtaatcaaattatgtattaggaaagagtagatcattgcttcaataaacttgccaaaa

SEQ ID NO: 127795 - DNA, 1066 bp, Homo sapiens
atcgttaaaaaagacatgacagttgttgctgtaaaccataatttgatgtcttatgataacacttaactagcttattggtggttttgtttgtaaacattgaaagtaagctttagccaatgcacacttaatcagatttgtattcagcaagtgtgcttttgctaatagtaagccagacattgtatcaggcatcagggtaaacatacatatacatatgtatatgtcccgaccttgaggaggtcatatctagctggggaaacttacaaattgtacataatccattatccacaattccaaattccaaaatgctctgagaaatgaaatttttaaaatatgtagactcatttagcctaattcctgaattcatatgaggccacattatatatagcctttgtttgtacctcttaatataatttttcatacatgtgtttgattatgaggtgctaccctaagctctcctggcattgttgcataatacatagtaaatgccctgaaaacctttctaaaatctgaactttttgaattctgaaatatatctggtcctaagagtttagcagaagggattgtggccatacatgaatggacatgttgtagcccagcaaaaggaatgatttacttcccatgattgagttaaagattcacagaagaggctgcaggcagtgaaactggaatttaccaaagttgttttggcagcctaggcagaactgaagttacagccaaagatatagacttatagagaatctggggagggtatacatggaagacaggactggaaaggcaagttggcaccagattatggaaggcctcccatgtcacaggagaatgcattctttttctatcaactgacaggctcttttctgatttccttcagcctcatttgctgttgtaccttgctttgttgcagtgtgtcatggatccatttggagaagctgatgagtcatcttgtgaaagaaaaaatgaattgaaggacattgcttactttctgtgttgattcaggcctcatttcatcttaaccccctagttagaggacatcagtaatgattcagtctctgcaactcattcctaaata

SEQ ID NO: 127796 - DNA, 1021 bp, Homo sapiens
cctcacatgggctgcatcagagatttttaaataaattgttacagtgttaattaggatttcatggtcaggctccattcctttaatagatacgatatgatttggccttctctgtatcttcaaataagcagtcctcaaacatccttatgatctctcctgctgccttagaagatttgagataatggagggatgatgaagcaatcatacaaaatctattgattcaccttggtgagtatcatttatacatcagtgagtaccttggttgcaaaattacctttggagtttaaatgtcattgcaaagttgtattggaaaggtaattttgttttggtaggccacagggttttgctttctgatactgtaaaatttatatctacttgccattttcatcatataagtgagaggtttaaatgctatgtatttaatgcccctgtctataaaaatgaggatttttttttaatggctttctcaatactactaactcttatttttgccgcagtgttgagaagtacggatttatgatactataaaatgcaaagaatagggtggaaagaaggaacacttcaaatatcacagaagctctgttccttgaaacttttcttacttcaagtaggcctttggatcattttggacatttcaattattgagttcttgatatttaggtcagaggacttatccttgagaggtgggacttgctgggtcagtgaggacttggagaaattttctgtagctagctagaggtttgtaaaatgcaccaatcagtgctctgtaaaaatgctccaatcggtgctctgtggctatctaggggtttgtaaaatgcaccaatcagtgctctgtaaaaacgcaccaatcagcgctctgtagctagctagagatttgtaaaatagaccaatcagcagcctgtaaaatggaccaatcagcacactgtaaaatggaccaatcagctctctgtaaaatggaccaatcagcaggacatgggcggggacaaataagggaataaacctggccaccccagccagcagcagc

SEQ ID NO: 127797 - DNA, 1040 bp, Homo sapiens
gtttcctttcttgggacaacttatgcatgtaatatattatattcctcatacccccatccttctgctcttaaagaataggaatcattagtttaaaaacgtctgttttaactatctttccattttcaatgataatattactaattatgttaataattctaatcaattaaaaatgccgcttaattttttaaaagagctttatcatttgattaacatataggcttctctttgctcatatttttttttctttatcatcatctcttactaggcaatggcgaagtagaaatgcttgtaatagtgcataacagttattgaactcttgtgattaagacttcaagagttcattaagaggacagaaaaatgcacctttgatatcttaatctgatcactctaattgagaaaatacaccttaataattattcagtaggtatattgacctgatcattcatttgccttctaatttggacccttggtcttggcccttctatctccatttagctaggtgatatatggagcaccctggacatcagtattcaggggatagagcacaggcctttcttcctctctggggtccgttcttcttgtgtgtggcgttgctggtgagctccatcagggagctgacagtccaggctagtcataatgatgctttcagatttctaaagagtctgtaattaaatgacatcactgagtcttaaatgcatctgctgtgaaagtcagaaggctaaattatcccattaaagagagaaaagtgttacttggtattacagaatcccaagtttattatgctgaggagttgcttcgggaaggctattgaaagccagttgagcatggaacatagtgggaagattgggaggctggaaggccatgtggttcagaacaggctgttcaagaatcacagctgcactcaggctaaagtttaaaaaaagaagccattaaaaaatttcttttgctttcccaaatgcaattaactgcttggctgctggtttttattcctaacagctgtgctgtttcgggccctccagaagatatctgcagctacatga

SEQ ID NO: 127798 - DNA, 1039 bp, Homo sapiens
agattactgcctcatagcaaaaggcgtctggagaaaggaacttctatttatcagcccaagtgcccctgccattggaataatacctgacaattatgttcttcgggtctgtttgcctacatgggtaatttctagaattaaagcactattaatttttcagttgccagttgtgatgcccccttttaaatattaaaaaaaaaatcggtatttgatcaaatctgagtattttcaatactcattttctttgacacttccatagaattcagaaatgtttttaattgattttttcttcccatgtgtgtctcatttactgtactgtatcataacttaggagttttatcttttgatgactttgtaatatagggatagagtgaaaagacaaggaggaagtgaggtgacttggacaaaaactaccacatattccctcctttttcactaagcacatacttactttctctaaattgcctggcttctttcatcatcagcccccaagaatgccattatttccagtcaccaaactgaggccagaggaagagatggaagacagaaatgggcacatgttttgtttttgtttttgttttttttgagacggagtctcgttcttttgcccaggctggagtgcagtggtgctatctcagctcactgcaagctctgtctcccgggttcatgccattctcctgcctcagcctcccaagtagctgggactacaggtgcccgccaccatgcccggctaattttttgtatttttaatagagatggggtttcaccataaccaggatggtcttgatctcctgacctcatgatccacctgccttggcctcccaaagtgctgggatcacaggcgtgagccactgtgtctggccagaaatggacacatgttttatttccttggtttcactttagaaactttgaaaaatattcttacttcatacttcaacttctttccagtataccaactatatcaataaagggttctatttggtaaataaaataaaccaatacaaaaaagcagaacttttaagcaaaagaggtacatttttgg

SEQ ID NO: 127799 - DNA, 1860 bp, Homo sapiens
cctgttgaccacataattagatgaaatatatattctcatgtaacaaacctgacgccagtagtgttaggcagctcctaagggagtcagaagctgcttccagcctcgtaaataatgagcacataactaacagaacctgatcttcccagcagaaataagtcagcctccttcacagtatgcaatatggtcaatgaatcagtggttgctgagtgaactgcacttcccccagctggaggagaaacaagcttttttaggagcgatagagcatgcaataggatgtagatgggaaaggaatctgatgaattgattttcactggaaaagtctcagagattcttcacctgagattgcttaatagtcctaaagctttaagctgctaatgagtctctgtccaacccactgggggcacttacatgttgctaagcactgagtaggctgaaacaaatcatggaaaatcatgcttccatttcctggagctgtgggggtgatgaccataacacctcaagttgcatcaaagtgatagaacttagacaactggctggaaatatgtggaagtaatttgctgctatcacaagttcacatgttaacattatttcacccaatttgtattttgtgggtgaccacatgcatttcatttgaaataattaggcaaattcgtcatataattcatttcctgttactagagctaggttgtccttctatttaagatttacaactagccagtacctgaaggcaacatgtgactgaaatattcttaagttccatgaaacaaacctttccagattgagatttgcaggtagagtttcatgctgcacgcagctgggggctctctggaacctgcttgtcaaataaacagagaacattcattctcaggcatgtggtcccaatagctttcacaagcattaaactcacttagaaaataactagtaatcaaaaaaaggcatttaaactcaactctctgaagcatggaaggagatgtacattacatcgattgaattgtcattacaaatatctactttagttgtagacgtaattaggttttagtgaaagaagacatttatgtagattggggggatgtggaaggttttaatcactggaataccatttttattacagctggatattagggactgatattgaacaatggatccactcttttccactgagaatggtggaatcttcacattttagaactaacaggaagcgggcaactgatctcattcagcagctgcctgtttaggctacccaacccctagaagtctgagaaattggtgatagggtttacgagttatttttagtgtatttatgaatatgaatgcatgcatgatatggccacaaaactatgaatcaatttatttatacttaggttggagttatatcaactcaaagtgtagcatgtattgtatgctccatagaaataggggctggatctgcctaatttagttctgtgtccatagcgctcatgaataggacttcacacatgataggaactttaatatttgttggttggatggttgaacaaatgagtggaagaagaactattcagaagttcttttggcagttatagaaacttggattaattttcttaaagaagaaatccattactgtttaataagcatagtttggttagtaaaaatatttcaaaacaaaatgtccatgagagcaaattagtaatataagttcttggtgtgaaaacgactttgcacacttgtaaactaggttcccgaaaacttaagtgtcttgctccaagttgagcagggggcggtgatggcaaaaccaggattagaatccagagctattggcccatggtcttcccaccacaaactatgttattgaaaatagatcaggttcctttagatgtttaa

SEQ ID NO: 127800 - DNA, 1092 bp, Homo sapiens
atgcttctcgtgttctttatccctagttggagaaataactctttgaagatactttttcatgtacattcgggagacatcagtaatttaggtgatattttcatctttacggtctagatgagtcatagagtaagtgtctctctcctggtttaagtggtgaattccttcagaaagccactggccgactagccccttggtgactgtcccagtaacatggaggctacctggcctccttagtgagcccaggagaagaaccttattcttctatttggagttcttactttattttcagcatttgcgaaatctcaaaattaagttacctgttttcctgattttgaactttagttactaggctattccatcttttctcttagcacctaagaggcactaccctcagttcaatttattcaggtttcaatttcttcagcccagatgttccttctgtcattacgttagttcccttggaagctatccaggctgctgaaaatagcttgagtgtgtcacaacccactggcacttaccactttctcttcagtagcagaactcttgccctattgagtgagcatctcccaatcaaatcacaatggatagttgtcttttttttttttaattatactttaagttttagggtacatgtgcacaaagtgcaggtttgttacatatgtatgcatgtgccatattggtgtgctgcacccattaactcttcattaaacattaggtatatctcctaatgctatccctcccccttccccccaccccacaacaggccccggtgtgtgatgttccccttcctgtgtccacacaatggatagttttcaaagcaactacccattatgcatgtgttcttaaatggtacgttgaagagactatacaaagaactttttttaaaaaatcaagtattacgcagccagctcatatataaccattgttgaatagaactattaccctcaataaataagaaatgatgacacttggaaaagagagaacaatagttaatgggtctgcttttccctctaaccacaaccatgaaaatataatcctcattaaagggctataaagttgtctgctttcaaggttcagcacactaatgtctcc

SEQ ID NO: 127801 - DNA, 1021 bp, Homo sapiens
tgtattcttattacaaatcattataatgcaatagaataaaacacagtttgcataaagatggggcccatttataaaactgtcaccacagccactctattaatagagccattttaaagatttattgtgagcatatgttactttttacagggggccagattgagagctgcaggatttgaacgtggaagagtgtgctactgatgataattcaaaaaaaaattaaagcgattctgcccaagtagtatcattagactggtactcttcccttttcaggtgtgattatcaaagatcaatcttaatgaggcattaaggacaggtgacaaggtctagagcagtgctacataactacttttttaaattcacagattctagttttatttcctgggaccgctagaggtcagggaacacaatgcatgggctaaatataagggtttggaagcagaactgggttatgagctttattgtcctttggaaaacggtggctgcatgtgtctggtggggaagaagtagtaaagacatcatctctattcattcactgttgattcagtgagagtcacagccctcctccataggattcctgaagtctctagtccctggagtttatgcaaagagctagacagttccacaagcttacatttattcagcaagttcctaaatagcacttgcaatgtgctaggcactttcctaggttctaggtatacagctatgaagccgtctaagaccctgccctcgtggggcctgctttccagtaaggcaaatgaaaagtaaacaaagtcaatgcttgtggtatcagattataagtgctgtaaagaaaaaaagaggcagtgaagggagatggagaatgatcttaagaaggtgatgtatgtgctggcaccctactgaagtcagcaagtgagttgtgtaactgtctggaggaagagcagcccaggcagagggaccaggactttcagaggcccaagcaaattatgagtatttttgccagtcctaccaccaagaaaccagctgctttcagattcctttgcct

SEQ ID NO: 127802 - DNA, 1140 bp, Homo sapiens
cttgttagtaatattacctgccacataatgagtgctaccatatttcagacactgtttatagacacgaggtgaatttaagatactactgcaatacatacatcactgccaaccttataataaccctgcaaggcagatattatttcctcattttacagattaggagcctgagtggtcagaaaagtgccacagttaaatatctgggaaagctgaaattccaacccaggcctgtctgacctcagaccctgtggcctctcctgtatattatgttgctcaaaagatcataccattgagttcttaatatgagtggcacactgtgttaggaaccatgagaaagacaaaaaaaaataaaataaaataaaagcacaatccctctactcagagacatgaaaatatagttggggagagataattttatgagaaataacagaggacagtaaaagatgaggtataaacacatcattgtgttccttggactatgaaagctaaggaacagagagagattaatgtagactacagacaataaggctgaagctgcgattttgagagacaggtaaaattcaggtgatctctgtcatagagttccagtcatatattgatgttagaatctactcctgtacctagggtgaaaatcagatatcatcatgattacctatgaaaattgcttagcaagttagagatgaactactgtctctcaacatggtaaatataacccagctacattttcctccaattttatacccctttggttaaactccaaaagaggtatcccccctgtgaataattatgtcacataaaaagtacacattttaagtactagatcacacagtcacactcagaatgactagagtctgataccatgaaagacatccaggagctgagtctgactgaggggcctggattggtgcctccctgtcctgcatactgtgggacacattctcatcgagtggaatggcaggccaaataccttgatgtgtttgcattgcccctgtccctctcagcccatacaccgctgatttcatgtatattaaatatgggtattctaaaacctcactgaagtggagtatgttctaaataagcagaaaaacataagcaaaaggacaaggacagaaataattttggattctcatgaaatcatcaaat

SEQ ID NO: 127803 - DNA, 1023 bp, Homo sapiens
attttctttcctccctctctacatttatacttacagtcaaacatatcacttccccagatgagagtctcagcttagcactctaaaatgctggtggcattaagttaggtaatgaatgtgaaagtgactaaaaaattctgaaaacaaatttgaaatgttattatccagttgtcattcctttggattctcttaaagtcacatttaaagtaggtagatttatatattacttgtacttttgaaaataaatatatccttcaatcattctaatagtttttaactattctgattccttctgtgtttttatgatatcgtcttcttctagagaattagttgaccaaaaataaagggagtcgttctatttcttaagacctaaaataatcattttggttcatttatgatgctctgaatgaaaaattcacaactttaggaataaaagttttccagttttgttttaataacattcctttttttgtcctcataaagtagtattaagtaatatcacattattaagtaatatttctgcactgaattttcagtcctctgatgataggattttctttcttttgtttcaaaagttgaagcaatcttaggaacaatagtcaaaaagaattcatttagggaaacatttcacaaagatcccctggtcattgctttcaaagtttagatgacccaagtaacagacagtgttgacgtctagtcataacttcagtgtgggtaggcaggcatcttctgttctccaataacgatactataaagtgtcaagcatacataaattctcaaatctgagcatgagatacaaaatttttaagataatctcatgcttttgttccattccaatgttttaacttacataaattatcttagggaatacagtggctcaagcttgtggttgaagttgatcaagcccttcttttgatgagtaaatgaataaagggatacccatgtctgctcagaaccatctttggtccgaccttatgaatagcacagatacgtcctctataatcgtggcctaaagaaataagaaaa

SEQ ID NO: 127804 - DNA, 1107 bp, Homo sapiens
ctgggggtgccttagacctggaacactaacatagtgcctacctttcagcataaggagtaataaatagtgaaggggtaaacaagtagataaatgtatgaacttaagatttaatataaagagaatgtctatacatctagaagcttcttgcatgagtagcaaggctgaagaaaaagtgaaagatgatttttaagcttgagcttaggtaactggaatgatgatgacacaaaaatagagaacacaggaggagagaattgaaatgataatgggagtgcagcagcgaagagctccatgttggacatagtttgagttatcaggaggacatcatttgaaagtatctatcaagtgattggaaatgcaggtcaggagcaagaagtcagggctggagataatatttgttgtatttttagagaaataattcagtctttgatatattcaaatgcttatatttagtaatattatggtcctctccatccacacaatgtcccagtacctcagcacacactttagggttttcagcatggacttaagtctattgattgtcatccccttgcctgcccacctctggagttctaaccttacgggtgaacctttgagaggctttgatattaaagtatgttggatagcgtgatgaagtctggcatggtctctggagacaaactgtccaaggtcaaattttggccccatcccttgctagctgtatgaccttgggaaagtaactttgcctttctgtgccttcgtgtctgcttccaaatggcaattataaaagtacctaacttcatagtgttataaggaatatgtgaagcaaagcatggtgattacttaaaacaatgctggcctatacagttggccctcagaaaacactggtttgaactgtgcaggtccacttctatgctgattttcttaaataaatacggtcggccctcatatcgcagggctctgcatccacaaccaaatgcagatcgaaaatacagcattcacagcatgtgaaatcggaagatatggtgggccgacttttcatatacgcaggttctgcagggctgactgccggactggagtgtgcacagacccagatggtcttggaaccagtcccccagggatactgaaaga

SEQ ID NO: 127805 - DNA, 2169 bp, Homo sapiens
acatctgaccctttgaagattctggccaacgcagacaccatgaaggtgctgggagtgcagcggcctctcctacaggtaataatacactttgaacttactatttttatcagcaattttcattgacttggcaagtgtcataaatttaaaaaagaagaattaccatctgtttccatattcatcagggacaaaacaaaagaaaataaataggcactagggaaatttagatttaatgtagttggataatggaagttccttaagatctttaaggaaaattaaaaaaaaaaacggttagctttggatatgagagatggtgaatctcattaacatgcaggcagttcctcattattatgcctggaattggtccttgaaaggaactatttttccattggtgaatgcatccctgagtatgaaggattaacaggaaggaagctatgatgcccaacttcaattaccagcaggaaaccctctataccttttaggggcagacttacctttcaatgacttggctacctcacagggaatttgaaccagtaaactgacctttaaaagtcaaatcactgaattcacatgatgatcttgttagtactgaaaattttactttatataaaaaaatggtttcttagcatcagaaaaaataaaataatctgtcagtagattttttgattaataggcttgaggcatatattttatatacattttagctggtgacttggaggtatatataaaactaaaacaaaattagtaggagtttaaattataggtatacattaactattattacgttggaattgaatccttattgtgtttcttcatttaagagtaggatgggcacagtctcacacttttacctaaattgtacaatatgagactattcaacatgtggaaggcttgagcttttcaaagagaagttgtatatatggaagggagttttacttgttccagttgcctgcccttacctgcctttacatatgtttcccttgatttttctttgtatgttagaatttacagaagtgctggacctttcttagagaagcgtcctagttatgagcattcttttttatgagcaagctcttttatgatattgataaaatagaataggaagatgttcatttggatggtctgggtctctgttagccatgtgcctggtgagggatctgtactgagtgttgggtgcagagaagggggaatgccaaaggaacgtgcttgctcttccttctgctggatatctcttccggctctttgcatggctggggtcttctcctctctgggtgtcacttaaaatgtcatgtccactggaaggcttttcctgactgtcctacctaattaggtcccctttcctggttattctccattctcccatttttccttaccaccagccccatccattgtcaatactgaggccaaaccctatggactgtgtctgtggactgtgtcatggaggcccccttgccaggtagcttctgatcaggttctgccgataggcagcacaagtagaagattggaaagtgggaggagaaagagggtgggtgatttcttctccccttcctcttcactttggatcatggccctggctgtgagtgcctccctccataacaggagatcctgccaggtgacacatcctccatagctccagctctcactggactctggcaatgtcatttcttctccttgcctcttgatttcagctttctgctgttacaacctctggatgcctcagtatcccttgttcctgctttcaaccctgcccatacctctgtaagttatttcttcattcatatttctttatttgaattatctaaatggaatactttttttttttttgtcaagatcccagatagatctccccagttaatcaggattttaacactttggttttttcttcctaacacttatcacaaccctaattattaattaattttgctaacttgtatattttctatcctttcccactagaaggtaagttccaaacacatattataatgtcaggcagcaggaaggtgctcaatgaataacttactggatgaatgcatgttgcatggatggatggatggatggatggatggatacagtgaataagtttcgagagtcataagtacccacagagtcagaataaggagatgagaaatagagagtaacaaaaatatgtttacttttatgtgttgtctgacc

SEQ ID NO: 127806 - DNA, 2873 bp, Homo sapiens
gaataagtcttgaggctaagaccattcaagctattaacctgcaaatttttttttctagagttaacacacctgcttcatttttttttttttttttttttttggtgattatgttgctctcctttttttcattaaaaaaatttattttatgaaaatgcaaattatttaaaccatatcactaagtttgtttaatattctcagagagagttatgcagtttaaaaagcaaacaaggagatggttatttttttttcctatctttggtattttcctgcattatagtgattgtaaattgttttctaataattccccatactcaagcttcattctttttttgtcttcctctacaagcacagggtgaattttattcttgaattttttctatgtttccttaatattttattcccagctaattgtaggtggctaatctgaaaaaagaataagaaataattctcaaaaattttagctgagaatccaaaacaaatgttaagaaggagcttggagaaatatgtgtgtgcgtgaaagatgcatgtgggttaaatattcaattacaggaagtataaaaatgtcctttaaaattcttccctttgctaaactgttgtttggtcacagagtagaagagaggacatgcctttccctgtggcaacacccagtgtcacacagcatcagcccagccggattctccagggagggtgggaggacagctgtctcagtgatgcttccagttgtttgataacggacagacacggtgcctaggagccctgtgaagagaaccccaggacactttgtccttgtccctctgaagtggcatctgggcagtacagacacttggattattagaggcatttccatgggtgccaacatgtgttctcagtgatttcactttctaggcacaggttccataggagggaaggaaggaagtcagtaggaaggaagagatgacaatcagcattttatacctaaaacactgtgcaagtgttagcccaagctgatacagcagagtaacactagtggtaataatagaagaagtaaaaacagtaatgatagcagttataatagtagatagtagtaatgatagcagctaacactttagtagcatttactgtgagtcagacactattctgggtgctttgtctgtattgattgcaagtgtttaaaatgtatggcaactctgagtggtattctttttatgaggaagaaactgagaaacaatgaaattaaataacttgcccacagtcacatagctgccaagtagtagaactgtaatgcaaacccaggcgatgcaaccctggagtcagtgctcccagccagttctacccaaagtggattctgaggattatgcttgtctgcaagctgtttgtcaccagtctgctatgagacgtagagaatttaggagtgagcatttagacaattttttttagcattttgacattgtctgttgaatccagtaataaaaaattgggcctcatgttttgtatatctttgtgggttttaacatttcttttttctagcaattcatttttatgttttataaaagtatcaatgtgcaactgattggggataaaaactgggctctccatagttagagaagaactgtctaaatcccttacttttcggtactgcctcacagagaggtaaagcacagaaccatcacttttaccccagtgcctaaagcatttttcaatagatagatagaaaagtgcagatatgtgttacagttgggtctctcctaaatccccagctcctagaatagtgtctgccatagaggaaacactcaatatttaataaatggatgaatgaatgagtgaatgaaaatgaatgaatgaatgatgacttccttagtaccaggacatggctgtgttttctgcgcatggtataaaactcatggtcttgggtttaagatagttaatggtgctaaaattaaaatgtcacagttcttatgcctctaatgctcccaggatgacagcaggattggatacatctcatggtcttaccatttgagatccctctgttgccatcactttttctgcagaatggcctccacctgttgcaaggaaagcatgttgattcaaactaaggaaatacctgaagagaaattattcatttctcctgagtcagattctgaacacggagttctggaaacagtccattgaagtggataccatctcatgctttatatatctcccagagtacaaattattcattccttaaacatgaggagacagacggaactgattcagttcatttccctggtttaccattgatttggagatgccatttaatttatttcttctttggtgtctccatctgaaaaaaagagcgaggggactaatgcttaaggtttttgaccccttacccatcaaattgctgaataggcaactatctatgtgaacaaatggtacaagcaaactttcttcctctatcaccaatggaatatgccatacccttgctacttagagagtgttctgtggccaagagcatcaacctctgatgagtctgcatttgtatagaatctccagatgatttgtatatacattagagtttgagcagcattgccttataccagtgcaaaagcaagtgtggcccatggaccgggagcatcagtgtggcctgggagcttatgagaaatgcagattcctgaacctcactccactctggaaatctctgttcacaccagccctctaagtgattttggtactcgctaaagtttaagaagcatactcttaacataacgtcgtcatgatacccagcgtgaagttaggaaacgggatctaatgttgtggggttttagctttgtggtgaacaacagtagtcattttttaaaaagtattcagctttgtttcatgcaggcccaggaattgtaaaaacaatatttgct

SEQ ID NO: 127807 - DNA, 1398 bp, Homo sapiens
gaagtctctgagattactttctatcatgagtaaaggagccccactgatggtcgtcttagttgtcacctagactgttctatgaaacagggcttatttggggtaagcattttgaggttttgattggctactgtccattttgatcttgtctcagcccactccttggtggataagcaggagagaaggtaatgccttatgacagatctgctgacaggaactgaaatacattaacactctgtcactcagatctttagagggctgcctttgcctgaaatatatttgactttacttgctaacaaaggcatcttcagatttatttcttttccttaaatgttagagaagaggaagagcgtcccattgaaagatactgggaagagaaaagcctggctcgacagcccaagcaaatgatagttagcattcttgggagcagcagaattgctgatcgtgcgagattactagtaggagccagatgagtgtagacagagaactgctgtacttaggaaatttttgaggttcttatcctaagcagtttttgccctatgtggatgttgcagctctggcttaggatgctccagtgagaaaatgaagagagagaaacaagactatctcagcttcaaagtttaatggccatttaagattaacatttcaagtaaagcagctgcttttcttcatgcttttcaaggatcctgccctactcaaaaacttgtgtgtacttaatcttagcatagacaatctcagatgggctggtgaaacctgatacatctcttataacaagagtgacatgacacagtgaaagaatttccaccattgaaattttaataaaatgaaatgattaatatttattcgacacctgctttgtgctattgctagacaaggtgatgtggggatacagaataaacttaaagcaagacttcttcttctcaggaatttagtagggatcaattaattaggaaaccggaattcctcacacctacaaatccaagaacagtaaaggacactttataattgagtactgaatgtgatggtttagaagattttcactataagagctgaggagagagacacagaaggctggaggattcaagagagaccttaggcaagaagtgggccctgagtcactgtaggatgtgtagaaacgaagaaggcagaggagaaaagtgacctgaacaacagtcacaatgtaagcaaagacacaaaaggtaaaactgaccatcgcgtgttcttgagacagtgagagtctaaatgagtgaaggaatgaaaggagaatgagaaataaggttaacgggggcacaaaactctaccagggaggtctcaaactgaacacaccagtttacttttgaagtgaaaatgatacagaatggtgaaagtttttagagaaggtgcatgttcaaatggatgcac

SEQ ID NO: 127808 - DNA, 1313 bp, Homo sapiens
catattatactatattttatatatatcttatatatactagatatataagatatatataaaagaaatacaacgtttgcccattatactaactgaagatacttgtgagttaggctcatcccaaactgtccagtatttgcttctcttagaaagtccaaaagcttttcatgtaacttggtgggctttctccctgacagaagcatttcacatatgcctactctctagcatgtcattcctgccacatatctcagccatgggcatctcactctcagctagtgcagcctatcttgatacctgctcagaacttggtataaacaaaactctatatacttcatgttgcatgcagtgagctaaaggaagctttgcttactttcacagattacaggtttattttataatcatgccatgaacacaagtcagagtaatctgattctttgctgcagtggcattagagcactgatagcacactctcctttttcagggagaatgttgtgtgtctggttgactggataaactcttcagtcttataggatttgaaagaacataaaaggcaggcatttatttactataataaaacaatagactttgcaatgaattctgtaataactgccttttaatcctcacagtcccccacacacacacacgagaactttataccccccaaaaaaaagttaaacgtcacacttactttattttatatctctgaagttggtcttcaatcaagcaaaaaaataagggataaagtgaaaggaaatttgagaaaagatcctgcaagaagcaagctgagactagaatttcataaaatccatttctagccctgtcagctgcctgcctcattaccttagactttcatataatcttttaagtctttagttcaatctttctactcagttatttttcttcagtttcttgtaaccttcaaaaatgctaacaatagaaatcacaggccaacctgaagttaatccagtaccttgtaaccacagccttttaccacccttaactgagctgtgtgtgggtggcttgcatcccacggttggtactctgggcttagagagtccttgcatgctatgtgggtggcgttcatcctgtagtgttcctacgggtttagggagtccctttccagtacccaatcagatatacattgttctttatatgctgggctgaaagattccatacttttgtttctaggaattcaggaccattcaactaagataatacggtataatgcagggaccaacaatctttttctttttgggctatgctgtctgtgttgcagctatgcggctctgcctttgtggtggggaagtagccataga

SEQ ID NO: 127809 - DNA, 1032 bp, Homo sapiens
tagctgattattggattataatggcttctctattcctaaggctatatatatatctaaatatatatatatctaaatatatctaaatatatctaaatatatctaaatatatataaatatatatataaatatatataaatatatatatataaatatatatatatataaatatatatataaatatatatattttttttatcagcaaagagaagtggacagttgtttttcatgtacggcttaccccagacaatcagtagagcacctctgctgctttatactctctcagtcctcctgaaccaaccttcctggaataatctactaatctaaaccagaaaacgaacttagttccacagcagatttcaactgtacctctatattacagcaggtaccctgtcagatttcttctatcgagaaatgaaaagatgtacacacgcccatgtctgtatgtcttccatttatcaggcagggagaattgattatctcaattctaaagatatcagcacatttggagatatgtggcttttattctaggaccctgggattcacattttagcctataaccttcaaatctccacattcatttttctccaccctaagtgcctgtgtagtgatgtaatagcactgttaaccataatagaatgatcaatgattttgaaaaacatagtgtgtacctttctctttgggaggagggtaaaagcaactactgataagaaagtaagccttagccagctccccacgatccatctgccagtcaaagcagttaatcttatataccccttcccactcaagaaagttagtgaacagttattacatggctgcaataattatctgtaagcgttatatctacagatgtagactgcatctgtctacagagaaggcgctgattttaagcctgctttggcacctagttttaagcctttggctttatcaaccatgtacgtaggttgtcacccatataaataggtcctatccctcaccatcctgagccttgattttcttacctgtcatttgagatagttacctcacagaattgcc

SEQ ID NO: 127810 - DNA, 1760 bp, Homo sapiens
atgcatttcaaattccaggcgcctgttctgtgacagccttccaccctggcaggtctctttgttgccatcttttgtagcatcctctgggtatttgactcttctcccctgcctcaaaactttgcagaaccccacccagtggcaccaatttgttcttcaaaaaccttattctacttgtctcgttgtttctcttttcggttgagttaaatctacaaccactgcttgtgcatcttcatttttccaagcagccattagaggcaaatggcaccacagctcctgctacatttcaagcttatgtcccagaggtggcaagacagaacatcaatcttcagtgccacctggctctctgataagcttttgtttcatgtgtggctatgttgtcaggagcttcacgccctctcttcccactacctcacccagagagcttttctgaatatgacaaccatctaaagacgaattatctccttgcaaagttaatttctgtttctcagcagggagccactggttcccgctgggcttgaaagtactgctgtttgttaatggatgagtgtctcttggatcctggtacccacactggaactgctgcagcgcctggctttccatttgctttaatttcctacttgcagctggtgttaggagacctaaatgggtttattcacggaatagtggtttacagtcattagcactgggaggaaatcatattgaagacaaggactagagagctgctttcatgccatccttgaacacttaggacagtttggttggttggttgattggttttggcttttttagagagcaaattcacaaaatccttctagagatagaacaaaaggcctaacataaaaggtttatttctgacttttaagagttagaaaaaaacagtatttttttaatgtcttcaatgtacagaatggtgaagataaaataagatgctggttgaaaattgctctgagcacttttaagtgtaatagtcgatgttgctattgtttggtatgcccaagctctttaaagtgcaggaaatttcgttacaaagatttgtgctgtcttctataaagcagagccagctgtagactagaaaactccaacccgtagaacatctggaatgtttgtttctattcattatgaaattgccacttttgtaggtcaaacaaggtcaaatgttggcaatttcctactattcaacctatgcagttttgtttttagatagaattctgaaggccaagagagcaccataggtatgtttcctgcctctgaaaaaaatccaaagcctgtaggccaatgcctgtttgtccttgagaggagcccaattctaagctgttaactgtgtgaatctgaaatgtgcctcagaattgctatgctaggagaacatctggtcacacagactggctaatgtcggacagctcgctctccctttctccgcctcgttttccacagcatttctacatattacactgtcaagctaacagagcatgagagaacatcaaactaaaagttctgagcaagaaagtacaagtgcaagcaattcctcatgcctaaaaagtgccactgacaatgaaaaactttactactggtgactccagagatggcagtgtgtgaaagtgaagaaaggactatggaaaagaaaaagaaatctttccccccttacagctgctttgtgactttgggcaaatattttcatatctactagtttttatttattttagagaaatgttgttgaattgaagagaatcaaatagctaaatatcccgtatagagccaacaca

SEQ ID NO: 127811 - DNA, 1466 bp, Homo sapiens
atagcctggtagagaacacagactcagcccttctctagacttgccttctcaaactctttcacacttgacctctttcgccattcttcaagttagagtgggtattcggtttttcataagctctgtcatttttgttttccctctttctgcatttatttcctagccatggtaaatttgggatgttgtgaagatcaagtctcagttcactctccatccacttacttgagaatagaggtactcggtagtcgtactcacattcgctgtgctccagggagctagttgtcaaattttctgaaattttgtgagctggttgttaaatacagccattattaaaaagcaaattctgtaatatgacaaaggtaataaataccaagactcatcacttcttaattattttttaacatttcaggattatctatgttcttcagggtatctgcatgcatctattgttgctgatagcagagttattataccttattactgtttgtgttgcttttcatctcttcccaactctgagttcagcaacatttttaagttcagtgacatctcggtggtagcttgaaaccagccacacaaccaaaaaaatcaccacaaaaaccaccaaacaccacaaaccaggacccctccatttccctggagagctgcttgtcaaaacatttaccagcacaccgctagtcatgctcttcttctgttcctgccagtcatgagtgattgtgagccacaccaattaccattcatcttaaagatggcaaaagtcttcctccaaggtggttacaccaaccttacacgttttccccccacagccttatgaacacccagcccagatttttactctggatccatggttactcctaggctgcctctccctccatctttctcatccccaatgattcagtcattaatttctctctttctccctctgtttccacttcccatcctcttctccttcctcctgcttcacattcttcctctaccagtggttaagagcaagggctctggagacagactgactggctttgaatctgggcttcatgatctactggttatgttaccttggggttgttactgaactttttgtgcctcagttttattatctgtaaagtggagataataacagtatccacctagcatagttatgaggaccaaatgagttaataattttaaaagcacctacaataatgggtggcttatagtaagcaatatgtacatatttacttaataaaataaacacttatatttgtcatccagcccttccttatgtgctaatgttcaaggccagaaggagaacagcaacagaacacatgagaataaaagaagaggcaaaatggcctggggttgtatcacagcaatggtgtgacagttctcgggaactaggaaaagagtcaatgaaaggaactggaggaaaggtggggatcaggaagggagacaaataagaagaaaattacatttcaaaataatctgcaaagatt

SEQ ID NO: 127812 - DNA, 1029 bp, Homo sapiens
cctatgctaaaataatttcagaaagataagtttgaagacaggttggattattggcctgtacctgtatgacaatcgtatgtccttctggtctatccttttgtcttaggtatcagttctgagtgaatttagagggcagggtttgaggaatgttgaaagagagaagagatctcgctggcctaaaactgcccacgaactgtctcttggctgctggcattggagtggcctgtgcttcccgaggctggtcacatagaatggtctactgatgatcaggagggtccagtcttcacttcctgtcctgacaccatcctatccacttgctgagttacttcacacctttttttcactgaagaatgtctccaatgacagtctttcttcctgtaccacacactaccttcacagcttcctgtaaacctagctttggcctcactagtcccaccattgaaactgtcatctgaggaaggtcacaataaccttcttccacaagcagtcttcattcatgtctaccatgatacacctggcatcatggactacctgaaaagattgaagttactgctttttgtttttactggaaacaacaaaaaatagtggttaagatacgggctctggattcagtctgcctgagtttcagtcataacagtataaactgttttgctgttgtattcgagagcatagcatagtagcagtgcctggcacatagtaggtgatcaataaatattggatggattcacagataggtaggtaggcatatctgtttgctataagctcatctatatttgtggcttttcatgtcttttaacttttatatggcttcttgctattaatatttttcctttagtaagttacatttaaaaaattaactcatattgcttaggctaaggaaaagaatgaagaggtgtgtgtgtgtgtgtgtgtgtgtgtgtgtgtgtgtagactgtagagcagggaatcatattgggccctttgagcaggaaaataatatttggaaatatacaactgggaaataaaatttcaggggacatcattacctcg

SEQ ID NO: 127813 - DNA, 1084 bp, Homo sapiens
tccagtgaggaaatgaaatagaaataataattcaaagagaaaaaggaaaagcaaaacatatccagctgttaaagaagagcttgttcatatgtattttaaatgtataatggagggtatcaaatccctatggcattgagattctattggatgcttttttaaaatttttaattgacaaataataattatataatgagctacaattggatgttctgatatatgaatacattatgaaatgattacattcaatctgattcacatatccattacctctcatacttctctttgtgtgtctttgtgctgcagacatttaaaatctactctcagcattttgaaatatatattacattattgttaattatagtgaccatgatgttcaatcagtctcaaaatggcattccttctaactgaaactttgtatggtttgagcaacatctccccacctcaccccacacccaccccaatcccccagcccccagcctccagcaaccgctgttctaccctctacttctataagttcaactcttttagagtccccatataagtgaaatcatgcaatatttgtctttctgtgcctggccattggatacatttaaaatagtgatttttaacagtgtcagtctttagggtatgccaaaatttatatctgttgcatctatttaaatgcaggctaaaaaaattaaatgtcaacttaaaaagggaaggagaatatagtttttcaaaattattttaaaggatacaccaataacaattgtaaaagccactattctaggttaattgcctgagattggaatttctgggccattagagtcttggattttcagttttacaaaaccagattccaaagtggtagtaccaacgtctcatctaccaaaagagaatggaataaaatattttaactattaaaacttaggcccgatgcagtggctcacgcctgtaatctcagcactttgagaggccgaggcaggcggatcacgaggtcaggagatcgagaccatcctggttaacacggtgaaaccccgtctctactaaaaatacaaaaaaaattagccgggcgtggtggcagcgcctgtagtcccagctactc

SEQ ID NO: 127814 - DNA, 1042 bp, Homo sapiens
gtcgaagaaataagtacatatttgtatttgaagaaaaggacttgggaagaatgaaaatttggtgatgtaagaaagaaaggggaaaatccctgaaattatgtttttggccagggaagtagcggtggaggaggggtgtgcaactggagtgattggtttaggcgggaacatggatagttttgcctgcgctgtctgtccgttctataggaattgtgttatttctctgtcattcatattttaccgctttgtccaaacagcaaactctatctctcttggactactactctggaacatggccattgctttggtttttgacatattctggtcatcaggagcattttgattccttcccgtaagaaactctactgctgtggcatctctgctagccacagtctctgaaatggtgtccacctgttggtgcccactgtcacatctcaggggattatctgggagggatctaccatagttgctgaatgatggacctgggttaaatttttctcaggattgggaaaagtattctttgaggctttgaaagggaataaatagaaaatcatctttctggttgttatacaacaatgcacactcaaaggcacaacacatgcccccacggtgctgttgctgctggttaatcagcgtattcaggtttctggagaaagtgttttcttattgtatgactctgaagatgcaaagtgtccttacttcctctcttcccatttattgccctcccccagattggcacctgctgaggactaattagggcagtcctaatttggacggccaaatcctgattacagtgaggggaaaaacaggaaatgttctagttttgctgccagcaaatgactgacttaaatagaaagccatatacaattcaaatgatccaaaatggtataacactggggaaggaggaagggagcaggaagacgttgcactctgattttctcccatgtgatcctcagcagatatccttcagagaaatcatcaaatctagaaactcacaatgccctctgctgagggttggcttgttttccaagcttcccatgaaaac

SEQ ID NO: 127815 - DNA, 1004 bp, Homo sapiens
taaattggacgacggcactttactttggaccagtcttgtccaaggttcatttgttgagcttggctcctagtttttgaagtatcttgaaagattcagtctgggaaagtacacatcatgccctggctgtcaccaaacaattgaatccaattagccccacctgcacctggttgtttacctaatgaaagactcagcaccccagctgtgtccagggaccatgcacactcgcacttcccaactgttccagagaggaagcggtacacatcagagccaggcgacaccagcagatgttttctgaatgaaattcactcagctgtatctcgagggtggacctttctcttggcagcctcatcacctgtaccaaaaggtacacctattttcctcttcctcttggaaacagatacaaatagttacacagttggctctgtctgtggctcattgagctgtgaattaatgagtacattatggttctggtagggatgattaaccttgcttctcctatggaataatttttggacatgtagctctccttttttgaggctatttggatatgtcctggaattctgtaacccacatgatctggtttaccagaaaatcaaaaacaaataaatgcaattagtcagggtggacttgccacttgagtaaaaaattttctttagggtaattgtttattgctgatcaatgccagtatttcaaattagaatatttggaattacttttgggattggtgttcattccaaatgtactaacatatttattgttgagggcagtatgttagtagccttttcattcatttggatgactattttttaataaaatgggatcgatgcatattagagataatgtaatcttgaattactgaattaatccagtcctttaaaaatatgtaagtaaataatgtgggtacctttaatgtcatccaacctaacctaatttttttatttcagctaatgctaaaatggaaaattctagcccttcaaaatgtacggtaccatctcacacctaca

SEQ ID NO: 127816 - DNA, 1004 bp, Homo sapiens
tgtaacacttccgtcacctttcaggtactagttatgttgtcacttaatagcattcttttacatggttatcccactttttattcaacattttcttaaaaggtcccccccaaaacataccatatgcttttatttatcctaagggatcaaatatggtaagaggagctaattagttttttcaactgtcacgattactcaacaactaagaaactaagaatgaaatctagaaatgttgtttcccagtaatgtgacctattaatgggtatcatggactccaacttagataatggattatgttcaaaggagagatgagtgtgatttcttttttcctgcagcaaaggtagatgaaaatgctaactgaataccaggcatcatgctacagtgtctcttttctattggctgtgtttaggggtattgtccagtcagaagaaaaacttgtcatcagtgcatcctgggcaaaagatgatgatatcagcagactcttgaaatctctaccaaactggatgaatatggctcaacccaaacagctgaggccaaaaagagaggaggaagaagatttcataaggtaaaaggtccattttctaagttgtcctaaacatagggaggaagcacatctgtttagctaatatttttttacatgaaatttaggcaaattctaaaaatcaagcagcaattacttgaacttagtaaaatatgttttcctcctgtctcacctcatttcccatgcaagtgtgccttgagctcaaaactttagaaggaaaaaaattaatgtgagtcaaatttggaacattgctaaattggattaaaatatctttttttttttttttgagacagagtctcactctgtctcccaggctggagtacagtggcgcaatctcggctcactgcaaactccacctcctgggttcacgccattctcctgcctcagcctcccaagtagctgggactaccggtgcccaccaccacgcccggctaattttttatttttagtagagacggggtttcac

SEQ ID NO: 127817 - DNA, 1027 bp, Homo sapiens
ttgaatatcctcttttgtaacatatttgttcaaatctattgcccattttaattagcttgtctgtctgtagcgatttttaagagttctttgcatatctggatgtaacatctttgagatagacagatagaccaacagatcttctcccactgtacaggccaccttttttactgtcttaatggtgtcttttactaaacagactttttaaagttttaataaatttaatttgttattatttatggacaagacattttgaatcctatttaagaaatctatgatttaccaaagtcacagagatgttttcttctaaaacctttattgtgctgaatatattttccccctgcatctgatataaatgataagcttttacatttttatttcctctacctgttctcttcccttcatttgcatcatgttgtcatgactatagtgtagagagtaacttgagggtttttttttctatcaagacaggtaaagaatgattgagagatcgattggttagagccctgagtagaaataattaaactgaccttaggataaaggtcaggccacaaggctccactctttcacagtattaccataatattttcccactgccagattttgaagatgcctgggtgaacatgtccccactcgttctccgtaagcatactcatctaactacagctgtcaaccttaatagttgcgctacaagcagtttctggaagaaaaattattttttcccaactttacagattattttaaatgactaaatatctttttcttcttgttcctcagcttatttttgtgtaactccttaattgtattttatgcttgacaatgggattttccatcagtcttataggtatcttcaatagcttaaattgaagggaatgctttctagcctcattccagaaaagagaatactgatccaaagaaatgaatttttacccttcatgcttctgatttaaaaaagctagaatcaaggtcctggctttctttattcttattttgctcactgagttgtatcactttctatcttaaatttgaa

SEQ ID NO: 127818 - DNA, 1047 bp, Homo sapiens
taaaatgtgatcagatacagcacaggtctgcagaccaatccctgaaaccttttgtaatgtttcgttcataattgcatcaggtctgctgaaagcgcagatttttttttttttcttttttgctttcctttcagtagctaacagaattctttaaagactaaatggagacaattttgagcatctttggcaaaatttccttaaatgaattcttgtcagatagacctttttaaagattgtaattgtgtggtaaaattaagttaaataggtttaacactcctggcaaaattaccttaaatgaattcttgtcagatagagctctttaaagattatcaataattatgtggtaaaaattaggcttaacaggtttaacattcttctttagtttcataggcttctatgtgagcctgttggccaactgatttggaaggcaagtcctcagatgggatccagtacccaaaacattcatgttttgagttctgatttctgctcctggctgtgtcagatcatctttgagcaattgctgagtgcctgttacctctgagtttctgttacttcaccttctgaagacaatgttaatttgctgcctgtttcactcaaaaatacatagtgtcttcattaaataatgtgttatcataataagcagaagatgaagggtacataaaaattcaggcctagaaagtggaaataatactgtccagttgccaggcagcagccattctggctgcgaggtcttctgcaggggacaagtgactgtgtcttccgcaagcctggagccaccagtccagaccagcttcaggccagtgcgcccattgcctcccaccttggcacaagtaactaatacccaatgtcctccagttttatgtgctgggattcctggcgtgcccatttgaaagttctctcatatgtggtgagacgttccgtttttctcttcactaaaacgtgaagttgttttttggagaacatatggacagtatagaaaagcacaaagcatgatacatttctgcagttgacattttggcatatagatatccaaccttttttctgctcata

SEQ ID NO: 127819 - DNA, 1054 bp, Homo sapiens
aattatatttaaagcattacttcaggagtatgtataacacagttaaaatagagacaaagaaaacatgatatgaagaaggcataaaggaaaaggcagatttattctttatttgttgagacagtctcactctgttgcccaggctggagtgcagtggcacaatctcagctcacagcaacctctgcctcctgggttaaagcgattctcatgcttcagcctcccgagtagctgggattacaagtgtgcaccaccacacctggtctcaaactcctgggctcaagcgatccacctgcctcggcctcccaaagtgctgggattacaggcgtgagcaagcacgtccagaccaaaagacagatttagatgtgtgaatggagagatagaaacaggatagaaaaagcaaaagaaacagcaggaaggataaggaagcaaaatcacctctgaatttaatattagggctattagacagttattagaaagaaaacacattatttggactgtacatgtcagagtgagctttttttaatcaccgtcatttgagaaggtattattacttgattaaccatgtttccagcctagagatggaaaggtgtggattaaattcacagagtaaattattcgcttatcctctaagagtctaaggaaccccttgagtgctcactacttgcatggcctcatgctgattctctgcctatcccaagggccaatgcagggtgggaagaagggactgaagcagtgggcttcagagggagatcatagaatctgcaccagaaatctccttaaaatattactgcatatttatacttttattcttacgtcttttattgaaaatactacttatttttgagacagtcttgctgtattacccaggctagtcttgaacttctggctttaggtggtcctcccatttcagcctcccaagtagctgggactacaagcatgcaccaccatgcccaactctaaaagactgctttttatctgatgatgaaattatacaagtttattctcagaaatctataagaatagaaaatgtgtctaccaattaaggatagtttgggca

SEQ ID NO: 127820 - DNA, 1083 bp, Homo sapiens
gtacataacctgtgtagcaagccactgagtgatttacacaggctaacctggcatcaactgttttcaaaaggagaaagatgcattctgagttatgcttaactttgtaattgcacgatttagctgttgtgttcatgtcactgaaagtacccagtaaagttgatgtctaattcatgcctataatcatctctgttattctgacaaagatctcatctaccacgcctgttaatcctttgcctcatgtgctcagttccattttataatataagttgtaccctctcagttccttgcagggtgattattccacccagtgagtgatttaagtaactgtcagcattttgaggatcagtgcaaaacccaagtgaactgtaatcactacttatggtgtctgctaaaacaaagcatcaagcaagcctggtttatcctactaacagcaagcctggctcacccccacttatgtgctctttgaattcccaggagagatgcccattgatgtttataatttgaacaaagcaggggattctctgataatggcttactttgattgccctatgtcaatgtgactctagaaagggaacaaggggacagctttttattatttttttttttttgaaaagtgaaccaaatgattactgcaacaaaagtgtttccaagtctggagactagagaacatgaggaaaatgctcagcaggatgggaagaactcaagaagatcttcagtttatttcttgttccacattctgttaactatttggtatggtaaaggccatgttttattaagcttaagaagctattgctgtgatagggtggaaaaagtttgcagaaaattattttctttctttttttcttttttttttttgagatggattcatgcagtggcgcgatctcggctcactgcagcctctgcttcccaggttcaagcgattctcctgcctcagcctccctagtaactaggattacaggtgcccaccaccacgcctggctaatttttagtatttttagtagaggcagggtttcactacattgcccaggctggtctcgaactcctgatctcgtgatccgcccgcctcggcctcccaaagtgctg

SEQ ID NO: 127821 - DNA, 1041 bp, Homo sapiens
ctcttcagaaattaaataattactattaatgactattttctctataaaatattgtaatgcatccaaaaatatttctgtagcctcttctaattttttgggcaaataaatctcatagttttggttgccagaattggtttgtgaattgcagtattagttatacaattatttatatacttatttcttacaggtaaattattgttaggtatcttagaaatcatctggtctaactcagtcattttgcatatgaggaaattaaggtctcagggtggttatatcacctgtctgtgccaaactgagatggagcaggtcttcagaatcccagtttaattttctttctactacgtcagttagagccactaattggaccgttcatgccgtattcctattaaaccattccagcagggttggcatattttgttttaatggaagcactttaatgcttacaagcaagttgtggtcatttctgatcattttcttgtgcctaaacagaatttctacacctaaatatatggaattattgtacaaacccctcttgaatttcatcttagttgcaataaaacatttctgtaatttgccactctctatttttgttttgcaagtattttctaagttagaaactccatctgtcttgttatcatgccgtgtaatatattctagatattgcattgccctatatattagccactagccttgtgtggctatttaaatttaaattaattaaagttaaaaatgtagttcctctgtcatactagccatgtctcaaatgctcagtggctgttatattggacagtataggtatagaacactttcgtcatcacagaaagttctgttggccagtgctgtagatcatcactgaggtcattgataaaggttaaaaataatgccagtccatattcttagcctttgaaagatacttgaaatgcctacctagttctatcaaaacatggtgaactactttaattgtccagcctcagatcacatgtaccctcctgatgaaggttgatgtttttggctctgcattatcaaaatttctcctattga

SEQ ID NO: 127822 - DNA, 1319 bp, Homo sapiens
catgcaataatgtcaatgtatccatggtgggggtcctgggattgatttatgataaaaattttgttgtataatatttttagatttagtgtaaagttgcaaagatattacagataatctccttatctctctcatccagttcccctattgttaatatattagtatgatacatatgttacaagtaatgaatcaatattgatacattattattaatgaaagtctatacttagttcagattttcttagtttttccctgatcttctttttctgttctaggatctcatccaggatatatcacatttataccacagttttcccatatcacagttatcacatatatcacatagtgatgtctccttaggctcatttagactgtgacagtttcctagactttccttgttttttgtgaccttgagagttataggaattctggttgggtatttgtagaatcttcttcaatctgggtttatctggtgtcttttcctgattagactgggcttgtgggttttcaaaaggaaaactacagaggggaggtaccattctcatgaaatcacatcaagggtacatatcatcagtgtaactgattactgatgatgtctgggattgactttgtgcctccaatttgtgtagtcctctctaggcagttccttccaaattttggattgactctccactttctgactacaaattgcttatctttctagtggctatttttttaacatgatagaagcatcttattataagcccaatgtttggatgagttgaatacttgctaagaaaaatggttgtctaccttaaacaattatgcagttgataatggattataatcttgtgggtctgaaagactctgtgggaggagctgttttttaataccttgagccacttgactaaggcctgtagctacttttgggttgctacatgtgctaaacatcccttaataaatgtatacaaccatattaatttcaaacaaaaccatgctgacattaaaagagtttaactaaatttcttcactaaaaataaagtcttattttaacccattttaattaaactgtaatgtgcattgttgactcaaaacccattcacaagtggaactcgcttcctgagataagtccttttagagtagaatacctcataataccgagctgcacatcagttataatcagttagagagctgtaaaaatactgatgtagagattttgatgtaattgttcctaggtatgacatgggcaacaggctacaccccagaccaatcaaatcagaggcagagaaacctatgttgtaaaggagtggttttcagcctcatcgcattagaaatgcctgtgc

SEQ ID NO: 127823 - DNA, 1033 bp, Homo sapiens
gccgaggtgtcggtccacccccatcccccaaccgcacagttgcgcaatattccagcatgttttttatgcattcccgatggtgacttaatattttctatgagatggaatgtgaatattctcatgctagagctcactatcatggactctttgtgccttaatagtaaatgaaaaataaaatgcaaatcctccagctgtttgtttttctgccttggcacaaatgaaaataaaaatttccctacccaagatctcttgggaatctgtcgtgtttcaggtttgcttttgtcagaccattaagccggagttttccttgtcataatttcatctgattctttttaattagaactctatgcgtggtaattcctctctcgcttcagtatttacaagtttcaaatatttgttgactgttatcagacagttcctcctcagcctaccttacatgtttagtttctctaatcacctttctatggttagactttccgtgcccttcatcgtttttcattcttagtagttgtcattttcctaagctgactttcatattgtggcttcatttctgtcattcttcttttattgacgataccttccaaactcattgccattggttgatttcatgatcatgctgttgactaagaaaattaatttaccattggtattgtattttgttcatgagcttcccaccccctgcctgactctaaatatattttggccttatctcattaacattacttgtacttctgttgagcctttctctcttttaaaaataatgtccaaatatatttccatgttgtgctcaatgtctcaactaatgttttgtaggaacaaaagcaccaactgataattgtatgatgatccagttttgttcattttcagtcttaaatgtactctgcttatatttacaaactcgttgaaacttatcataatgaagaaagaattgtgtggaaagccgctgtgcttagcgtgttcacctgattattcttagctgtcttctgaaatctacgttattactaggaatggagatgctgcttgttcttttatt

SEQ ID NO: 127824 - DNA, 1036 bp, Homo sapiens
aaactgttaatatgtgtgttcctaaatcatttccagtaaatcatggctctcactcaccagagctcccaaaatgtttctgaggtcatggaagtgtgtctgagaatgggcctgcactggagggcctacaggtgctcatctgagaagccagggttgaatttgaaaaaggcaccttttgttcttcaaaactacaaaaacaaggctcagctattgttgaaaaacatgccaaacccaaccacaattccctctgtcaatcagctggtcgttagtagagttcattgtcctgtgctgattagaaagcagtaccccacccccctccgtaaggaggtgattatcaactgtggagctacagaaggctagtgctgtgggcatttcaatgtaattatggagttctaagtacttgcccataaaaaattatgtggctgtttctttggaaatgccaacatttgtacccataagggaaatattttattaaaatatgataatatcatggatgcttaagtgtggtggctggaagctgccagctgaatgattttatcttcaagcaaaactataaaatggaaacaacaagatatgaaagaatctctgggaaagaggagagacagaaggagttagaaagcaagagaaggctctaaaatggcatgctgaaattgcaaagccagacagagaagatggtggaaatgcagaatcaccagagcctgagccgacacccagcacagcagagaggaggagcggctgctgcagcagagtgacttgaacaagacatctgagtggattgatttggttgccacacagaaccacgagttccaatgaggagcagtggaagattgtacctgaaggcgctgattgtgctattcaatctggcctcttatctagaaaaacccttagacacttgggtgctttaaaacctgggataagcccaggaaccagtgtgaaatcatgacttaatgaactcctcaccagagaaagagtgtgtctttccattcttcacccttgaaactaagtttagatctacaaaatgcagtgggtgagggagaca

SEQ ID NO: 127825 - DNA, 1409 bp, Homo sapiens
gatttaagaggtgaggaaaagactctatttcttaatggggaaaagctgcaaagaattgtgatcatacttattccaccacactggtaaattaggaagaaacaataccaaaaaagatatttataattaatcactttggcctgtacagagagcatgttttctatgcatttccttataaaaagtgtattttccacgtgataataccattgatttttttttttgtcaatgtgagaactatatagagaggctaaaatgtgcaactgaaatgatgcatcttttcagtgttcctcagtggcattctcaaaatgatcgttatattcatggcttaaaattaactaaattaagttttcaatgcaagtgttccctaaagtcaaagcttttcttcatttcttcattagagattaatttgtagcatgtctcattgaatggattgttcacagtgattgtttttcagttagacctcttagaaatagttttattttagaaaggcagaataattatagactgttaaatgtctaagtgaccctgaatagttctaggaaggtgtacagaatactgatacttccttaatgccatatatgctggaaattttagagtaaatatacattaattaaaatatctaccataactttcaagcacttacttttgaataactgtagtctttagtcttcagtaaaatcctgatgcaaagtacaacttagtctaaattaggattttcctgatagagtctaaggagtacaagccactctggtctttggaaagtcaagattcttaaatgttaatgtggcatttcctgtgttgaccatttggataatggattactccatcatttcttttgtatacccaccctttataaggattatttcttaatccttatatgtttcacatacatcatgaaacaacaaaaggcttcattatcaggagcttctattcgcttcagcagaaccatttgaaacatctaaacagttgagaaatgcatcccagtaatatactcagaaggcctaggaaacaagaatagtgaaaatagctattaactcaaattcattaggggttaattagccatgttgcaatctccttaattttctactttccacactgaattagtcatgtgtattacttaacccagccactattgccagatcagttagcactacgattccttttcctcagcaatgcttcatattatgacttagatcataaaccagagcaccaggtagaaatcacagccaatctgagtgtgctgcatggggcctcgtgatacttcctgttaatttagatgttgacagggccagtatcagtaatgaaattagttcagggcataactccttgaacatagcaggcacttagtaaatgttttatcaaattgaattaaattaacaaaatgcttccagtgagggcctgaaatcttctac

SEQ ID NO: 127826 - DNA, 1029 bp, Homo sapiens
gatagtaacaattactaatgtcttatagtactgggacgttcctctctagtcatccatttatctctgctaagaatttctcttaggattaaatagtatgattactatttccacatatttccacagtattttggtcattaacatacatatttaaagcaatatatttaattatatgcctattttatcccttgctaaatgtggattttatttactgaaactgttctctctgactttctactttgacttctctttctttttcttaaacaatctttcctatagtacctactctggcacaaaaaacactgttatattccagaagttcttttttaacccaaaagttagagaattggcatagctactgacattgaaagaggaaatgaagataaggctaaaaacaggaggacttgttaaaagtctgtttaggatatatttaccctcagatttttctctcttacttcatatacctgtgccactgcttctatcagaattgcagctgagcactggagttttagtttctgaaaatggtaaaatagagattccttggactgagggacataagtcatagctgagtgtgagggctgttattctgaaatcaggcaaagtttacattaatgactgctgacacttctgttctttttcctattggctggcatccaggaatataacttcagacaaaagactagaaagtcttttctgaaaaatctgataagcaccaggatggtgcaggtgtaggcgggagatagacactaacatcagtggttctccaataaaagagaccagccagatcacctacaaagacaactacaatgcatcagccttacctccagacacaaaactccagtcagccccacttaaatatgagcagacagccaagaagagtaatgtttgaggaaaccttataataggaaacagagaccaaaacaaacaggaaaagcaacttagaggaaacagggattatccagaaattaagaaaaacttaaaaaatgaaaattaatatccctagaagaaataagagaagatattgtattcatg

SEQ ID NO: 127827 - DNA, 1005 bp, Homo sapiens
actggcacaggcaggactggaacctaggccagtgtaactcttagaccagactctttcaacagcagtaatagttggcatttgtagaacaccaaccaggtaggaagcaggctgtggtctatgcactctaatgtggtacctcatctagtccttacagcagcctatgggggaaggtggtggccgccctcatttctcagaggaggaaattgaggccaagcttggtggaaacaggatttaaagctgtacagtcaaactccagtgcccacgcacttaatctcaacacctctttgctatctcctagcagtttatgaatgagaaaaccgagccaggatgtctgactctctcctgaggtcacacatcaaggtgctgccacagccagatctagaacccaggttaactcttgtctcatctagggccttgtcttcttgaagaacatacttactgtggaaatacaggtgaaaattccgcatcaaacagagataccaaataacagctctaaatagacagtgatgcatttgctctctccttcttgttagtgtagtttaatttcctgagaagctttacacatacccctgagcttttctgtcacagctaattgtgcaacttccaagtagttgtcctgcctatgtttgttacttgggctcattaacataccctttaccgtagatgacactctcattaggttaaattaattaaaagatgatcattggggctacatagcttcagcccgggcagagatgtgccaccttcgaccctctggttcccttcgacagcctctgtggagatgtacccccaagacatttaaaaggctgtgctcttattttctgtcactctttatatactatctaaatcttaccacacaaacaacatttagcatgcaagttaaacagatttaaatttaagcaaaattgagtgtcaccacatgtgcttatgccagatctgtataattcttttgaggtttttggaaacgtgaaccaagccatttacgcttcataggaacagattata

SEQ ID NO: 127828 - DNA, 1149 bp, Homo sapiens
atgaaggaaggagagaaaggagggaagcggggagggagagaagaaggaagaggaaaggaaagaacttattttatcccaagttagagtagaaaactgtgtggtgtctttcacctctgtacaaataggaagaggatttggaaatcattattataccaaaatttgatcttctaaaatgttttcaatgagaaaatctcatgggatcattcttcactgtctttttctatcttctagaaagtttgaattcacagtgttaacctttcctttcgtgccgagataaccatctttcccttttcaatttctcacttgcctgacagctgataccagtctaagctaatattgtaacaattttagataatattgcagatgcacaaggacatcctcatatgaatcaattaaagaagtcacagtgagttgccattgaaagtgtggcagctgcatccttgaaagcagatgctcttctgggtctgaatgagtccaattttaactaattttaagacctaaacagatttcagtctggttaatattaggatgtggaaccacttgagacatcctaatgtcctagtctgattacttctccatgacagtttgtatgttgactttccttgagagatgctgggtacttaatgccaggcatttttatgtcaatcgtaaagagagaccccaagtcatggctgcagcaaagtgcactgacaactcgtgaaattgaagtggcttctaacagcagcatgatttatagggaaagaacttggggtatagggattcaccagaattgctttaaactatatttctgttagattcctgaatccccagaaacaggctataatgaactacttccccatccctactctctctctagattatactcagaaaactaaggagaaagttagagttgtaaatggcaagttgctccttcttttttctgatttttctttaacaatctgttattatgttctttgtcatattgcattggtcagtttaattaaaaaggcattgattgagcttctgtaatgcctctagttattctgctggccttgaatgggggaaaatatatataatacataattctttcactgaagtaattaatgatctggaagggagacatagttaatggaatataccttctattctagaattgagaggggtagggga

SEQ ID NO: 127829 - DNA, 1795 bp, Homo sapiens
cagaatacaccacataaggctcggatagtgaatgtagatgcacttactctatcctggtcacgttaacaattttttttcagtttgcacagtgatgatacaaaatgaaaaagacagatttcatgccactctagtataataacgctagaatagaggtgtctgctaagtgctctgggggcgtgactgtggtagagaccatcgagcagctcttccaggtgtggcttgttcattgtgatggctggccctgaaacctaatatcctgctgtatataaggtgctcagtaaaaatgtgattaagaattagttggtttgaaaccaaacccagataaagtaagggctactttacaaaacaaaacctgttgtctttaaagaaaatgaattggtttgcagtttctgtttttacatagcagtccacttgtaagtccactgcattatcttaagaggtacagaggctgtgtggccaatatcattctcatcaactaatgtttgttttgttcccatcctgctgtaaaaaaagaattagaacgtaggcccggttgtccaggagctggtgtggtgaaaaagtggctggttagctcctgtctctggcacttttagccaagaaaccactgtaatagtacagatagaagaaaacaattcatggaaaaaagtaatgggatatgctagcaaaaagtccagaacaacttcagatgccaaaaattggtcttgttcccccaaatatctttatatccatagcccatatttttctttgacattgttaaaattcaaaccaaaaactgttttccaatccagcgcagtctgtgttgaaggatccatctaaggagtgtttgacattttacctgtgtcattgtaggtcacattttaaccaccaagcagcccctttccacagtttgaagcataaagcaaatgatacccccaagagatgaaagacatggtgagcccattaaaaactattgaggtttgttttttctatttgaactttagaagaagaaaattaagttgccatttgagtccaagatgccaagaatgtcacctttatcagctgatttttctcaccatcaggagggctctaagtaggttcaacagcaactgcctatcactgttgggatcctaagtgtgcactctctgaaaatcatccaccccactgtgtaatcagcagtgtttgcagaatacgttaatgtcaaagtcatagtaaggtcagcaacaacaggccagaatttaaatttaaaaaaatactttatttgaatttggcattcgctgatgactattttaatttcttttttttttttaatctctaatcacttgggaagaagataataccttaaagaaaggttatatgtcttctcccccagtagcttgaaggtctcataagctctcacctccagttcataagaatttcctaactagtcactctacttccagttgcttccattctctgctattaatccacttgtatactgtgccagagtgatcttgccaaagctcaggtctgattatattattcacttaaaatccccctaaggatccctatggcttctaggataaaggcttgattccctacatggccttcagagcctgtgctgacctggcctgtgcccatctccccaagctcgtggagtgcctgtaatgtgggatctgtgtgcagcagaaaagaactgctcaccagtcctcagaacatcctgcatttatagtctcatgctattttacatggtcttctcattgcctggagtcataatgtctgtcatttactttaaaaatactttagcatagatgctttaattttattttcaacaaagtgc

SEQ ID NO: 127830 - DNA, 1024 bp, Homo sapiens
aagacattacccttcacaatttggaaaaaatgtgatggcacccaaataatttttcatggtgaatttcacccagaggatccctgttaggactccacattatgttccctttgtccatgttttggtttgtttgtatgaaaacttgtatctgtgttctctcacagaattaaactagtattatttaaaacaactaagaaggtacattgtccaaaggattgtggcaaactgacaatacatggccaatgtttgctttatgaaagttatattccagcaaatttgggccccccaaaatccaatccttaaatgtatatggagttataaagagatgtgttctgttggggtatatctctcaaagactttagccaaaaagtgtaagtgattgaagggttagctggcagttaaccccatggcactatgagtttggtggcatctgtaatattctgcagctttcagctgcagtgcctacctgagaattcacttttctgttattacaccgagtttcctctgtgctcttgactgtggctcttcccagcccctgcatatcaacatttgttttattcctattacaaaatgcatttaatatatttattataatatattattatttcttattctctacaaacagcataccccttcattgcccagtcttgcagaccacgttatattgtggcagcaaaaacaaacaaacaaacaaacaaacaaaaactgtacctaaagttacagacttgagagaatgacaccaaaacttggcctacagagatttttcatataaataagttgtctagttttaaatgtagaatctgcagttgtgtttttctttgaataaaaacttttcttcatattcaaatagtaacacatacaagtttgtggtcttgaagcaatgttgtttgagtgtagctgaagcaagacctgaatgcatctcctccctcatttctactttcaccttaatcaagggaaaactcattttgaagacatggggagccatggacctaaagataagccccgcactctgatctaaacctcagag

SEQ ID NO: 127831 - DNA, 1965 bp, Homo sapiens
gatttgagagttaatttttttctctcttcatttgtcttaaccccatctaaaccttaattagaatatcaaacctttggtgctttaataaaagcttaagcaatttgaagatgatagatgataaatatgttatcttcatgctctattgccgtttatacctgagtggattattccgtaaactcccttattttccaaagcctttatggctaggaagtcctttgtttttaataatgcccaatgtttctgcctgagatttagtatttctgtggtcttttcacttgatttttttgattctttgagaagtgcaggaaaatttgaaacaatttatggagatgatgaaatattatattacttcaacaattgtaaagacaatatgctgtgatctttgttttgggtatgaaccatatatgttcatttttaacctttcttcctcaatctgttactccatttgttccattgctaccctgttcctctgcttttctgtccttctccttccctgtctctttctttctatttgtgggaaagtgagagagagagagaaagtgaatgagtgagtgtgtgtgttttcattaaattccctgttttaggctaaatttgatggaaagccttccttgctcagattagggaaaccaggtgtgactgaatgctgcatttatttggtcgctcttatggggaatgatctcattattgaattagtctagtcataataacattgacaaggagaagttaagaacatagaagcctgagggatacaaaaacccattactaatgctctaaggaatataattcctaaattcaatcatcctattttaaatgattttttttatttagctgaaataagtaaattaacacagtttttggcagacagtctggggcctgaaaaacctggcatctgaataatgcaatgctgactgggcaggattgaagttggcatcagcaggtcatgtgccgatgaagcatttcttcaggaactgagtcccaaccacgccttgcctttcacagtcggattggtgaattgtgtcccaggaagtaggtacaagtggcatgtgaccacttgggacatgtattgctactattattctttattctgacatggatttttgacaggaaataggctagcataaagatacagcactggatgaatctgttcttctgattctgctttagaagacatctccttactaagactaagctccaagaggccgagactcttttctcagtgcctctaccaaagtaagtgttaattgtatgtactgaatgaatgaaaagatatcaaatcaaggctaattttggtgtggatgaagaccttggatattgacaggtcagtttatgtttaattgcctgaaagtttaaagtagccggcatgggtcagttttcttataagcttgtaagaaaaagcgtatcttccttgcagttcgttctttgtaaaacagaaaccatattgtagccctactactcatagtctctttccctctcattttttcttgttttcatacagacacactttatagccttatttttcccccgcttcttgtttttggtagggacaggttttgtgaaaggggctccatcaattctaccatatttgaagctatgtaaaatacataaaacagcaataccaaaatagccagaaataatagactgcagcagtgtacctcagcattccttaagcaatgtttaatcaagcatggacagcatctgtatttccagcaaatctctataggaatgttatcttctaacacagtaattaatcactagttgccgtgtgtcagaaaacttatttaacaagaagttgcaaagtgcttgtagttttcttaccttctcagccttcctggccagtggaaaatataacacctttctgtaataaagaaatgaaggatctggagggattccattgatgttgattcttctactcatagtattgttatcttgtctctctcttttcatgcacaccttccctctaactaa

SEQ ID NO: 127832 - DNA, 1095 bp, Homo sapiens
tcattcttaaacctgcacaaggtaaggaaacaaaagctacgattcgggaagcggtagggcgaaaaattgtaacacccaagacagattcctcgcccggttattccttcatttcttcattccttcatcaaatatttattcagcgtatgttctctgtaggtcctggcctcatgaaacttgcattactgtggggcaagatgcaaagtaataaataagtaaaatatatataaagtatttcagatgataatatatgctgtagttaaaaaaaaaaaaaaagagtaggcatggggaggggaccagagggtgccagagtctaatggaggtaatccgaaattttagagtgttaatggaagtccttaatgagatggtaacatttgaggaaaaacctaaaggaagagtaggagcaagccatgcagctatctagggaaagagcgtaccaggaaagaacgtctaagggtgaagagccagagggaggcatacacttaacatctgaagaacagagcagaaaggccagcatggatgaagtgagtgagcaggggaagagtaagagatgaagtctgaggtttgatctaaggagctgagatctggaaagtcattgtaatgacactgagttttactttgcatgaggtaggaagctattagaaggtttggagcagaagagtgctacataatgtgaatcagtctggccgcgatgttgaaactaacatcacagttgttagttggggaggggaggttgtaggcaaaggcagaagcaggaagctctgttagaaaactgtggcaataatcttctaggtaaaaggtagtggtgattcaaagcaagatggtagcattggagaggatgagatatggtcagatgaggatatattttaaaagttgagctaacaggatttgctgaggaatcagaagtgaaccaaagactacaaagtttttgatctgaacaattcaaagcatgaagtttttatttactgtaatgaaagtgaaccagaccataggagaggctattgaagtgtgtggagggcggagagggggttcagatagagaggggataacaagaaatgtttgagatgcctgttaggcaccagaatagacataaaaagg

SEQ ID NO: 127833 - DNA, 1012 bp, Homo sapiens
aaaaatacgcacacaaatgttcatagcaagcattatgtataatagccaaaaagtataaacaggttgggcgcggtggctcacgcctgtaatcccagtactttgggaggccaaggcaggcagatcacgaggtcaggagatcgagaccatcctggctaacacgataaaaccctgtctctactaaaaatacaaaaaaattagccgggcatggtggcagatgcctgtagtcccaactactcgggagggtgaggcaggagaatgcttgaacctgggaggcagagcttgcagtcagccgagatcgtgccactgcactccagcctgggcgacagagcgagactccgtctcaaaaaaaaagtacaaacaaccagatatccatcaacgtatggatgaatagaacgtggtacattcatacaatggagtttatttggccacagaaagacatgatgtgctgaatcttgaaacattatgttaaatttaagaagctagtaacaaaaagctattttgtatgacactattcatatgaaatgtccaaaatagtcaaatttatagagatagattagtaggggtcgaaaggaaatggggaaatagatagaggagtctttggggggtgatgaaaatgcactaaactagattgtgctgatggttgtacagccctgtgactattctaaaagtccttgagttgtaccctctaagtctgaaaattatatggtatatgaattatatctcgatgaaggagtttaaaaaaaaaagaggttgagttttaagacttgaaaaattaaatcattcatcataggaaatgaggagccaaagttttatcctcccattagtggggaaacttttaaaaggaaatatttggctcattttttagtttccctaatccatcctgagaggtagaagataaaggaagaatttttggagaaggaggtgatacttcatattagtcttcataggaattatccagaatagggagaaagtcatttggaagagaaagggtagttccggggactggagaaga

SEQ ID NO: 127834 - DNA, 1080 bp, Homo sapiens
gcattaacactgcatctcattctccttcaggcagtctgtttcgcagagacactgattaaacatttggggtattggggacagagggagggagggagaggttggggatttttagtggctagagccttttattgacaacattaaaggcttcatgatatatttgaccagaaattaattacagcccagttccccatttctcccttaggtgacagtcttctgttgatgtgtgctgctgtgaaagtaataataggtttcaaatgtttgtgaaaaacataaagtaattacttgctgtggtaaatcagtcatttgaagcttcagcttttctctgttctatgtgtgtggcagtctgtttcttttgttaactttaattatacaacatatgagaatttgtatttttcagttttcagaagttttgcttttttcatttcttggtgcatagttctccagggatataggtattgaaatgataatgacacataaccagcatttgaacaagggaagcacatgtgtgtgaggaagctgattgctttagttaagtttcgtagctattggctatcagctatttgccagttttctaatgggtcttaaatatttactgtctgttgtacagaggggaagaattggctttcaggcattttaaggctccttccaccaatagcacttgtttacattatgggccctcaagccaaagagtctgtaatagctctttcccctttttcaaattaaaaaaaaaaatctgtttttttctattaaaagctgcagctccttgcctggggttcttgccttccagtaagatctgtaaagatctgcctggataataccaacctctatgttgactcacctggacaaagagagagaaatttccttttggcagctgttttaacagggagccttgcccagacagaatagtgaggcctgtatactggccagcatggcatattatcacacatcaatttccttctgtctgcactaaggctagctcactcctcaaaataggaattgttcacatgtattttcaactcaaataattcatgttaatcttgtttctctattttgtctaatctctcttgttcattcctgatc

SEQ ID NO: 127835 - DNA, 1045 bp, Homo sapiens
gctaagtaaatgcagaaagattattagttttattagcctttgatattgaaattgtcatgttctctcttagctatgaagacctgctctgcccacatcaacttggttattttttcgtaaggaaattaaagtagaaattataacacaattactatcaaaattctactaaactataagtcgaaacaaaatataagaaccgcaattatgtgagaataacatgtgggaaactgttcctgctgctgagatgcgtaaagtgaagtctttggaagaaggcatggagttactaggtagccgcagtgtggagggtggctggacttctctgtcgctagcaatgggcatggtgccattgccaatgcttggaagatgagtgtcttcacctaacttgttaagtgccaactagtcttctgcctccaatgaagatttctcctttgtgtgcacaggttcttctactgagccccaggagtttagggtcatcatgtgcccttaaagtgtggagtgataagagagaatctctatacctctgaccaatttggaggaaagcagagatttagtgttggggccacttacacgtaatcttctttttctcactttttcgctgagaggaatgtggtctaatctagacacctactggctgccttgaaagagcattctcagctatactggcagatctagcaaagagatgtgaaaggatcctcaggtggccccttcaggggtctttctgaggagtcaggaggaaccagccattgtgatgataagacacccacccaggtggttttctcttagtgtgataaaggaagctgaccctgtcgaggccaagatgttcacccagtgggttatccttcttatgcagagggatgacgtaccctcagtatccaaaacattctaatgtcttcattgtctgtttacattatgcctcctcctcactgtgggagttccaagaagttttgcgtctttccctataacttttataacttttgccaccaccctgactgatctcctacaacatacaacatgggtaaacctcaaaaacattgtgctaaatgaaaga

SEQ ID NO: 127836 - DNA, 1049 bp, Homo sapiens
ttttaaagtagccttttcttaggctcttacatatctttggaaccatccactattgggagcttctctccactgctttctaaaatgagaatagccatgtacaagcatatgatttaaactgtttcaatatctggaacgtttcctaaagaagtcacttgcttgaggttataacagattggcaaggggtcagtcattccattcatacatcaaatatttattgaataaatgtgagagctagtcattcctggagctacaaagataaaaatatgattcctatttttacacagtatagcacagtagacctcagtaatgggagcagaactttgtgataagaattaagagagggaaagcattaaggtaagaaaggaggttaaaacctcgtaagatgccctcctaggtatatacccaagagaaatgaaaagcatgtgtccacacagagacttacatacaaatgtttatagcagtaggtagtattcataatagccaaaaggtagaaacaactcatatgtccatcaatgatgagtggataaacaaaatgtggtatatccatgcagcagaatattatgtggccatagtggacttgaagtactgatacgtgctacatgctgccaagtctgtcctgcagactctggccaagcgacagatggaagaagttcactggcacaggtattttgcctaacaatgcggctagaggaccccacagcttagcaccgctgatgagagtgcagtgcagccacagcagcccccataaggtggagacacttgcatttatttcgtacagatttaatgacaaaggcttggagcaaatacactttgtgggtaataaaccttgttgacccgcaccccccctctgcccccccagctcacccccccgccccgagtagagagcagtcctgcacacgactgatcaaaggttggtttctggagagagtaaacaaatttatctagataagtctctttacagtcctttgttatcgaccctttgctgtcaggctcccaataagagaatttggctgccttcagccaaattttcttttgaagcttttgcaaaa

SEQ ID NO: 127837 - DNA, 1019 bp, Homo sapiens
taagaaataatgaagcattctttctcagctccaaggtagaatgatttcaacctagaattagacatccaaacagtgtatcggccaattttgagggtgcaataagggcatcttcagatttataaagacttggaaagttgacttttcatgctcttctttctagggaactttttgagaatgcatttaagcaaagcgagtaaataaaccacaaaaatcagaaaacgtcgtgtctaaaagagacttgatccagctcagaacagtgaaaaggtaaccatgaagcaggcttagagaggaaccagtccaaattgggataatgagatacagctgttctggagaaagttctctgggtgggaaaagactcaagaaaataggtagtatgatggagaggttgaaaaagaacctaagatgtgaaaaactcaagtagtacaagagaaaggaaaggcaattggaaatttttaggaaaaaaagcaactatacaggaaatgtgtggcctgcatgcaaagtgaacttctagaagcaccctctttgagaggcctcaaggctgtgatatagttaggctttgtgtccccacccaaatctcatcttgaattgtaatccccataatctgtacatgtcaagggagagaccaggtggaggtaattgaatcacgggggcagtttcccccatgtttttctcgtgatagtgagttctcatgaaatctgatggttttataaggagctcttcccccttcgatcagcacttctccttcctgcagctttgtgaacagggtgccttgcttacccttcactttctgccatgattgtaagtttcctgaggcctccccagacatgttgaactgtgagtcagtgaaacctgtttcctttataaattattcagccttggacagttccttatagcagtatgaaaacggactaatacaggttgtaagtgactgatagagaaggaaatataatccttagcatcactggccaagcactatttgtgtatatgtgatggcgtaaatgctttttattgtttttcgt

SEQ ID NO: 127838 - DNA, 1227 bp, Homo sapiens
gattctgatcccggggagttttttcaaaatgcctagaactgtgaataacaaggtgcaaacatagataacttatcttccactgtttacctttaaaaggtcaagacccagtgcaatctaggccccctatacctactatggaccactcagtagaacagacatcacatttcctgaggctagtctgagaagcatgggctaaggagtcgcagtatcgattgtataaggattagcatatctggcagatgggaactgtctgaactcattcaactgagaggcatctgcatcaggcggattggcattgctgaactttcacacggcaaattgaggattttaacatgcagcccaacttctcctgtggagatccagtgaacacataaaaaggtttcagtctttatgaattcctggatatattaggcattacagaataaaaatattttcccaagtgctgtattgatactctaggcacctatacttaacatttatgttcttcgggaaccactccatgtagtcagatattcagggattgttggactctcgtttcttttatatatcctttaattgccttagactgctgagcttcattatgtgggtcaattagtcttttttgagaaatcacttctaacacactaattttattctctattgcttccttctgattcctcatctctttcccagtctccaccctctaactcattctcatttttattttacttctcctgtttatttaccttatgttccttcgctatcctccacggccccatgccctcatcttcccagagagtgcttgaggcctagaccaagcagagcagccacaccacaggctgctcccagtctgtgtcacttaccattggcagtaactaggggctcttggagcatccctgagctatcagttggaaacaagctcttcctaggtcttgactaggtctaggtcaggatgctgagaatcaagatgaatggaagtttgcttacctagcagtctcaaagcactccaaatgcacatgtaaagagatacccatgtgtgtctacatggtaaatcccataacctgtgttcccacttctggagatcctgaggtttctgccttcattttccttgggggaacatggaaaggtccactcacctttactttgttcccctctcctgcttctgtgtatggtctgagttgacatcttgcttaatcagaaatagaaatgggtgaaagattgctatatgaggccataatgatcaataga

SEQ ID NO: 127839 - DNA, 1504 bp, Homo sapiens
tttacctccttaatttatgcatgaagccaaaagaaaaattacttcatattcttaataaaaatggcataaggtttagataattttttactatatgcagtaaaaatgcaaatgtgtgtggcttatttgcaaatgtagacattaataactgatatttaaacagtccagattagcaattttactgatatatttaagagatttttccaataatttgcacactcaaaatcaatttgaatacaacatgtaaattgaatttaattttttatataaaattgtggttatcagcttgaaccattaaatttactatttaatatatgctttccagatcacttggttagaatttcattgcaccttatctatataaatttaattaggcttgatatcatcagtatattatagaactaattaaagatttagataagtgctgagggggcttattgaaaactccataaagttccatttggaaaatgagatattcttccttcagttcattgtgagagaaggaaacagcaagaatgcttcttgcagtgtttctgaaaaattatttaactggatttaaagggcttattccattctttgaagagctttttaattactctctatctttgtgcagtccaacaacagttacaatctttatttaaaggctttaaaaatcctcatttccatcttctcccactgagccagctgtgttacattctgctgggcatatgtgcaggtaggtagtacagggtttgtgtaccctgattgcgatcatataatatgtagcagcatttgtggggaagtctatctagtcctcccaagcagaataaacattgagaaagctcagcgagcgcctgccacaaatgtcttaggaaaagggaaaagaaagaaaccctagcccaggaggatacctgggaaaaactgaggcttccactcaaaagatacagcgactttaagtaatcattttgcagaaatcacttttggattcccttgtatctgcatctctgctatagagtataaagcatattagtttaaaagactattatttcaactaagtgctttgtgtcttcattacaaagcacaataaagctttttaatacaataaagcctttattactttcaattgaatatgcctggaaataaagctttatcaaccacatttgccagtgtgctcaatgctcttgtcaaaagcactttttcttcattgcagattgagtgacacagagcatgctaggaaaaaaaaaaaaaggaaagtgaaaggacacatgacaaatatgggccatctacgactgggcacactgtcgattacgacagaggcctgaggaagccagggaaccggataaattgtcaagagcctgtgtggtgtaatagaaaggttacaggctttgggctcaggagatgcagatttaagtcagagccctgctgctgattagctgtgtgacctggacctcatcttttccacacctaaatcttgtttcctggaaaatggaaataatatcagtaatgctgccctggccaggcacggtgg

SEQ ID NO: 127840 - DNA, 2211 bp, Homo sapiens
gtggagaagagctcaaaggagcctgtgtagagtttgctcaaaagagtccttgtcaccaccttcctcccattttgttttctccaccaatatccaggtcatgagagcagcccttcctctgagccacagggaagtaatcaataaggccacatcccgctcactgacatccccactgaaacaggtgaagcacatgtggaaggtcatgagatttttgaaagcactagaaattaggagactaattctgaaggtagcaagtgtgagggaaatggaacctctgctgcgtcctgcctaccaccgtcttctgcaggatttgtaaaaaactaggttcaggtttccaggctatttttgctgctgtttgaacagtgtctactttttctactaggaatcagcatgtattttctttgacatctgtatctgctgagatcacaggccatcctggtcaccaccttgctgtctagaacagcgtcaactcaactgagcagtcatccattaccacgcataaagatctgaaggtccactctgtgaaagagcagacaatgcaaggcatctcctccttcgctttaatgtagcacacgttagcacaatgtgcacacttggagcagtcatctgcacctcagtttccagctcccccgatccaatgctgttaatatgttcttgccagacacttatattcacatagcactttacaatcgacatagggctttcacaaatatgatttcagtgagtctcttgatgagtcaacatttttgtctccccaagcattttctgatttgaactattttctcacagcctaactcagcagttttcctggaatgatgtgtgggaggtagggtatgatagtgtattgctatgtagtcaaactttaaccctgaaagtataaaagaattcaatactggtgttattgttaactagccaggtgaccttaggcaggtgttttgcctttggagcctcaggttgtgaggactaaatcaggtgtatgtgaaaggacctggtatatagtaagtgttaaatgctaattgttccatataattatggtcctccttaataataaacattaatagaatcattagtgaatctttggctgaattatatttctatcatacgtagagttgttcccaattctaacctatatttctcgtaagggttactcattactagttgttatcaatgtttcttgagaacagtatgtagggatggagaaagttcaaaggcatttagtacaaagatgctgggggtcagttaacttacaaaagcgtagagccctgagacatgactttaatacatttctggggcacttagtgaaaatgtgagctggtgaagatgttgccatatctgtcagcttacagaatcttctgtgcacttatcacaggagaacatggaactgcagcaaacatctcaattaatggatcaatcctcacaacagtattggctgcggacagatgtcttctgtatagttaagaagtcagggttccagtttataggatttgcatttttataacagctttatcaagatataatttacataccataaacattaacccttttaacgtatgcaattcattggttcttagtatagtcacagcgttgtacagccatcatcaccagctagttttggaacattttcatcaccccgaaaggaaaccccatatccattagcagtcactcctcatttcccccaaacgctacccctggcaaccatacatctactttctgtctctgtgggtttgcctcttctggatagatcatagaagtgaaattacacaatatttagtcttttgcggctagcttgtttcaattagcataatattttcaagatttataaaattagcacttgtcttaataacagggtatgagacagttaaaaatatactcaggtacacatcccaacacctggcctacagcctgctctctttttcatttcctttttctgtaggggtggggagaaggaagctaaagtgtttatatcgaagtatggcatacacacagtaaactgcacagatcttaagtacacagcttgattcctcttgacaaagagaatacacccttataaccatcactcctataaaaatacagaatgttaaaaccacctcagggccgggcacaatggctcatgcctataatcccaccacgttgggaggctgagacaggcggatcgcttgaggccaggagttcgagaccagcctggccaacatggtgaaaccccgtctctaataa

SEQ ID NO: 127841 - DNA, 1051 bp, Homo sapiens
ccaggtcacatttgacctgaaggagacatactagaggtgagagcctgatgtgttgttctttactgaggtgctgccatccttctctctttgaggttgattttgtttagctacaagcttggggatgtggagttgtgaggaaaccttctagaagattggcgtggtctggtactagaaaaaaaaaatagccaagttgcccaacagtctgaaggctttcttaccctcaggtccatcctccatgctgcagctggaaaggtctttctaaaacagttgtcatcatgtgtgacttctttctaaaatcgtctgtttccagattcctccctgtcattggttccagattccagggtgtatgtaaactgaaactgattgtcctcatctatacgaaaattagaaaaataatgactgtactttgtgagtttctcataaataatgactaaaagtttctgagtttcccacacaataaaacatgtaacctttttgttctgagattattttctttccacttaaggagtgttaaaataccttcttttatcaaatcttggtaataataaatggtaattgttttgtttgaataatctaggcaaaataaagcttaattcaccttcatccttccactcacccatgaaagtccaaaatcttagcatggcccacaggtctgttaggctctaggcccagcttgccttgcccacctttccccttccttgctcttccccacaccccatgcactccagtgaggaataaaccacttgtcgttttccccaaataccgtattcttcctactgtcccacccagttcacacattctgtttcctttgctcgtggaggactttatttccttcatatttgcctcattgttgacaacttctccttctctattaagccttccctggctgctctcagaaacctacagcccttcctgcctgtgatcttagagaatctcctccagacctttattatggccactgtcacattgctataagtacatacagtgcctggctactttcacaccagactctgcatcgccagagaacaaggactatgttttacttacctct

SEQ ID NO: 127842 - DNA, 1447 bp, Homo sapiens
ccatgagccagaaaatgtctcaatcaaatgtgcattcactgatcccatccaggcagccccagcaaagtgtcatcaaatggaaaatgtgttgccctggaagccacggctgctattttaatgctcgatgatgaagaccaagctttcaatttcctggggcctcaataagtgctgataaattatttatccctattgggtgacatgatttcatttcagtctgacagtgtttatcatggaagctcattctaatggtatagtttggggcatttttctattttctctttaggacacctggtagcaccctttccccacctccaggtgaaactgttgctgtgtcagtttagtcatctttgctcctgggtaccattctgaaagataaatgaatttccttctgtctttaaatatttatgattctttatgatctaatatatcagcatggttatggaggaattttttctctctaactatagaaaatacaccatcaattacctgtcaattttgttgaataactcagctttgcaattcaggggcactgttcatacgaagctcttgaggactcttttagtctctcagtccacttcagactgtcattccgggatttataaaggtcttcattgcacagaggatattgaaacattaaggacttaagtggcatgccctttatcactcatcacactgtggaagatccaagagtagaaatgcaggcatctttgttttgttgtttgctcccagcgtggaacaatggcctctgtagaaaaccagccagtatccctggaaacaattcatcagatttttcaaaagaaatccaatttcatctggcatgatgggctcagtgttgcttcttaagataaatgataaaaatatcaacatcctaatacaaagaaatccagttcttttggtttaatctcagtgaaaagcatcacaaaccttttattgcttctgtagccttctctgatgcgtttaggtccttggttgaaggagacagtggttctgtaactgttggtctaccaaacagactctgactgagtcgtggctggttcagaacctttaagaagcacatatctggggatggggcctcaggaatctgcacttttcataggcgccccaaggtaattcttaggtaccctaaagttcaagaactgcgagtctagaaatcgcagctttcaagttccttctagctttgaaagaatcgtgagccccagattcactctcatttcatttggtaaatctcgatgcacgcatgagctcttcttgggcaattttaaaaatgtatattcttaggaagttccattaatagacaactccctccatcacctgtgcatctacaggaaacagaattagatgacatagggcatcatttcccaaaataggggccaatatcagtgagagccaggggacatgcagagctgtaggataaatattaatatgatgcttcttcctgcagcatcaa

SEQ ID NO: 127843 - DNA, 1856 bp, Homo sapiens
ggagtacatccacgctctgaccctgctgcaccgcagccagactggggtgggggaactgaccacccagaacacgaggctgcagaggctcaaagagatcatctgcgagcaggctgccatcaagcaagccaccaaggacaagaagataactaccgtttagcagggcgtactgcggttggtgacgggggtcccctcagtcacactcacttttttccttggtatgttattgagtatattctgagcttagttttctctacagtgatactttagtggagaggaggtgtaaggattctttctctctggttttggcttttcatataaatgctaaaggaaggcgacagtacagagtgttttggttgaacaactactttaatgcagtcaaatctaacgggactagggtgggatagggaggaaggtggtatcaaattgttggactctgaaaaacaagtggatggattactaatatttgatttattactcaatatatatataattccagccttggaaagtaggaaagtaggctgctacctaacttttagtcccttccaaaaccatttagtagggttctattacataaacagtagggtttttcctctcctgaccttatccgtttacagttcaatgaaataagtgtatgtgcattgctgtctgtctctattgccaaaatcaaataaatggcttctcagctgctgtttacaacaaacttccctaaccaaaacagaacctctaatttagggctaggaatagaagtcttttgatcccagtccctgggacagttttgtatgctgtatcttgtacacaggttgtaggttggtttattgccattttgttttatttctgctgtataaaaaccaagagccagacaattagacaactatggaggaatgaaaggcaattcaaacatctgcttgattcccgccccgccacccctaatttctgagagaataatggttagagaacattgcatctcacttgaaacatcctttgggggtaaatgattcttaggtgctcacttggtctgagctcagctgaatgcagggaagatgggacagagtgacatttctcctctgtgcggcctccagctgagcctgtctctgaattgttccctcccccgcaatgtgggcacttaccatgttcctggcacactggacctcaccatgtcccccggtcaccagtcctcttgctgcccatggttcataggtcatagaaggcagcaatgcactgactgggccacatcttgaaaactcgtggaaagggaaaggggaggagatgggactttgaccacacacagtgatgcctcacaccctgaaggtgggggattttgtacctgtttgtacaactttggtcttgatgggaaaaatggagaattaaaaagtgttttgagaagcttaaatgtttcatgttatttttcttgtgttctttattcagcaaatattccccagaagcctaatatgtgctccatgctaccacacacaagggcaaatggatagatgaagaggacacccttattatctaagagtgtgggaactggactggagccaaaaatcccaacagctcaaactcagggctgggtcagaatcaggtcaggcagtggggctgccgggaaggggattcagtgggcagctggaggttccaggggattctggtgggaaagaatgtagtcaatctgtctggctccaagggcctgactgggaagaagttgaatctctgtaggagacaactgtggaaaaacatactgccctaaacgatatcatgagaaatagtctaccctagaagcaggagtggaagaaggggggatgagaggagattagggttgcctaagctgctgcttcatggccgtgacccccagcattgattct

SEQ ID NO: 127844 - DNA, 1040 bp, Homo sapiens
aaagggggtgggctagcttaaagcaagcttacaggggcatgaaagcagggatacagagggaggacaaagacaggattgcacatgactgttgccaagcaacccagatgtctgttatctaggtttgtctgagcacaggcttatcctgtaaccttcactatggtgcccaggcagctgtagttcaggcctactcaggctcctcatgaccttcattgtacttcttagataaaacagaatacttgaagtcactagttacagagaataggaatctataaactcattccataaaacaaaggaaaatttgtttttcttctccttatgttgagggagtgctgggagagtctccagagcacattagataatattatcaagacttttcctggatctggctgtgcctgttgctgcctctgggacaagtcagcctaatacaggaaaacttattttgctttctttttaatttgatttttctttaatttcctgcatcaaccatcacagtgagcaatcctggatccccccagtttatttatgtcttttgctttacccccctttttcatttatttgaactcctgtagtattagtgagctcagatacataggtcttaattcagtgtctctgagtactcacaggaaagcttctatgtaaatccaacacataaacagaaaaaaaactataatagttaactatatataatattatatctataatattatagagattataaatctgctgtctataataattaactgttattaaagcttaaaaccccctacaagttgccacacatccctgctccaaaatcctgatgtctaattatctcactggaccagcccctttttccttaggaactttctatttcagtaccatttattacccatcctcagcagtaagtgtttaccctctaacaacgtaggcccaatcaccaaaacatgaaaaagattggggaaaagaatatatttttctaccctcctccccaacagcttagagttccttgtatttctctgatgtcccagtggatgtaaatgttaatggttttgaatgagatt

SEQ ID NO: 127845 - DNA, 1050 bp, Homo sapiens
gtgaaatggtatgaggaaaacattccgcatgcatcaaaacctggaatctacagctataagttttattcctttttcacatattaaaagttggaatgtttactatattcaaagtaatcatgggctttagaggggctgtgggtttttgtttggtggtttttttgtgtgtgtttttgttttttgccattttccctcccaaaccaggcagaataaagaagtaggagatcaaaagactccactcaatatttttaaataattatcatttcttaaattttaggaaaattagagtagacatgaagactgaatactaatgttaatgggtgtgtgttaaattattttgtgtacctggctgcacgtgaacaacatttcattaaggaaaaatccaagctttgtcttctttttagaaacaaaactttttttcccttttacatctctaattctggaaaaggtttcagcagtgaataaatatgatcctccccctgaagtggttgcagctcaagaccacctgacccatgttgtcaacagcgtgatgcagccgcagaggatctttgacaggtacttattagaaatccaaaggccggaattcagggtgagcaagcaaaagacagcctcatcacttcccctaacccctattttgtgacccctttatttcctataaaggctgctttttccctttctctgagggaaggggccaagtctttatttgatagacaatattgtctccattatggtatattattaatatcatgtacttgagtgtgttgctttcttgctggtattttcccaagcatggtgatgagttgattcaccttcactagtttttctggccacttgtatggtggccagcgtgtgccacacaacagtgaaatctcaaaaaaaaaaaaaaaaaaaaaaccaggaccaatttttctgccttaggagagaaacacagaccttaaccttaacagaaaattgtggtaatttatatccattgtaaattttccctcagctgtgagtggaagctaaatacccttgccaaagactgttccatgaattcacattattagggagtcc

SEQ ID NO: 127846 - DNA, 1021 bp, Homo sapiens
agtaatagattaatgggtatagagtttctgtttggggtaatgacaaattttggaaataggtagtgatgatggttatacaacattgtaaatgtaattagtaccattgaattgtatacttacaatggttaaaacggcaaattttatgttaaggtatgctttttaaccaaaatataaaattaattttaaaagatggaaaaatataagaacaatgaaatcctgtgctaaagcttcttttgctccttaatctctcttggttttctgtaatcagatatataaggatgtgttccccacttttacaatttaacaattgacataacttggcaaatcataccaggccttttattaaagataaaggaaaactttacggactagtcaactgctcagttctcctctgtctgacttatcataaccatcatcatttctttctaccattagtcagattaatgatttgcaaatacaattttattttatgatctatatagcaagaactcagggtgatagttggtacagctttctaaaagctttgctggaagcattgactatcccagaagtaggttgtttagagacaaatggaaggaaagacatcccttaatactgagttgtgaatatagtttttaccttattttgtagaaactattttgtttacttgtgctttttaagccttcgggtattagaaataaatgttatccacattacaatagggaaaataagacaattctatatatatatacacacacacacatacacacatatatatatacacatacatatattatatatatatatgtatttatttatttattttgagatggagtctcactctgtcaccaggctggagtgcagtgctacaatattagctcattgcaacttctgactccctggttcaagcgattctcctgcctcagcctcccgagtagccgggattacaggcacgcaccaccacgcccagctaatttttgtatttttagtagagacgggatttctccatgttggccaggatggtctcgacctcctgacctcg

SEQ ID NO: 127847 - DNA, 1044 bp, Homo sapiens
ggggagctgctgaatttgtatctaagaggcatctgtctggaggggatatagaggatgaatttgaggagagcaatacaggaagcaggaggagtggcagggaagttattgctgtagtccaggaaagaaggttaggcctgaaataaggctgtgggggcaggaattgtcaaattaggtaaatatttagattgcatgtgggagagggtagattgtgcaagacaggaagaaaattaagatcattacccattttctgtgaggtgggtgtggggcactttagagttgtccgtgtctcatttaggtgaagaattttcgaaatttaaaattgcttttagaaatgtataattttcctcttcgggcgcctgtttctgaggctcctgaaggcatttggggttgcatttccattagggtacaaaagggaagcgataagccaaattttttttatcacttgtttgtgtttctgttattgctttggtagtatatgttcctaatgtctcagattcagtggaactggacaatattttgtttgtggtcagaggaaaggagtggaaaagagtatcaacaggagatttttagtgctattattgattctcttggtataagggaaacctctgatttttacacatagaataacaatgtttaaaaattgccattttccatctatatttacaaggttcctatcattcccatttgatatgttgctcagcaaggtgatctttataggaacaaaaaaacattgtggcttatagtgactacattagtaataccatctttagctcctttaaagaaaagtggcacctaatattcaaatcaatggagataatattgccacttggcatgaaagccttcctcaaatatttaaagagctaaatcagttatttccaaaacttcaaaagataattgaacaaagggcatgattgggaaattcacagaagaggaaataaaaatggccaatagatatgtcaaaaagtatttaacctcattataagttgaaacaggatagactttttttttttgtactgaattggcagatgaaaaacaacttaatgc

SEQ ID NO: 127848 - DNA, 1038 bp, Homo sapiens
ttttaccttgtatagtggtggtggcatattttactacaaacgattgtcagcaatctctcttcctaatgcctcgcagctggatcagtaataaaccacttctcaggctggtttctgcgccagaaattagtttacagaggatcagcctacttttggaagttttagaggtttgtggcagtacattctatagcaaatctctcaaaacctctttgccttgatagaaatacactgacttttgtcagctgcagtgaccagctctctttgtctttgatatgttgcttttaaataaacctcagctggaaagtaactcttcaaagcagtttacctcacccagcctacttttaatcatgttatgcagtagcccccaggtacagaacacaaaaagaaaaacaaatgagaaattttgcactaaatatagcatagttaaaattcatctctttaaaaatggcattactgttttatcaggacagggctggatgttcttaaacagccctgggcctgtcattacacgcaggaatggtctcactgcttctgaagccctttcactctcaagtcatttgggccttagagtgtgttgaactctaagatgttacgaaccacaagcctacaaaaaggtaaagaaccttctgggggactaaattatggtttaggtcaactctagcaaattgtatcatctcgttactggaggagacttctacacagaactctgtgattctggtgctagcagcaaaacacaattgcagacaatgcagtggtatctcaggctgagatgtccctcattaataaaggctccaagcacataggtgggtgtcagcaaagatccaatttctttgtccccgtcttacattcagcattcgagcaatgcattaattcattctcatgctgctaataaagagatacccaatcttgggtaatttataaaggaaagaggtttaactgacccactgttccgcatggctgaggaggcctaaggaaacttaaaatcatggcggaagggaagcaaacacatcctttttcacagggcagcaggaaggagaagta

SEQ ID NO: 127849 - DNA, 1054 bp, Homo sapiens
ttcactcaacagtgccagatacctatggagaggggaagtaaaacaccttaggtcaggaataataaaccaatgagttagctcagggccggtggacatgttcactggtggaccagttggcattgacctaaacggacagagaaatgcacatggaggagaactacgttgaaatcaagatcctatgtctgttgtattttctctttgcctggagtaaatagcattataagtcattccacccttattagataaccaaagcatattggtctcaatagctttctcctgaaaaatgtgattgaatcttacctgtagcagttcactcttaaggttgaaagaactgtcaatatagataaaatccattccttattattattgattggtgtgacatttgaaaatgtgtctaaacaatatttgtaagtaaaagaaccagtcataagcctcaaatgtgttcagtgtgtaccaagctggaatgggagactggcccctcttggctttaaagtagcatgttgtctttttctagcagcttcttcctagtagacattccagggatgggaggggccagggatcatgtcttactcatttctgtatcgccagcccctggcatagtgtctggcttatgttatgtgaataaatgaatgcttgccaagatctcttcttccctcaagtttctggaaaacctgagggttcgtgatacctgttcccactcctcatcagcgggttggcaagaaagcaaataaggggaaacatttttaacattccaagcaagagaaggaagaacgactattgggaggaggtacaccagagattgctcagtgtgcagcctgctacctcacttttggctctggattgcctggtggtagaagggaagagtattatgtagttagcaccttacatatttgatgctcaggaagaaagtgcaagaagatccctaatagaacattaaagattcttaaaagtttttgaagtaggctgcttggggtgaccagccccacccttacatctccatagttggtacagttagcttgtagcagctgaagctgatgcctggagatcactgtct

SEQ ID NO: 127850 - DNA, 1896 bp, Homo sapiens
cattttgcttttttttttttctatgcaaaagtcagatgcttctatccattgctttctgtgattagggcggccctgcagcatatctcacagcagacacagtgttcataacaaagaaaggttgtgccgggcacggtggctcacacctgtaatcccagccctttgggaggctgaggtgggtgtatcacttgaggtcaggagttcaagaccaatctggccaacatggtgaaaccccatctctactaaaaatacgaaaattagctgggtgtgatggcgcatgcctgtaatcccagctacttgggaggctgaggcaggagaatcacttgaacccgggagatgaaggttgcagtgagctgaggtcgtgctactgcactcccgcctgggtgacagagtgagactctatctcaaaaaaaaaaaaaaaaaagaaaggttgttatggactggacacccctgaagcccattgcctaggccacagtggtgacggcaggatggccctgctcagcaccgcaagagccatggctgtccctgttggcccagccgggcactcacagggcagaagggtgggtctcaagtgggaggataaggcttcaccaccaggagattcccctctgcccgatgactctgttaagagtcacgacccatcaagggaatgcatagatggagatatatagtgtgtgatgtgtaaatcaggtcaaacctcaacgacaattgaaagttgttattgtcctatgaggtatcttagcattctcgatgggtattgaggatggttggatgtgctttattgtgtgtggaaacatgcctctctttgctaatcatttcagaggtccagttttcctttcactggacaatcttgaataggaggaacgctgttgctgtaatatgcgtagcttctgtgtgctcttgtgtagtctgtgtgtgatcaaagggcacggaagtggctgcactttcacatcccttttctttacttagctggaaccttacataccagtacatgctcctctgtaagcagctgaactcaccggccacttctctgtttgcctatagacaaagactgtgtgtgtgtgtgtgtatgtatgtgtgtgtgtgtggtgcacacattgtgttcttaaactgagacgtggctctgcaggtctcctgggctcattccatggtgtggtatgtttattccactgtccagagctattctctgatggatttgagcaacagcagtggagataaatgtcctagagtcaccaggtcgcttggagaagtcatttaagctgcctcgggtttttgttacttaaaatgtggatattatttctccacctaaatcactgagtttacagagtaataatgtgttgctctggacattgacagctttctagagccagtaatgggctcttctgaaggatgctgaattagaagtgaacctattcataggatcaaaagccacttgctttgaaatatgtagagttcctcagaattgacggtgctagaaatatccaagtgttaaataaccttttaaaagcaacaaaagctacttttttcttaccacttaatagaagaacctgtccctagaggcgacttcattgctatggatctggagtctctgaactcttaataggatgcagcctcacatacataatgtcacccattttatgttgatgaaaacattacaagttttcttcattgggtatgtgttgatgttcacagacagtacttgggcccattaggttttcgcgtctggtcttagagcatgtgtattcatctcagcgtgaatacctcagccagtcttatgaataggaggctatgtatgggcagggaatagattagattagaacactcgcacaagatgaccacatatagaagcagaaagccccaaattccctgggaactgttttttctctagtagctgaatat

SEQ ID NO: 127851 - DNA, 1095 bp, Homo sapiens
ataagttttgaattgctaattttgtagctataaaatggtacagtcttatttactttggaattctgtaattactagtgtgattgaacatacttccaaacagtagttgctagccgcctttcctcttgtgttgagttgttaaggctgtctatatcattttatcattttcaacttttctgtgcttcacagtctttctttgtaaagtgaggtactattcaggcaaatggtaaaacacttccttaaaaattaaaactattatttgttttaagaaaccaatttaatgactttagtggctgctatagcctggagtcaaggcaagtaaagtgatgcgtgatccaattctatttgcaaggaagacaatgttgctgttcctattatgttcagtctgtattaccctgttcaaaagatgaaaaattcagctgtgaaaaagcaatatggctatatcctcttgtaacctctacagagttatatgaaattcccgtcatcggagtgaccctgcccatcatgtggttctacctcctcatgaacatcatcactcagtatcctttggactgtgccgtcacccttatgtcatcatcaggttcttttggcacaggaatggtcattcttttcttctaacagtgtgttgacttgaatatgattttcgctggatttattctgcggtaagctggagacagagaccaattcagggaactccttgtagagggcagaagagatgctagtggtgtagtaggtcagtaaggcacagggcagcaggaggaagtgctctgagtggaagtgtaggagtccattgattgatagtggcgggtgtggtggctcacgcctgtaatcccagcactttaggaggccgaggcgggcagatcacttgaggtcaggagtttgagaccagcctggccaacatggtgaaaccccctctctacaaaaatacaaaagtaagccaggcatgatgatgggtgcctataatcccagctactccataggctgaggcaggagaatcgcttgaacccaagaggtggaggttgcagtgagctgagatcatgccattgcactccagcctggacaacagagtgagactccatctcaaaaaacaaacaaaga

SEQ ID NO: 127852 - DNA, 1715 bp, Homo sapiens
cagtaattccacttatgagggtttatcctaaaatatatcaacatttgtttaaagatttgtatacaaggatgtacattgattttaataatgaaataattggaaataaccatcctcatacatttaagtgtgctacatccatatcatagtcattaaaagcattctatttaaaaaattttaatgactgatttgaagcaaaattccaggcaaaagctcatgaaaaaagcaagatataaaattccatatgcaatctgatcctgtcttagtgtaaaaaaatttacataaatgaatatataagaagatgtagaaagctgtaaaggactagatggtaataatgtatttttatttctttttacagttttgtacatgttctacaattagttcataatatttgcaggactttaaacaataatgttcttcaagaaaaacatctggaaatgaacaaatgcagacatcttgtcacctgatgtttgttttttaggtattggggcattgacttttgctcttctgatgtcagcaaggatggggatattccaagagactctctacaaacgatttgggaaacactccaaggaggctttgttttataatgtaagcaacttcctgaacctgggaacgtgaaaattcctaagttgtaaaatgttacttcaagtgaactattaatattctctgatgtagttgaaggtgtattattggtagatggctttgagacccacagactgaagcagttttgatgggatgctctggtgggttccaagtcacagttcactacatgagatgatcacgatcaatcaaagcaaattaaattgtgtctgcatatttagcaaatccttttgtgcagaaagactatatgtttaaatttctccattccctgttgttgaggaaaggatgctggctccattgtttgctttgtctgtgatggccctcagaccctataagggcaagaaccataatttgggggttaatatcctgccatacaaggtgaagtggtcaagaagcactgtatacatttaacttaagtctaacttgcttttctttgtattgctgtcaaacaacctgtacgacttttaatcattgtaaagctactctaattattctataatgtttttgcacttacatttatctgacctgtttctttccatagcacgcccttccacttccgggtttcgtcttcttggcttctgatatttatgaccatgcagttctattcaataagtctggtgagtttggggttagacagtagaattacctgacagtttctgaggcagagtctcagttttactcttgacttgacctcggcctttttcataatcctattcaaatcatgtgttcctttcgaaaatgtctccattccactttccagtcattgcagcagcaaaagcttttacaggggtttctcaattatttacaaatgaagtaaaagaatatcttcgagttttccattttgctttggaatttgtgtgtttgcatttgaatgtgaaatgtttgatgttttgagaatgcaaatgaatacttacagcacactgcagagactggagccctgcgaagttgggcagccgtccagctctctcaactgctgtttatccttctctgccatgaaaggcagagctgctcacagatccagcccaagctgccatggagcagagcaagaggggagctcaatgatgacaaggtttttctcctagttacagatgagacaggcagcagatgaataagca

SEQ ID NO: 127853 - DNA, 1049 bp, Homo sapiens
tcaacactgggtccatttttcgtttgacagcagtcttggtgattcctggtcaggagggatatataaacattccaggagacctgagcatatttctgtccctgggctttgctacctaagctgactgggatcctgattaaagacctttctggtgaagcaaagatcccaataagaacatatgaccaatttcctgcagtttactaggaaagctgtatcgtagttctgggaacaagtgtgtcgtcacagtaattctcactcatggcctgatacacgcaaggaagagttaaataagaaagcttgacattcttctctgtgagatcaatgctaagtatatgtgatccaaaggctatgaacattgagataaaggacagtgggtaattgaaatccatccacgctgttattctggccctctaattagaatgcattttagtgttctgtatctcagtttttgtgccttcaccccctcttttattattcactatacaggaagcatccaggatgtgggaacattgtgacatttgcacaatttttatttattgctgtggaaggcttcctctttgaagctgatttgggaaggaagccaccagctatcccaataaggtatggtacattagagtctcttttagcttttggattttttaagaaagtaaagaggtggtacctgtataaaaggaggatgagacattcttttataagatttatttcaaagataccagtagaataataagtcattttctgaatttaatatgttgtgaaaatccggggtacctacttcgaaaataaaatttctgccacaagatttaaaataaccatgatggagacaagagtgtgtatgtgtgtgtgttcttatttagtataggattagtcagaaggcctagtgtgaccacaaattttgtgctgtcttctgtgttggtgaagttatcaaacattctaaaaggggagtatccttgtttctttttaaaaacgaatggcttttggaaataaatagaggtagtagttacataactttgtgaatgtactaaatgccacggaattgttcactttaaaatggt

SEQ ID NO: 127854 - DNA, 1091 bp, Homo sapiens
attttgtcttttatttttatttgcagagcttactggatttttttgtttgttttttaggtctttgactttgaactgagcagccaggatatgaccaccttactcagctacaacaggaactggagggtctgtgccttgttgaggtgagtgagccccagtgtgaggagcagttcccaggagatattcagatgctgcacagcaagagagtgatccctgcaggcctcagcgccaatgtgctctcgtcacagctgttcttgctttgcacattaccttgctttctcagccacgtgacttgcatcagctgaactgcatggagccaagatgccaagagatccgctcttgatatcttcttccagccctggggcattgttggcctggcctgaagtaactacatattttggctttccattcaatttttaaatcctagcagttcatctgaaactaggtgatcccaggtgaccctggatcaaactctggaagaatttgcctgtgactttttgtcttaatgaccctaatgaaaggggtttggtcgggagcccctggggctgaggtttgagacagtcccggctctgacctggtaagccacatggctccaaaacaggccctccctctgagcagcaggcacctcagttcctccagccacacatcctctggttctgtttcctctgcatggtagtttggaaggagctgcctaggaaggttttctgtggggttttctcttttcctaccattacaataactaggtgacgcatgtaactcactttctgctttcaagaaggaacttctcattttgcagtggagactgagactctgtttctctctcactacccttattcttgtctgagctctgtgtttccacactctctcctttagtacttcctcttctaagcaaaatgtgaacattccctaagatggggtgggctaccagctttccctttccagcgtctgtcccatctccctccccggagtttgcactgctggtggcttcagccaccgccccaggcagatgtttgcccagtctgcgtcctggacaataactctggccctgcttcaggcatatgcgtgcctggcaagcctgctgctgccacactgtg

SEQ ID NO: 127855 - DNA, 1054 bp, Homo sapiens
gtgggatcaccaccatcctctcttctgaggccagggagctgtggcgagcaagccaagactgagactgacacctcaccagtggagccgtgtgcaggggcaggccttgggcctccagggccccgtgctgtgcacgcatacacctacacctttgctcaggcccttcagccacaccgagaggttacccggggagaatctcgctcttgagcttcactgcctggacctgccctgcactggagctctgtcagctaccagctgcataaccctgggcaagtcgcttaactgctcgatgcctcagcttccctatctataaaataatatccattttgagggttgttacgaagattaagtgatgcatcagagcacttcacatggtgcttaataccttagtaagtgatcgagaaatgttgctgtgctgataagtccagggactgcaaaggaccctctgggccatttagtccattcaccagctctgcaaggagttcgtgtgatgatgggcagagcctagacctgtgtcaggactctggcgaagcgctcagtgtggcagctggagcagctcaggctacttggcgccacctccctccctgcctgcccttgcagcattggtggcgggggtgtgggggagggggggggcacgcccaaaggagagcagctcaggggagtcctgatggcccaagagcctctgttctcactgagcaaagtggctctgccagggatgctctgtctttatccaagatctgtgccgagcgcagcacagccatgggcctggggctcttgggcaggccccagcttaggtgagcagctgattttgcccaattccactgcccaaagactgtggccatagtgcctgccacctgtcacatatgagacagggatgagagtgatccctgaagagggaagtggagctcattgtttaggagaggagacgtttttcttcttacgtgcaggtagatgttctaagtacacaagataaaatggcaaaacagtggccactgagggaaaggcatatcccaccagagatgcatcgtttgtttcgtatttcattttttaaggaatt

SEQ ID NO: 127856 - DNA, 1043 bp, Homo sapiens
ggagaggatgcagagccagaagtccctggcaccactttgcagatcaccatgtgggacttgggctagcagcatccctatgacctgggagcttgttagacatgcagaactggctgggtgtggtggctcatgcctgtaatcccagcactttgggagatccagacgagaggactgcttaagcccaggagttggagaccagactgggcaacatagcaagacccaatttctacaaataatcaataaattagctgtgcatggtggcatgcagctgtagtcccagccacttgggaggctgaggtggagattgagtgttgagcctgagaggtcaaggctgcagtgagcagtgattgtgccactgcactccagtctgggcaacagagtgagatcccgtgtaagagaaagaaagaaagagaaaaaatgcagagtctcaggcttcacccaggctacctaacgggcatctgcactttaacaagttccctaggtggttcctgtacacattgaaatctgcaacatgctgggactgcagagagcctgggctgggagtcgtgagctccacccggctgtttttatgacagctggcaaaacacgctaaggcacattgaggactcagtgaggcaggttcctgggcctctgttaggctaagtttgaagttgttccatcactgcctccctctgccttctttgccatttccatccatgatagcactaccctaactagtgatgagaagcagtctttggagttcctcttctctcctgtccctcatggctaatttccctgctcagacttctgcctctggctctctttccttctgtgcacactgacttttttccctctcctgtgccgagctggagggtaggaccctctgctgcagcactgggtcattctcaggataaagtcttggtctatctgggcgaacagatcacttccagctcgattcatacatactgactcttgcttgaatagcaagatttgccccaaatcagagctttaatcctatataaatggaacaaataatcacttccagatctccagggaatctgctcacc

SEQ ID NO: 127857 - DNA, 1014 bp, Homo sapiens
gttccccatcagagggatctaccatctgcccagaggcagtcacaggccaagggtgcaggcagggcttgatatgaagcctccctctcagcactgtggtctcagcgactgtgcccctgaggttctcagccagggggtattttggaaaacagtaggagcacttttctattatcacatgtgattttctttattcagtctagtaaaagttgaggtatacaatgttataaaaaaagaaaaggatgttgggtgtgagggtgttgagaatcactggatctatattatatgcaagttgctgaaaaaaaaaacaaaacactagttctgtgtacttggaaaatgcttacatctggtgggacaaatagaccccactgtgtagcagccaagtctggataaagcccttttaaagttatcacttgggtcctgataggcttgataagggacctatcagatgggtcagataaagggccatctattcccaaaggcctaagaatgcttgacatttaaaagctacacgcaattcctgctctcagagagcccacagctgaggaagagactgagacaggtaaacaaatttcaaatctgtggccacatttacttaaatgatctgagacacttatagagtactaggagagttgaaaaagtcaactgcttttaaaacttaagacatgtcattgaggtgctgagccctggcgatcttccacactgcatcgtggatcttaatcagctttgttatagatggcctgagccaggttagatgaggatgcaaatcaaaaagcagggacaatgagtataatgtggcccttccttttcccagtattactagctcattgctacactctttgcaggtgtggcccactttctttgagagaccccttgtgaggaaagcctttgagaagaccctcaaggacctgaagctgagctatctggacgtctatcttattcactggccacagggattcaaggtttgagtgactccctttctcagcctctagtttctgagctgttgcaggaattcaggga

SEQ ID NO: 127858 - DNA, 1024 bp, Homo sapiens
ggaattaaacaacaacaacaacaacaagggcgacatgcttgaccctctgggaatatttccagttcagccacccaagggtgaaccaggcttgcaaaatgctgaggcttcagagcccggggaaaggacccaagcttccaggtcctcctgcctgtctcccagatggagaggctctgatgatcagtcttgagaccctcattggagtggtgtccttctgtacacggtagccatggtgattattcacatcagcatctttctgcccctagggccaaacctgaggacccttccctgctggaggatcccaagattaaggagattgctgcaaagcacaaaaaaaccacagcccaggtaccatatttttatttttcttgttatccaaccactcatgcttccagtctcatgtttcatttctcgtgttgtcctcaactgactccttaaaggggaagaacacaggagctgaagccctctaaagtatttcctttgaagtctgttggaacctctaggaaacacaagagctgtcactgaagcaaagatagcttctgtctcacagcttcctgtcaagccctacagcccagtggcaaagcatggctttggagtctagggatatgggtgcagatgccaactctacctctgatcagccttatgacccccaagctactttcttcattcctaaaaaaggaagatcacagggttgtctctaaggtgaagggagagaaagaggtgggggtctggcacaagtctaatagctgtgaagggctcagtaattattagcgattgtacctgaagccacagtgagctgcagagatgttttattcttcctttccataaaaggaggggtccttgtagctgagtggaaacatgatgtcccctttctgcacaggttctgatccgtttccatatccagaggaatgtgacagtgatccccaagtctatgacaccagcacacattgttgagaacattcaggtaagtttccggctggtcgggcctggtattcctcagtggagtgggggacaggcagaccttctc

SEQ ID NO: 127859 - DNA, 1098 bp, Homo sapiens
caaaccagattattgtagaaaatttggagcataccgaagtataatgtggcagaaaaatgtcacttagaagcaactactgttagtgtttgggtagagcttttagtctttcttcctcttttgcctgctgtggttggttgagattaagaggcacattttaagtaatgattgatgcacctaaattcacctggccttcatctttgtgtgtctggggcctgaagaacagaggtcacaaacgtgtttgaaccgaatggtttcttgaaacatccttggaatgaaatctgatatgaaagatgtttatatgggtggcaggacaaaaagtattacttaataacaaaacccttctgctgaaacttagccacaaatatgaggaaaacatactttgtaaaatataaattaaatgttaaccacttcattaaagcatttggattgcagaatattagtacttggtaagcttctgagactgtatcttaccatcaccttcttccatcccacaatatttgattgcattcctccttctaccacctaatttaagcatttctcctctaattcctcccttcattttactttattcccagctttcgcttctgctcatatcatcggcaaggtaggattgctttgacgggcctgagatctgtgccattatttatgagttagtcaaagtctgctccattctacctctcactttttggtagagtgcttcaccataatctcatttaatctttctgatagccccctgagaacagtagtttcatgatcctcatctttatagatatggaacctgaggttcaaagaatttaaataagttaagatcacattgtcagtcagtagcagagctgggctcatatctaggttgtttttactttagacttttggaatttggtggacacagtttgtgttgataaaagctactaccctggggaagacaatgaccagagataggaaggaggggtccgtcatgagtgggtgttgtccacagtggtgatgccatgcaggctggaacatgcaacatgccctgagcaaatgcacatctcattacatatgtatatctcttcgccatgagtagggatctgcctggtatggttggttattcttgtaaca

SEQ ID NO: 127860 - DNA, 1043 bp, Homo sapiens
atgtaaccgtggaagagctggaggaaatgctacaccaaaatcttagtgggttttttttcttgatggaagtagtctgttttagagaagtcatgagagaagatgatctccacttagtaagaagtaactaacctgtagtcttttgaggcaccatttcagtagagtgggtaaggcacaagtttggtgtcaggaaactaaaaaaggaatggctagaagggaaggtaaatggacaagaggaaggggagggaggataagatacacagctgtgtaaaagatgtttccttagtaaactttttcttcaagccagatcacactttaaaaaggaagacaccctgggggataaatcaataacctatgtgttctttttttgacatgatgtaaattattgattaaaatcggtacttaagtgccagtaacttttgctatgggataaatgagaaaccaggtacaggttggtgagcttttatgaaaaacaaaacaaaacaaaaaaaataaagcttgaggttgaaaaggaatagtttttaatttgggatggggagtatttattcttagtaaggttcctctttataagttggggtgactattgcctggcttactttgtgccttgaggtttttctcaagagtactaataaggtgagccctccttcatgttcaccttgttcgtttgcgtttgatgaaatggctgcctgggtttggaaggacaagttggaactggagatacccctgtgaagtgaagccaagtgagccaagatcctcaaaccatgactctaatatctccagtggggggttgaaggcagaagaccagggttgcagttccagtttgccatttactggccatatgtttttgaacaagtcaatcagaatctccatttttttctgtggagattatggccatccatgaacatactaaacttatagtacaaaagtacaaagtacagaactataatggataattattcttggctcctgttttgacataaataccctgagattcttaagttaaagtttcctaacatcttagccctgccaactgattttactgtggc

SEQ ID NO: 127861 - DNA, 1052 bp, Homo sapiens
atcggtctcaacagggagcagatggctttgaatcatggtgaagaacaagtgaggctctggagaagaagctacaatgtaaccccgcctcccattgaggagtctcatccttactaccaagaaatctacaacgaccggaggtataaagtatgcgatgtgcccttggatcaactgccacggtcggaaagcttaaaggatgttctggagagactccttccctattggaatgaaaggattgctcccgaagtattacgtggcaaaaccattctgatatctgctcatggaaatagcagtagggcactcctaaaacacctggaaggtaccagctttatataccacttattagaggttgccaagtgtgatatctaggccttaatctagaaattaagctaatgaggccctatttacacaatagactcctctatccccctttgtcacttcagatttaagaattgtcttgttctataaatcagatctcttgtgtgttttctgttcctgttacccgaagcagcagttttcagactttagcaagcatcagagtcacctggagaggttggtgtatcacagattgtgggtcccaccctcagagtttcggaatcagtaggtctggggcgcaccctgagaatctgcatttcttagaagttttaggtgatgctgatactgctgattggggttccacactttgagaagcactagtctaaaggactgtatggcttgttgtagtgaaatgaaaggaagctaggaaaggaaggaattgttgaaatggccttgaaagtaaattagagtttttcaagtcaagtaaattatctagacttcagttttgctcacgttcttccaactttaaacaatgattgctgttcctagacgtaggtttcctgagcagttcttttgtttcaaacttcttttcagaacaggcttagtcattgactggaagaaagttagggggaaggaaactaaaaggatagttggtttatttatcttgactctaaaaatttggaaatcagcagcagccataattttaactactttatgtcatgttctacatgtatactaaa

SEQ ID NO: 127862 - DNA, 1033 bp, Homo sapiens
gggcacctgtagtcccaactactctggaggctgaggcaggagaatggcgtgaacccaggaggcggagcttgcagtgagctgagatcgcgccactgcactccagcctgggcgacagagcgagactccatctcaaaaagaaaataataataataaaataaaataaaacaaaattttagtcacttaagtctcattgactgattattaaccagtctaagtattttaaatatttgtaagtaattagtctgctgtgtgaatggcttgagtagtcattaaagtggaatgttgattttatttatttattggaaacatttctatttttgttgaactctccttcctttgtagttgaaatattacggcggcctttgtttatttggctctttaatttggtcccacacaaaagggaccaaacttgagagtgctgctattaaacaggggacctgttggatccggttagatctgaggccatggtcaaacaagtgaatcccatgtatacccaagccccttgctgaagacctggaactcgtttctaaagtcacagacaacaacccctaaacatggcccatcataatcgcagtgtgttagctggggatcagacaaacttattcattccctttaccagtcgtgggaacactggatggcatcagcagatgtccatttaggacccagcctttcacgagggcagagcattcatataaacattcttctctctcctcctcagtagtcgtggaaataaccatggataagtcacctgaccagggtttaaatcctggggatttggtagtttaaaaaggtccatttttactgccttaatagtcctgtgagtagagcaggtttttatttaaccactctggatctgtttccttttttttttttttttttttttaaattgagacagagtcttgctgtgtcacccaggctggagtgcaatggcacaatctcggttcactgcaacctccacctcccaggatcaagcaattctcctgcctcagcctcccaagtagctgggattacaggcgtccaccaccacgcctgg

SEQ ID NO: 127863 - DNA, 1388 bp, Homo sapiens
gctgtgaatctctaagccttttttcttgtaatttctggaaagttcctggcttccaggaattatagctggaatccctcagtacctgcatgtttcaggcacacagttaaatgggattaaagtgcagttatataattaaacagaacttcctcctgagttgtgttttaacacctggtctcttcctgtcctgatcaacaggtatctcagatgaagacatcatcaacattactcttcctactggagtccccattcttctggaattggatgaaaacctgcgtgctgttgggcctcatcagttcctgggtgaccaagaggcgatccaagcagccattaagaaagtagaagatcaaggaaaagtgaaacaagctaaaaaatagtctttctcaactgttggctaagaagaaatgcaaaagaagtggcataggagtgtgttatgggtgctgaactctctctctttttccccgattttccagagctaggctgtggagtagagtttgtataggtaactaggtaacttattgtggcccagataaggctttaggatgcctcagtgcttatgtcatagccttatgagttagctttcttgctagccccctagtcggtcaccaaactagtaactagtggggcttaatgaaggtcataagtttctgagatgggagagcaacaagtagagatgaagttaaaggtatttatcattcaagaaatcattattgagtcaccattgacaggcactattctaatcagtagttcactttaatatttaataagattttctgggataacagtaagggatattagataatataccgtatgtatttattactagtcttttcctctaggaaaagggatactttgataattaaggccagaggcccattagttgagaaagtcacagatatatttctccaagaaagccaacaaccaccaccacaatgacagaaatgacaacaaggccctttaacttgtcttctagtttagagacatccttcatttgacatttagtagaattcctctttggccacaagaataagcagcaaataaacaactatggctgttgaggttctcattttggtttgttttaattttttgaactttgggtacctgtaattagtttaaaaataaagttcctgataataaagtgactgaaaatggcatccccaaagtgtctccgtgtgtttggtgaattttaggtaggcttctaaactagtctttgactcatactttcctgtaacactcaaagaaagaattgcacttatttcaacacaacagatactcatgattttctatatgttgaagcatgaagcagggaaggtagaatacagtgcatgtaacttcattcacataagcagagggaatggtatattggggcttgtgacataaatttgttcatt

SEQ ID NO: 127864 - DNA, 1044 bp, Homo sapiens
gagaggggagcagcttcagggcagctggccgggccagggaggcagccacagagggaccttgtgcatgcctgcacagggcccaaagagggtggcccttttccgtcatttttatatatgctgatcacaaccacaaatccccagacacaaggaaaaatatttgaagcctacacatatttgcgctctgaatcatttgtctcttgtctttattttcctctctctcctctctatctatccttaaatttttatactttttctctcaacagtcctcctcactttatctgtctttgctctagttggtttcaagcgcccatacattgtgtcttgtctgcattttccatgttctatttttaaggtattttattttagcctttttgtcccttttttgtccctttcctaaagctcttcttggtgcccatttcccagctttggtcctgctcatggcttctctgtcttaggccaggggtagtctatagacaggatgactataccatttatcgtcaaactgggacacgttgaagagggaaagaaggggcagttaataatttccctaaaatgcagtcccgaagtgggactgtcccagtgtggagtggatgcttattctatccatggtgtggttttctgctttccacaaatctctcttcacctatcaaccactccctccatttatgtaccattttttttttttaaaccttttatgttctggtccttcttttttatttcaaccccaagaagctttatgtgttcttgtatttctgtcttcttttatctcctcctcattccttcactttactctactctgctctctatcttgtctcaccacttcaattcttcttctcccttgatttccttcttttgggtacagactggactgcagctcacagaggccatgcctgtctgccatgatacatgcaggacatagtccctgcatttctgaaacaaatcaaggcacagctgagcacatacacacacacttcaaaataagccaccaaatgttacaagctgctttgggtctcagatgagccctgagtggactgttcacccctt

SEQ ID NO: 127865 - DNA, 2018 bp, Homo sapiens
ccaggctggagtgcagtggcgcaatctgggctcactgcaacctccgcctcctgggttcaagcaattttcctgcctcagcctcccgagtaactgggactataggcacgcaccaccacaccggctaatttttgtatttttagtagagacggggtttcaccatattgtccaggatggtctcgatctcctgacctcaggtgatccacctgactcggcttcccaaagtgtttggattacaggcgtgagccaccatggctggccaaattgtttatttgtattgttctttaaataaaagtttattttagaatacttttaaatttacagaaaagtagcaagaatattacagagttctcatatgccccacacccagtttcccctattgttaacattaaggcacatttgtcacaaataataaaacaatattgatgcattattattaatgaaagtccaacctttatttggattgttttaggtttctttaagccccttaaaatagaaaaatgtttcatatggggaaaatgtaatgttcacattgtagctatatagttggaactctaatacatgagtgaaaatggtttaagctaactcttttcttgaacatatgcttactggactgacaatctcttgaggactttccacctgtaataccttaggcctcttctgttctctggtttgtttcccttgagaccgttagcagattgctcagcctgacccaccctggtgccagatgttggaaccctcttgctgctgccaatctgactagtcattccaaacagatggtaatatccagcatcacaccccctcccacaatttcacagttttaggcagaagccttagagtgaacacatttacctggctgttgaattgctgaaactctgttcttaaagttgcttcataccacagtgacttgtgagagctttgacattaatagaaggtccaaaagaagacctgagtgacgttcccccaaatcttgagatctaaagactttggccagtttaaaaacactacaatttatggaaaatacctgttagtaacaaatagagaaattataaaggagattgctttttagaaatcaccccaatgaccgtattccacatcccgagcttccaagctttctttgaaatacgagttaccagcagacactagtggaaagaatctttttaattcaatctctgcctttgagcaacttgctgactgacatctagaggcatctcagtcttctggggtggcaccttatggtggaaaggctggactagatgtggtctctcttagttttaaatctgcttggattggggctttataacgttccctcagaagtcttgttggtgtcctttctaccagatttctttttctactgtttcactttcattaacaaattgcttcacaggggacaaaattctagatgtagttcaaatactagttacaaatttgctgccttcaagatacctagttatttgattgatcacagttgtttttaaagttcattttaagtagagttatgatcaaacatgtgcaactgaatcaataaagttgaaaatatatcacgatgaggaaatgtaggtatcttctttggtatcttcatatcaaaaaattaattgagaggaacccttactaatgagtgaaactaatattcttgactcagagaacttcctcaaagcctcaaaataacaacaatttgaattggtcatctaagtataaataaagttgggaagagacacctttcatgaaaggaatggttgaactaactctcaaataggaagacatcaaagtcaaggaagaaagtaagagctcacggcttggggtggaaatggttactaagtttagccatctgctttggtctttcctgttccacatgtagctatatagtttacataaaagtatctctccagaggatcagaaagaacagatttatggaaccagatgtgagttagcatttctacaggtgtggctctgcagctgaaagaacatgttgtaccagggatgaagtttcttattatgtaatcaatataaattaccactag

SEQ ID NO: 127866 - DNA, 1047 bp, Homo sapiens
acaaatgctgaatcgaactgaattcaattaattgaagaaagggttgtttactgacactgtactaacacttctaatattatcctgcctcactagggagtcttcactgggggcaggggtctggagtacaatcagaatcaactggacagttttccaaactatacaggctaatggtagtggactgtgttaaaaagctattcaggatactccgaaattatccctgctcacatctcaccaatccttatgctagttgaggaccttcaaagaaccctccctgtccaaaatacatcattcagaatcttctgtttagctctcttcattttagtgaaagtctcctaaaactagtcctggatgtgttttcatcacacttgaagtttaattaactgataactcaggcacaatggaaatacttagatagatgctcttaaattacatttaaacaaaactatttacaagcgatctagtaaaaatctgtgtctttaatgggctatttttaatgtttcctaaacaaattattgtaggtgggccaattttccctctttacttgttacttagaagcccatttggacatgttctaccccgatctggttctctcaccccactggctacagaatagtgtgtttttgtttgaaagggtcaaaacattaagaatgtgacatccaaaatatgtgctatttttttttcctggagtcaaaacccctaaagtataaatcgtttttaaatgaagaaagcagtgccaaaaggaatgaaacatatttggtccttctccaaaacagagagatagcactgaaacaggaagtggatgatttaaatatccactcggcatcttggcaacatatttatgtttaagggacttaaggttaaaaggtttttgtctggcctgggaacactctatcttccctagggtttggaggtttggggaaaacttttaacaacttatcaaatatttgcaattagccattttttggagaacaaattgttactgagaatgtcataggaaatgttccctataagctgcatgctaccattactctcctgcttcttatgata

SEQ ID NO: 127867 - DNA, 1018 bp, Homo sapiens
atttattgaaggaaattgctagattcttggattttccacttattaattttcacatgctggaaaaggtgcgaatttgactagttccatttagtctgcaatttaaaagctaccccaaaatatttgaaagagcttatgacatcattcttagatcatgtgtacatgctcagaaaccaaacctattcctgaatagcccctttctcttcagccaatttaagcaatcagtagactgttttgtatatgcaacattaactcatttggaagatttatgcttatgctgttgctctgactgagctggtcagaggattttagaagtttccaggcgaatgggtaaaatgtagggagtaagcacactttgaagtgaactgtgccatcataggatcaatgtattcaaatagacactggagaagacatttccactgtttcccatactagttacatttcattgacaatcccatggcttcaataggtgagactctactgtgtcagaaggtagaacaatgagcttcagtcttcttgaacttctcttgtgaaacctgtttccttcctggctttattaaaaaattatgtcttctgtttttggaaaagtagctgtcagaggattagagacaattcattgaattggattacttgttgtcacaaatattataatagtattgtagagcacagaccaacggagagctgttcccatttgctaggatgttgttactgcttcggttttatttttatttaaattttttatctctgctattctcctttatggtcaaaattgtaaagagtgcatctttggaggaatgcaaggtaggcaagcttgctaagagcttctacaagactaccttaaaagaagacttatatttaacaaacagaatctcaacatatggacatacaccctcttgagctggttagaaaggacttttttctttatttgctctttttgaccactgacatttattttaatttttttcatttttaaacatttttattttgaaataaagtaaaagattaacaggaagttacaaaa

SEQ ID NO: 127868 - DNA, 1033 bp, Homo sapiens
gtgtgctttcttcttaggttttaatgctggtttacaaaaggaaaagtaaattgctttctggtaacaaattattgcagaagatcttctacttaaagcatagatgcatttttatttttcatttacttctctgtttttgaagggttcagtgtttattcggcggaggtttatgtcaattatttaatcagaagcaggccccagagtttgccagtgatattttggaatgtagggtctacttcaaagaaaggttccatgtctcttgacccagatgaagccaatttttcatagtgaagagcaaggtaattcgattttctttttcagagcaaaaattatttttagactgaatttgatgggtcatatttctctgctcagtaaatcttgcaattatcactccacactggaaaatgtaactcaatgacccaccattgcgccagagcttctgtgggcagccgagctccgagaggcagctggacatgatgtgaagttggtgtctatgacatactgcaagatggaaaccaagcagtcaaccagtggcagtagttcacatgccaacatttttgtttatttgtaatggaaaactttaggaggaaaacacaggagactgggtgccatgggtgtgaggtagagatttcaatcctgttcagtcacaggaaaatccaaattggccacgctaaaccagatccaaaatcccagactaatttcctctcctctttcctctgcgagtgtttctgatttcacacaaggcaagagcaactgagaacagggagcctgactagatgaagtaagaaccgtcgtgaggcccaggagcaagaaaaaaaggcctggagttgtagaacatgctagaacatgaatgacagtctctgcggaattaagaagcattctccactctattccatggcctcttgctgacctaactcctagtcttccttcacatctcaccttaggataccacttcctaaggaaagcttaacagactcaagtttgacttattacctttctctgtgccctgacaattcctgataccctctccagagca

SEQ ID NO: 127869 - DNA, 1024 bp, Homo sapiens
tgatttaaagctttgtctgctatccaataaatctgtttgctacagaatgccacaaaaattctgactttcactgaataattgactttttctttaattataagaaaaatttccttaatttcccactttagcctgtttggtagctaaattcctaacatattatcatattaatacatcttgtccctcttatctactcatttatacaaatatctgtatacatttccatatgcataataattccttaataacacagaaaacatatcccataaaaatcaagagattctcatacagacataaacctatacactaaactacaagcatactatagatgaatttgttcaagatacatagggaaaatctgaaatggaaacatacaattttaaaaaataaagaggaaacattgttcaaggacttgatgcacaaaagagctacaagaaataatttggggaaggtgggtggttaaaagtgaggacaagaaacagtggatactaagcaaagggctggatggatggtgaaattgcatggcattcttaagatgataagtagtccctgtatttggattgccttggtatggaccacttgcaaaaacattcaatatttcacttctaagatatggtaagccaaaatacatatatggaaagttcactaagtcattggcaaataatccagtgttgacttttaatttagaaataactggccaaattgatcccagccttcccaactacaattctccccctgcagagtacattgatttgtattatcttattgttttctctcactgtttgtctttctttttattattttattttcctactggtacaatgtatgacaagagatagtgaactttcctgattttatatattttgagctcataaattccctggagttgtcatctttccagactaaagtttcatctttttctattcacatgttctaaaaataatctttttaatgatgtgtaacatatagagaagtgcacaatttataattgtacagagtgatggactttcacagaatgaacgcaact

SEQ ID NO: 127870 - DNA, 1028 bp, Homo sapiens
aatacctcttcttgccacttttcttttctgtttgtcattcctgttttcctcctcctttgttcactttttcataactttggtctggggttcagaaagttacaaagagcaaaatcattcattagaatttcaagtgattctaccaatatttcaagtcttcaaaacctctctgtctccggaggtcttttttaaagaataaataatcttgggatcttacttatttgtctctaggagattcatgaatgagactgaatttaactcggctcaggagtcagaaattgatcactggctaccttatcagctttctaagagtaaagaaaaatcaggagaatgacaaatgggaaagagggcccatagtaactcaggagaagtaacacactgagttatcaatgatattgactctacctcctctctttcaggtccagacatcatctggtctccctgaacctgaaatcacaccatggatgattttgagcgtcgcagagaacttagaaggcaaaagagggaggagatgcgactcgaagcagaaaggtaaggatctagggtgaaaaatacttgtattcccttattaacaaccttggtttcaggcctcaaagaccatccttttgagaggccaaatgtggtcatatcgcacaccaaactgttcgcaaaagtagttatggaaaatttttctgctaagactctaaattaagcatttaaaaaaggaaaacaaacaagaatcaagaaaaagagagatttgagaggaatcaattgataactgcatattgataattgcatttaatcaatacctttcacattggaatgttttaaatgacaaaagtaatgtgtgaatgaaggtttaaaaagcttatataataagaaatgacaaaaaaatgtcaagtattgaatattggaaccacttaggacatgagagtcttcaatctaaaaaatataaaggcaaaaagccctggatgaatcttgtgaaaaattttcattcttattagaaaagtatccaactctagggatctgcatagtacaggttaataacgggc

SEQ ID NO: 127871 - DNA, 1005 bp, Homo sapiens
tctcctgcctcagcctctcgagtaggcacacgccaccacacccagctagtttttgtattaattagagaggaggtttcaccatgttggccaggctggtctcaaactcctggcctcaagtgctccaccggcctcagcctcccaaagtactgggattacaggcatgaggagctgtgatgtattttctgagaaaccagcagtgatgcttttatccatgagaaaatctccagcagacatacttggccgacaccgggcttggttccccaacaaatggctctctcactttccaagatgtgctcattacgttcacagcatctgctttctgcacccaacatgagttcctctcactgatcagaagaaaggcccctattgtagagttacgttatcagattcagaagcttacagacataaataaagggaatgaaaacacttgctgttgtcatcattcatacatttttatgggcttctgaaatggcttgatgattagacatttgaaagtaaatatttttactacactataaaaagaagcaattttttaaaatccatggggtctctaaagtcccctctcagaactgtatcactgagacttttttacatgatttaatagaaacagccaatgaatgattatacaacacacaacccctcacacacgcaaacccaacacttattcaaaatgcttagcatcaggaccttgacatttttaaataaaatcttttaaaatgaaattactgttattttatcatcagaacattattttccattaagaagttaaatacgatattcctttgaaactatctaaattatcaaagtagctagatttgctcaaaatttcccttcagttctctcagaaaactgatcactccaggggacaaaagaaagttagaatctgccatctagttttctacttttattttttattttttgtagagatgtggtctcgccatgttgcgcagtccagtctcaaactcctggactcaagcaatcctcccacctgggcctcccaaagtt

SEQ ID NO: 127872 - DNA, 2111 bp, Homo sapiens
ccagtgcttatcaaactttttaaaaaatcaaatttaatcttaaggggaacgctattgtataaaggagatgttctggttaaagaaaaggtttgggatctagagctcctcatcctcgctctactctgcagtcatagcccactgcacaattctacccctctcctcatccctcttctaccccacctccccaccctcttcatcaaaacttccttggaatcctaggtctccatggaatagttcagaaaccactgatctcattgaaagccttcatttcagatgaggaaactgaggcacaggaagggcttgcccagggtcacacagctgatcagcaatagagcgtgggatgctaggaaaagagcccagtctggctggctgtctctctctcaactcatggtcctgaggcttgtttccactccttcatgcctatgattctatcagtctcctttctctgtgtctctcttctctgtttactctgccatttcctggatttcaacagctattacctctcaccgggatggttgtcattgcctgccatctggtcctcggcctctgtctctctcccctttctgatccagccccctacagcccccacctatgaagataaagtccattctccttactacagcattcaaatttctccacaacatgccttcactatttcttcccattctgacttccgccagggagaatgttaaaaacattgtggggaaataaataaatgatgggcataattttaccagattctgcagaaatgacaaaagaaatgcacacagggatgtcgagatttgtaaaaactataggagtacctgatccggtgaaataagatcactcacagctccccaaactcagcatatacaagccaccactgtttcttgactcattctattccctacacagggaataccctcaccctcctgtttctgacctcctttctgttctgcaaggccctgatcaaatgctcccttcctctgtaaaccttcctcattcctcacttctctcactctaataacctttgcccatccttctattactagctttgtaccgtcaatcgaggaaaatgacgaggcaagtctcaatcattttaggaggtttacttgccaaagttaaggatgtgcctgggagataggtctatgcctttatctgaagatgattttgagggctccagatttaaaggggaaagggtggggatattgagaagtacacaattttcatctaagtgaatctgtgttttgtacataagatcacataaacaaagggggcagaggaaaaatgcggggaatctgcattttacgtatgataacagacaaaatggggtagggcgacactcagatatgcatttgtgtctggtgggccagggtgactgcacctataaagataagctgtccatttgcattgccatggtgaagttttaacagctctctaggaatgtccttgtggacaaaatatgggggaggcttgtgtagcttttcaccttgtagccatcttatttaggaactaaaaggggaaggctttgagtgacccagttcccggcttgacttttccgtttgtctaaatgcgttcggggtaccaaaatttaatttcctttcaataaagttattgttgaacatagctatcttccctcccaataaatggcaattcacttgagggcaggaatgattttgaatctttgaagcttcagcatccagaacagtgctgatgctccagaaatattctttaagtttcctattattgagtaaatcaaactcaattccccttagtttacctttttcatttgaaccgtttgaacacacaaagccttcactccttttgctttgctagacgtactaggttaaatgctaaaacaggtgctcaacaaaatgaattctaagttcctttgcatttccatcagataatttatctctgtttcatcacctgtagagcaagattggctgtgattttttaatgagacatgttaaaattcctgaatgccaagacctacacaagggccatgttattttcaggagcagtcgtgaatggttgttcagttatttagatttcaaggcatgtttaatttgttcctaccaagatcactgagagattctgtcacttgcggtttaatattttcactggtactt

SEQ ID NO: 127873 - DNA, 2008 bp, Homo sapiens
caattattctgcctcatcctcccgagaagctgggattacaggcgcccgccaccatgcctggctagcctgggggtttaagaaaagtttttttggatgggagtcagagggtctggattctggtctaactccttcagtaatcagtactgtgatctgcagcaagtcgcttcaacttgctgcgacacagctatgaagtggagatgctgatgcctgttctgtgtaattcacagggtgagcaagaacatccagtataataatgtgcattaaagtgtgcagaaaaatattaagtacagagcaaatccaagttattattaaacagtcttacttttacaattaaaatttaatatcagaggaacaacttggagggaccatttgttctttgtagatctgggaaaggattcttgaacaaggctataatatgatgcaacttcataaatggaaatctcagggtaactttttttgtgatattttaagtagatttgaattgaagaaactcagccaagttatcctggtccctcttcccttaaatacttttttttttggttttattttttatttttatttttttgagatggagcctcactctattgcccaggctggagtgcagtggcatggtctcggctcactgcaacctccacctcctgggttcaagcacttctccagcctcagcctcccgagtagctgggattgcaggcgtgatttttgtatttttgtagagatggagttttgccatgttggccaggctggtctcgaactcctgaactcaggtgatccgccaacctcagcctcccaaagtgccggcattataggcgtgagccactgcgcctggccatttttctggttttaaaatcaaggaagcaactaggtggttgttgggtttttaagtcatgaacctatttgtaaaggagcgtgctttgcctgatattatctactctaacccagtagatttataaacactaatttctactgttttaagaccactttttattaaaagcaactaacagtaaataaaaccaaccactaaaagagataattttatcaagaagggtttaaaacaataaacttttagatcaaatatagtactttcctcatttatctttcacttttccttttgtaactatcctagacctcatttcacacatctcacacagacattggttagaacaaatgcttctttctttttcttttttttttttttttgagatagagtttcactcttgttgaggctggagtgcaatggcacgatctcggctcactacaacctctgcctctcaggttcaagcgattctcctgcctcagcctcctgagtagctgggattacaggcgcccaccaccacacctggctaattttccatttttagtagagacggggtttcaccatgttggccacgctggtgttgaactcctgacctcaggtgatccgcccgcctggccctcacagagtgctgggatttcaggtatgagtcaccgcgcccagccagaatgcttcattcaaggcctgctgaattcctattcggagcctaacccaccctagagctgtgccttacaggctagctctgcctgctgcattagctccctgtgtctttccatgtctgtttattgatctttcttttttgtttttgtttttgtttttgttttgagacagggtcttgctctgtctcccaggctagagtgcagtggcactatctcagctcactgcagcctcaacctcctgggctcaagcaatcttcccacctcagcttcctgagtagctaggactacagatgcttgccaccactcctagttaatttaaaaatttttttttgtagagacgaggtctcactatgctgcccaggctgctctcaaactcctggactcaagagatcctcctgcctcgggatcccaaagtgtagagattacagacatgagtcaccacacccagtctgtttgctgatctgttttaaaggaatgtctacattcaccttttctaggagtcagttctccaaatcactctacctttcactttgtaagt

SEQ ID NO: 127874 - DNA, 1024 bp, Homo sapiens
attctccgtgaagtctgggtattaaaccagccccaaagaagaacagaaaaggggattatcctcttccactaggacacatgccttttctggcatgggaagataaagctctctgatgataaatttccaagtacattttaatgagaaatgacatggattaagaaagagatagagaaaataagagatgaaaggcattctatttgttggacatttttagccacagttctccttgtacacccctcaaaaaagaaagagaaaagtaatcaacagggaggaacaagggaacacaaagaggagataagaattttcttctacatgtattctgcgtttctcagccttctgtggtgttactatcatcaatgaaaaggcatttaagatccttaagttagaaaaatcttttctgcccaattccccacttcttgtttggaaacaagaacatgctctgcaagacctgtaagcacagatttaatttccatcatgatgatgatgataaaattttaaaaatggtgaacattcatatagtactaactatatgccaagcactgttctaagtaccgtgcaactattagttcatttaatccttacaactccactatgacttccgtggttagctaataatgtgttacctccatttgcagatgaggaaaatgaggccagaggggttcactcacttgcccacttcctccctgcttggacgtgtgtaagactggtgcctggtttttggctccaggctggctcctggtggctcccctgctctctccagcttagcatttatgaaagttattccctgtgttttcagagttctaaccgctagtctttgagtgggtgaatctggcagcagctgtgttattacatcagatcctgcttgatgagcaaacttctcctcctggaggagcagggctggagggctggagaggaaggatctagcaagagactttgagttctataactctttcccttaaatatctagcccaggggtctaaatactgctttacaggccctaaaaagaagtcatgagtgtacctct

SEQ ID NO: 127875 - DNA, 1033 bp, Homo sapiens
tatggggtagctggccctaatttcttttatttcttggggaaagctgcagagtgaaatgaaacacctggagtggagattgaaactagaaaatgtgtgctgcccttccgggactcccttccacagggccatagcctttggaaagagccttatacttcgttaaatgattggtctgctcttctcagttcttcgaagccatctttctgtatgtaccaagcacgattggcgcctcactaatgcccttcatgccttccaagccctagccagatggaattgtgtgcttttccataaccatatttcccgattctgcaaccttgctatttgagctttctgtacatggaaaggtcctctttcattcccccagctcccaatgctagccatcccaaaagagccagcttgaataccactttctttatgaagcctcctctgatcccttagctggaattgccttcttcctcctctaaactttaaatcactttaagtcttctgtaatatttaccacattctacctattatcacatccttaacaggtcttaacttccctacagattatgaactcctttcaggggttgaatttatcttggtttctgccctcactggcttgaatggagtaaatgttcaataaatatctgttgaatggatgtgctaattccagccacctgtgtgtccatttccaggttatagcagcaagcattacctaccagcatcccacaaccgcaagttcagactccaccttggtatctggcagatggttctgaacaatggtttgccacctcctcctcagaacctaggcccccatgcctcctcctcggaacctaggccttcatgcagcccccttgctgcccagagctcaccactctgatgacagttctgaattgaactgtccttgcctccaagtctaggttccacgtggatcagtcagggagaggaatgtataccagattagcaacccataagtcagtgccagtgctgtcactttgtaattcagaaatatgaactttttttttaagtcaagtcagtgatcttcaccactgaa

SEQ ID NO: 127876 - DNA, 1102 bp, Homo sapiens
ctattgccacaattttacttgaacctttaaggatgatgtcctatagtctcaaaccagaagataccaaaatggagaaaagacaaaatgaagggaataagagcaacattctttaaactacggggaacacggagtaaaaaaatcaaacaagacgacctatactatagttgagatgaaaataagaattttgccagtgttgcagaagttttgagaaatatttgctagggaagctggggtcgggggacactggggcaagaggaaaactcgttccttgctccagtgtcttgctacggaagcttctgcaagttcttctggctctcgtctggcatatatttagaccctggcccttccaaatgtaataacatctcattggtctcctcatttgccatgtctgcaagactttaattcatttgaactttctatctgaaaggcacaaactaaaacatggttatcttgttacttaaatacactgaggcagcaaggcctggtgttaaagacctaaaatatcttcagtgtaaaagccacagcattagaagagagctttcccattgcatatatatttttttcttatcttgtaacaccagggcccttaagcaatggttccaggaatggaagaaaagccaatcctctctactttttcatgctactcgtacaatcaaataacatcatgtggttattatggacttttaaaattcgttgcatttattcgtcagtgtgaacacacacacacaagattatttctctttctccaaaatatccaatgagccatgttgctgtcagctgacctttgctgcagaaaggtacctttctccaagtgtttgtgccaacagatgagctaaaagcagttaccaagtaacaaagtggaatactccacaataaaccctcttccaaccagcataggtgggaagttcatggattctggtcaaacaaacattttatttcatagagaagtactttatagatcatttgtggattgccagtttttttaaaaaatagatccacaataaaatgcatttgatttaaactctattaaacaaaattcaataattctcagatgattcagataaacttcaggatcccacactccttctgaatcatctgggaa

SEQ ID NO: 127877 - DNA, 1022 bp, Homo sapiens
accagcctggccagcttggcaaaaccccatctctactaaaatacaaaaattagctgggcatggtggcatgtgcctgtaatcccagctgctcgggaggctgaggtaggagaatcacttgatcccaggaggtggaggtggcagtgagccgagattgtgctgctgcactccagcccgggtgacagtgcaagactgggtctcaaaaaaaaaaaaaaaaaaaaaaaaaaaactaacccacagtttccaaaggcaacttgcttttgtgcagaatgttttagtttaagttgttatttggtcattgtaaattatcttctgtagctattggattcatgtttttcaaatagttaaaagtttgaaagctagctgactaggtcgctaaacttaaggaactgaaccatccttttagacgtatgtggttcattaagcagtgaagttcagaaaagggctcagggctgttcctgccaagaggttggtgaagacacgtggcaagtggcacgctcaagaggttgtctttgtaatgttgcagaatcgcctaccagaggaatgacgatgatgaagaggaggcagcccgggaacggcgccgccgagcccgacaggaacggctgcggcagaagcaggaggaagaatccttgggacaggtgaccgaccaggtggaggtgaatgcccagaacaggtactgtcctctttgggacggggagtttctaacttgcgtcttagcctgtccgttgaatggaatttgttgagcagagcattcctttctcagcccaactcaaccctttttcaatctaactggtttaattattttgcagtcattttaggcaactaatctgattagacaggcaatctgatttagacactaggacacactattctatttctctccaccccgttcccatctcataaacataccccagttgaaggcttttatttcatttcacaatctagcatttgtttaatttaataagtatggtgtgctatatcttaaaaataagtatggtctattttttctgtttaattctttcttt

SEQ ID NO: 127878 - DNA, 1199 bp, Homo sapiens
ccactcaaaaagtgaggggtgctgaggtatctaaacactcaggctatcaatttttgtttgaaaactgctcccaggggacattaataccgaaagcacttctggcatgttgagtagactccagtccccagagaaaggcttgcaaatgctgtcagctgaaagccaggcaggcgtgtactaaaatggtaacgtactggggatatgggcaagcttggcactactggcatctgctgtagtcctgggtagcacaggctgtatgaatgctgctgactgatgaatgagcaagctgtctttggtgttgttctttctgttgtacagtgtgcctgacgaggaggccaagacaaccaccacaaacactcaagtggaaggggatgatgaggccgcattcctggagcgcctggctcggcgtgaggaaagacgccaaaaacgccttcaggaggctctggagcggcagaaggagttcgacccaacaataacagatgcaagtctgtcgctcccaagcagaagaatgcaaaatgacacagcagaaaatgaaactaccgagaaggaagaaaaaagtgaaagtcgccaagaaagatacgagatagaggaaacagaaacagtcaccaagtcctaccagaagaatgattggagggatgctgaagaaaacaagaaagaagacaaggaaaaggaggaggaggaagaggagaagccaaagcgagggagcattggagaaaatcaggtagaggtgatggtggaagagaaaacaactgaaagccaggaggaaacagtggtaatgtcattaaaaaatgggcagatcagttcagaagagcctaaacaagaggaggagagggaacaaggttcagatgagatttcccatcatgaaaagatggaagaggaagacaaggaaagagctgaggcagagagggcaaggttggaagcagaagaaagagaaagaattaaagccgagcaagacaaaaagatagcagatgaacgagcaagaattgaagcagaagaaaaagcagctgcccaagaaagagaaaggagagaggcagaagagagggaaaggatgagggaggaagagaaaagggcagcagaggagaggcagaggataaaggaggaagagaaaagggcagcagaggagaggcagaggataaaggaggaagagaaaagggcagcagaggagaggcagaggataaaagaggaagagaaaagggcagcag

SEQ ID NO: 127879 - DNA, 1223 bp, Homo sapiens
cagatctagctaaactgataggtttccttttctttctttcccatttgtgtctctctcacagattctctcaccatccaggaagaaacctgtctaagcaacgtggtcattcttccatcaaagccatcctaataattgctcttcccagtgggaactgcaaacagctacttttacatgaagttcccagaacttagtggtttccaaacaatagtactaccactgctcttgaaaataaaaacctcagtgagatcagggatgatcttaccttcttaaaattgtggtaaaggtgtttgttcacaggctaaaggaccatagctcattctctaagaatttcacctgattccaactctaccacatctgagtggtttctttctgagttttctgccttcctaacaattttgggtcttacttgatgataccaaccaaaacctaataagatttttcttgttctgtttcttcctgatatgtactgttggttagatcaaagatgaaaagattaaaaaggacaaagaacccaaagaagaagttaagagcttcatggatcgaaagaagggatttacagaagttaagtcgcagaatggagaattcatgacccacaaacttaaacatactgagaatactttcaggtaagaagtagcaactagttaatagaaactgtgttcacatgcaaagaaaaaaaaaaaaaagtcagtcttcccatcctgtgcttccagacagaaacgtgctaagcaggcagcatgcttttgttgtgaggtcattagccattgtcttagagatactcagtcagcaggtccagttcttatatcactaacagaagaccagcagtcatcgctcagacagggcttagtctgcttttcccattattttgaaaggcagatcatgcttggcatccatgtttttgttcactgaccttttgtgagattagtgtattagaaaacattataactgggattcatgtcattcaatgattctctatatggtctgaccaccttcctaagagacctttctcagtaccattttcaagaatgcattttctaaaggttgtaaataaatattgcataagactaagattgttttgtggcgaaatacttgggaaacactggattaagctaaattcctcagatttctttaccacatgactttgagagcccttcatgttcattttcattggaagtctctaagagggagtgagaggtatggacctactgctctattttatacagttt

SEQ ID NO: 127880 - DNA, 1030 bp, Homo sapiens
tcagtttcaacatataaatgttggaccatagcacctcctttcagctgtttcacagcttctctttgtttacaacatatggaaaggagggacagtagtgaaatttttatctgttgtttattagatgctttggcatacattaaaatgacattcggtgattatctctcaattttactgatccacattctccatgtgcctcattcctttgagcaactgagaatagagacatctaaaatttataaaataggaaagtatattttaaaagtttaagctgcttttcatgctagctgttcattttttctttgtcatgattaaaagccagctggaaatggtacaggtgcaaattttaaagcaattattatgggaggaggtgaaatgtgacttggaaagggtccttttccaggatggctttggtcctatgacagccttcatggagcacagctcctatttgatgtaaaacagagtgctgccaagagaacagaaaaggagcaggaatcagctgagtcagggagatgatagaatagttgagatgtagggaaaacacagtggactcaagaaagtagcatccttgatttataatcagtccaccattattgccagtggcagtttctttgagaattaacatcattgagcatctagcacagtgccttacatcatattgaagatacttaataaaaatttgttaaatgatgaataaaggaatgaatcttcagagattgggacttttaacatttcattttccatcaacctagctaggttataaagcatcaacaatggacaaagccatgagagaattatacccaggtctggccgggcacagtggctcacacctgtgatcccagcattttgggaggccgaggtggatggatcacctgaggtcaggagttctagaccttcctggccaatctggtgaaaccccatccctactaaaaatacaaaaattagccaggtgtgatggcgcacacctgtaatcccaggtatttgggaggctgaggcaggagaaccacttgaacttgggaggcagaggttacag

SEQ ID NO: 127881 - DNA, 1108 bp, Homo sapiens
taatgatattttgaatttgctttgaaaattccttcccaggtaaagtttacttcattctttaatattttggatgattgcccctttgtaggaaactgctggcttgaaggtaggggtttctagccgcatcaatgaatggctaactaaaaccccagatggaaacaagtcacctgctcccaaaccttctgtaagtacctttaggtttttctgagtttctttgatctcccagcttctaccagcagaagaaaacaagcagttggtctgtttacctaggaatggcagtgcccctgttctttgctttccctgatgaatagcaaacaggaaagtgttcagatttacaacagttctaagaagctgcatctcagttactcagagggtaaaatggaaccaaataatcacctctacaccctaactgagaggaggaatcagctagaatactgaggcagttcaaatttagatcctttactcgtctatttgtttagcttctattctataaattctggatagaaatttgaaaatgaaaggtcacatcattttggctacttctttgtcaagagcacccctaaacttattcccaaaagaatatgtatgttgcctattgggaacccatatgttccaatttgcctcatttttataacttggcacaaaaatgcagttattgggtagctgttgaaataattggtctaattgtgttgtcagcacctcctgaggaaagtcataaaactggaaactagaaaaactggttatgaatgatgtttttgagaatctaaaattttcttaatttattaagtgcagctatcttactaaaaagtacatttcttttcacctttttgttgaatgtatacgacaattgcttgcatttgtcattataataagaaaacgtatcaagctccccactgtatattgctgagctttccctgttaagtttgcttttatagctttgttggtgcccaagggagctgagagtccactgtcataatcctacattctagaggaagaagaaaaagtttccaatcctaggcctctgtgcatttaattgcatccattggctccatgccatttaattgcatttgttggctccatatataatctccaaagtcattaaattttg

SEQ ID NO: 127882 - DNA, 2644 bp, Homo sapiens
ggcagaggttgcagtgagctgagatcacaccactgcactccagcctgggtgacagagcaagattccatctcaaaaaaataaaaagtaaaataaaagatcatatttgaatggaatgccgataataatcctccctttcataaatatttattcctgccatactattattcatttttcttctgactataaaaaccatctgcctgaaacactgcaggctgtcagtttcacactacaggctgtcaatttcaagttctcttctcttggcaggtttgagacagttccagaaagaacccaagctcaagacgcaggacgagctcagttgtagagggctaattcgctctgttttgtatttatgttgatttactaaattgggttcattatcttttatttttcaatatcccagtaaacccatgtatattatcactatatttaataatcacagtctagagatgttcatggtaaaagtactgcctttgcacaggagcctgtttctaaagaaacccatgctgtgaaatagagacttttctactgatcatcataactctgtatctgagcagtgataccaaccacatctgaagtcaacagaagatccaagtttaaaattgcctgcggaatgtgtgcagtatctagaaaaatgaaccgtagtttttgtttttttaaatacagaagtcatgttgtttctgcactttataataaagcatggaagaaattatcttagtaggcaattgtaacactttttgaaagtaacccatttcagatttgaaatactgcaataatggttgtctttaaaaaaaaaaaagaaatgtactgttaaggtattactttttttcatgctgatgattcatatctaaattacattattatgttagctgacagtggtactgattttttaggttggttgttttgtggatttctttagtagtgatagtagcctgaaccacattttagataactcaattatgtatgtatgtgcatacacatatacaaacacactaatggtagaatgcttttttatgtgctagactattatatttagtagtatgtcattgtaactagccaatatcacagcttttgaaaaattaaaaaatcacactatattaatattttatatttgccaacagaaacatggcagataggtatcaatatgttttcaatgcctgatgacctataagaagaaagtattgaaaagaagagagattagaactgttagaaggagttgaaattttctaaaagacatagtatttagtttataattaaatgcattcttgaagtccagtgtgaattttattaatgctatcatctcgaccaagctcaaagcctacttattagaaacaatgaagttcacaataggtcataaggtctcttccttttctaaaattgaaagacaagaaatttagtgccaatattgtacagacagaaattccatgtatgagtctcaacaaagactacctttggctaaatgtctagaagcagagaagtaaagtgagcaaaatccagtgttgaggagtcatgacagtactttgatctttatatactctgaagcatttcttcaaacttttctacttttatttgtcattgatacctgtagtaagttgacaatgtggtgaaatttcaaaattatatgtaacttctactagttttactttctcccccaagtcttttttaactcatgatttttacacacacaatccagaacttattatatagcctctaagtctttattcttcacagtagataatgaaagagtcctccagtgtcttggcaaaatgttctagtatagctggatacatacagtggagttctataaactcatacctcagtggacttaaccaaaattgtgttagtctcaattcctaccacactgagggagcctcccaaataactattttcttatctgcagtattcctccagaagagctaaccagggcagggctggcatgagaagtgacatctgcgttacaaagtctatcttcctcataagtctgtaaagagcaattgaatcttctagctttagcaaacctaagccaaaggaaggaaagccatgaagaatgcagaagtcaaaccctcatgacaaagtaggcacaagtctacaataagctaaatcagaatttacaaatacaagtgtcccaggtagcattgactcccgtcattggagtgaaatggatcaaagtttgaattaaggcctatggtaaggtaacattgctttgttgtacttttgaacaagagctcctcctgatcactattacatatttttctagaaaatctaaagttcagaagagaatgtatcactgctgacttttattccaatatttggatggagtaagttttagggtagaattttgttcagtttggatttaatcttttgaaaagtaaattccttgtttactggtttgactataattctctgttatctttacgaggtaaaactgcaagctgactagcatgttctgtgaatctgccattcctaaaaattttataaacacttgatacttttcactgataatggatcgctccaataaacatatattgtgaaaatgcatccacaataaatggaattccttcctgcaaaatgtctttttctcacttatttttatgtacaatattgatagtgagaggtatgtctattataataaagattatggcacagt

SEQ ID NO: 127883 - DNA, 1093 bp, Homo sapiens
cgtacagtatcacaccaaaacaccagatcactgcacagcctgcttggcgtggccccatactagtctatgtgaattgtgttcctggcattgtatcacacagtagctctagaaggagaactgagaaaaagttgtgactgagttcactagcaaaccttgagaatacagttccaggaagtggtgaggaattatagttcatcactgtatttaactcgttagacaaatagtgtgactacatttaagaagagtcaaagtagatgatttgctagaaaagctacgagaaacatgtttttaaaccagtagtgagcttttagaataaattaatagtataaaagtcaactatcttttggctactgtgaagatcaatcatcacaaaatttcattagtacttttataaacagtgccatgaattataaaacatttataatgatacccacacattgaatagtgttgaaaggaaaaaaggaactatataaaaattacaggagttggtatttttcttcttcccactcatgattgtgtttgaatctttttctcagctgactcttttggtgatcccttcttcccccggactacacagatactattagaatatcagctagggagatgggtgccacgtcttcgtgaaccaagggatttatatggtgtctcttcttctggtccattgagcccaacacggtggccataccattgtgaagtcatcgatgaaaaagtccagcatattggtatgtttttagcagtttgggggattcagacattagcaaacttactttgccaaccttaattttaatgaggagactcacaatgttagaaaacagcacattccaacagaaatataacatgagccacataatgtaattttaaatttgcttgtagccacatttaaaaaggcaaaaagaagaaaatgaaattaactttaaaaatggattttatttaacccaaatatatccagaatatttcacattctttttgtccaaagtcttcagaatctggtgtgcatttatctttacagacatttgaattgagatcagccacatttcaagtgttcagtagccacatgggcttaaatggaggcacttgcagcatttgcttggct

SEQ ID NO: 127884 - DNA, 1123 bp, Homo sapiens
agagggtgggtgctcaggatatgggtacattgcctggcctggtcacattggctttgtagttgcttctagatacatcctgtgttactgacagatcagcatgttagggaaataaaacacgtatgttgagcctgcgttttcccgtactccacagagccgcaaacaggaaaaggcctgcgagcagccggccctggcgggggctgataacccagagcactcccctccctgctccgtgtcgcctcacacaagttctgggagcagcagtgaggaagaggacagtgggaaacaggcactggctccaggcctcagcccttcccagaggccggggggttccagctctgcctgtagcaggagccctgaggaggaggaggaagaggatgtgctgaaatacgtccgggagatctttttcagctagggcataaactgtgcactgaactgtctgccgagagcagctggaggacagctgagcttccactggtgctgctgggccgcccgcctgtgggaatggggctctctgtgctcctacctttgtgccttcttgggcctggcagattcacctcaggccagaagcccctggacactccgggccttggggctgccgttctgagtgtgcggaaggcaggactcaaaatgagatcccatttgactccctctgtatgtactgtgccctctcctggctcttgaggctctggagtcccaattgtctgtgttagtcagtgaccaggttccagggaaaatgatgtcatgtggtggtccaacttactggaaccaaagagacagtactttgcaaagaaaaggatcactgccaggtgcactggaattgctacagtttagtccgcatgatctctcctgaaggaggaagcctgtttcaaaaatagtttccatcatgagtctatcaatgagctcccacctctccagccagcctagaaagcaaacgagctgcccacagttctctgccctgtctgggaggttgaggccacagtgtatagactggtaagccagacaggcctcctcccgcaagctgctaccttgctttcacctgtaccttggtccccgggcagctagctataaagcaagagggacaggagcccagaagagacactgaggacaagagatcacaccagag

SEQ ID NO: 127885 - DNA, 1032 bp, Homo sapiens
cccgaggccctgctctcctgcagcttgcattccccagtatgggacatgaaccttcaacaaataagcagattcatgagcacctgccaggtagtgagaagtgatgctgtagtgagaacaaccagtgtgcgtgcaagaggcaccagcccacagcaagttcaaggcagctgagaaaatgcctttttttaaggagccgctcagggacttgttttccacttcagatggaccagctgtagttgggaaagtgcaagcatttcctggttcaaaaagttaaacagactttctggaaaggtgggcatgtgtgtctggcctcaggcacatcctcaggtaggccactgaaagtggatcaagtgtgtgtaactggtgtttgctgacacctcctcctctttcctgtcctcttgcagctgggtggcgatgagaaggttctggagagctgcttgagcctaggtggccaccgagcccctgtggtcaccgtggactggagcactgccatggactgtgggacctgcctcaccgcctccatggatggcaagatcaagctgaccaccctcctggcccataaagcctgatgacttgccccaagggccacccgaggaagcagtattatctgcggtggggggaggagatataggacaggaaaaccacgtgctccactccagctccctgccagtgcagtgactctgcagggaaagactggcaaggaggctcaggtgcttccatctgtggtgactggaatgggacccacgtggagtaggtgacatatgcttcccagagactggtattgtggctgtgccaggagtacatgtgagactatgggaggaaagctccggaagaaggagaaacattgcagtggctactgtgttggcccagtagaaattgacagtattttgtatatatgtgcccatttatctttttcttttttaaaaaaagagaatactcttgtggtcccctgatgtctctttctaggatgtgtgtcactttgcttcagtgacagccctcccacccagcctggctctgctggccctgaactgaacc

SEQ ID NO: 127886 - DNA, 1096 bp, Homo sapiens
aggttggatgcattcctcagtagaagcatgcacctctctgacggtttaaagaggaaggcagattagagagaggtatttgaccttcagaaacagccagttaaagcagaagccccagctggtgataataatagtagtggttgaagaaacagaggtacacacaggtgaggaagacagtgattggtgagtcacgatgcaaacccaggcagccggattccagacctccacatagccaagtattgcaccagatgaaatagctctagtggtggtgccagttctttctgatggaaataaaatgcgagccaaatacgtaatttaatttttttagtagctatgttaaaaaaaaaacaagatgaagttaattttaatgatatattttatttggcctagtatattcaaaacatcatttcaatatgtaatggatataaacaaaatgttaatgagctattttattcttttcatgccaagtctttgaattccagtgtcaattttacatctctagcacatcttgatttggactaaccacatttcatttgctcagtagcacacgtgaccagtggctattggacaagacagctctgagtttactgtgaccctcaaagaagagccgcagacttcacccttgtaacagataagctgctggctccctttgtgcaaaaaaatgatgccaaggataataccaccttaaagcccaggctcttggacctgacccaggcctggtcacttaacgtcatccatagcccgggaggtctatgttcttggtttttccacatcctgtttcagccctctgaccctgtggtgtgtttgctgaccagtgccatggtgtgcagccaaaggaatgcctccctctcccagtcacctcgtgtgggcttcctgtcctcgctgctgcctcagagtaagaagagcccctcaaggttgtcgcctgctcagggccctcctcaacctcagagctcggccaagaaagagtccttcggtggtcaggtaagcacaagtcctgcctctctaactctggccaagaaggccgtgacagctccctgtgcttccagacctcctggtcaagtgtagacttgtttgccctccttttaggactgatttcttg

SEQ ID NO: 127887 - DNA, 1051 bp, Homo sapiens
atgaggccagacctagagaaagtcttagagacaagactgtagggagcgactatttcattaagcccgcaagagcccacagcaccgctcctatactctgttctctgtgtccctgtgtctcatgtgttttactggtgtgtcaagggtttgggaaggacgtttaaacatttcaggggctggcttattctttaacttcgtgcaccagtccctgtgatcctgaactttgatgcggagtgtcagaggactaaccaggttcaagaagaaaatgaagttctgcgtcagaaggtttgttctgaacaggcttgctcctgaggaagtacttctgctttttgtgtgtgaaattaggtagtggcagtggaacactatattaatcaggtttccactgccactacctaatttctcagatggaaatgagtcaccagaaagtcagtattggggatttggagagtaacagtctctgaaaaccagaggcgagattcatattttaagtcagatatgtagcatgaacaatatagtaacagtaattaacttttaaggagaaaaagactatatgcatccatgccaccttataactaacctgttttcatgtgtctgttttgtctttccacgtatagctatatatgtgtgtatatatatatacacatatatatgtaaactatatgtatatatataaactatatatacacacacacacatatatatagtttataacccatatataatttagttgttcctactcagctatatgcttctctagtttgataaaacaatagagccaggggacccacatttgcctgtacatgttgcctgaggaacatttctctttcctgaaattaagatctccttaggtgatattgttaggaaaaggaagattataggctgtttaggttatggggtttaagattcttgggatttggggtgtgtgtatatgtaattttcttcaggcaaaaggttaaaaacgctgtagttcattaacaggttttttttttttttccattccagagtcaggctttgagagttctaaagcctgattttgtagattctaaaaagcaaa

SEQ ID NO: 127888 - DNA, 1042 bp, Homo sapiens
gcgccggggcgccggagacctcagcgcgtccgaccccagcttgacggatgaggaactgagaccctcagacggacaggacctgcctgaagccgccccccgagtcaggagcatcgccgaggctggagccccgatgccccggctcctggtctagggttctgtctccactccagcctccttggccaggatggcgatgaggttttaggagccgaggttaggtagatggttgcgttttggcaacagatattcgtgttggcttccagtggcagtggaagcaaagaagtctgcagtccaaaacgttagctgcgttcaagtatctgcggtgtttgtttaaaatggcctcgtcagggactcatcggcaattttgcttctgcagttgtggaagacctcatggcacattagagaaacccaaacttcccctgctctaaaatgattttccattgcgaggttcttggaatgtatatgtgtgtgatttgtatgtttgtgtgtactgacttcaatgagaggcagtgagctaacagcaagagcactggaggggagttaggagatctggtttcctgcctggccaaagttagtggctacttagtggcaaaagcaaatcatttcacccctctgggcttcagtggcctgatctataaactaggggcattggattggtattgatatccaaacccttttccagattctgtactctgctgtaattgctcctcacaagaaggtgacttccttggctgacactctgagcagctaccacggcttcgtggaactttgatgacttgaaggagtcagtccatgcacctcctcatgatccttgggatctgggaattgtggagattgtctcatagctcttcttcaccccacccccttttttaaaaatgtgaggtaactgaaactacagttaagcaacactgccatttttttttcttttttgacagaaagtctcactctgtcgcttaggctggagtgcagtggcacgatctcagctcactgcaacctctgccttctgggttcaagcgattctcctgcctcagcctcccgagtagct

SEQ ID NO: 127889 - DNA, 1027 bp, Homo sapiens
ggcctactgtttttcacagcgatgtagccatggacttcgatggataattgataaggtcacctggcaagttctggtttagagggtaaagcatgtggcagataatcaagaatattttcctcaatcaatctcatcaatgagataattagtagcaattatgcctgaaccttggtttttgcctaagagtgcagctgtaaattttcatgcattccccacgtgttctaatgaaatctggaggaagcatatctgacataattagtcactctccaagttaccctgagagcaccccatctccttcagttaatgcaaccccctgctgtcctttatcaggccttggtgacctccttgaggcctgcagatccaaccagggcagttgaataggcttcactctgtgtcctcccagaggccctccagatctaagtgggcttatttgcagttgatatcctcatacctcattcctgtagagtggggagaaacaaggggaaactgttgctgataaagtggtgaagaggaaaatctcaggtcgactccatgattcactttaaatgaggtggggcagcagcctgaacacaggggcccagcccaatacctcatctgttcccccttcctgtaagataataacagtacgggtgatgcatgaatgagcaacgtatgacttacaaaacatgtaatgctcactacaccatttgaggcaggtttgattattcagcttatggtacagaggaagaaactcaggcgtagacagattaagtgactcacctgtttcccattccatcgtgtttgctaagtgtctcagtctgctcaaaagacaatagactgggtagctgaaacaacagaaatgttattacagttctggcgggtggaagtctgagatcagggtgcccgcatggtcgggctctggtgagggcccgctattggcttgcagacagccaccttctgtgctgtgtccttacatggcaggggtggggaggggaaaagagtttcttcttataagggcactgatcccatcacgagggcgtcaccatcctga

SEQ ID NO: 127890 - DNA, 1041 bp, Homo sapiens
gattacaggcgtgagccaccgcgcctggccaagtgtcctatttcaactgaataatcaggactgaaaaggcctgtggggctagccttcttgtaagttctgtgaaaagcacaaactaatcagaagttagggttcaaggaatttataccctaattaaacatgcaaagaaaagagagaaacacaattcagaaataaaatcatgctcatgtctttagactaaggtgggggcagaaataaacttgagtttggtttcacccctgcaaatgggcttccctctcagatcctaatgagtgactacctgagacagataggttgtaaaacctaacagatagcttatgaactaaaggccaagtaaatttgattgttggttaagcagtatttaatgatggacttttctagattagaaacaagaatgccaatcttgcaataagacttcagaagatcttagcacttcctaccatgttaaatacttagaagggaaaagtgagaggtaatagccactgttttgggcataagagctaacagctgcttcatccagggtgggcagcagctgtaattctcaactgtggatggctgcctccttggtatggctttagaggtgtatcccctaaagatcttccttacttatgtgctcacttctgaaattcacataaaggaatgcatcaccattcatttcaaaagaagacatcaagtttaaaaggcaatcgctagaggaagaaaatattgactatgtgaaactccagattttaactaatctctggaattattcatgatttttgcataattctggtaatttctttttctggagtgatgccaggcgatatgtctccctttctattatccttggaatatctcaaatgtggagcaagaactcttgccacaaagcgactccaatgtctcatgcttacttgcatacagtttggctgcatccagccctggcctgggtccttttcatctaccatcttccctgctggctgagccctaccttgccctagctctgtacctgcctctggttctgcagaaaggtcatgctcaccaccaggg

SEQ ID NO: 127891 - DNA, 1870 bp, Homo sapiens
ggagtttaaaattgtaatctcttctgtctttccttttggttttgctttctaaatttgtttgacgaccttattctttccacacaaactcaccattttccctcttttttcttttctctccttaggtattccagcgtcttcaggaaacagtttagactctcttcaagatgacaatcctccacactggctaaaatcccttcaggccctcacagagatggacggccccagcgctgctccatcacagacccaccacagcgcccccttcagcacacagatcccgctgcacagagccagttggaatccctaccctcctccttcaaacccttccagcttccactccccacccccaggctttcagacagccttcagaccccccagcaaaacccccacagatttactacagagttcaacactggaccgccattaggcaaagaggagcaaccattagaaaatgcaggatttgtcccactctgttttctccctctcagcccaccacccacagctcccttctcatctcttatgttctgaagaatccagtacctgatcaattttttttctccctaaccccagatgcaatgcgatcacagggtcattaccatctctttattaattgtaaaaatttttgttgatccagcatttgagtgacactgttgaatgtttctaaaaatgcctttttaaggagagaaaaaaaaatcaaagggcagtctcaatacttagaaaattattgtttgtctgttgcgcataataatgacataatctgcttagcagaaaatgacgattaatctataggaaagctcaagtaaatgcattatcaactgcagaagtttgaaaaccaggttcatttacgtgagattgctaaatgcatgggggaaagcagtggtcctagcatccatcttgtattcagcttatcattattgcagggaaaatgcttttaatttaaattaatttttaattcttttggcaagttgatggcaaggacttgattgtgtcattaagcaaaagaatgtattggaagttgatggaaagacaaattcatctgtagtagtaactggccgattgctaaagagttcataaggaggtgagaagtaatttttttaaaggagaaaaattttttggctttagatttaaagtaaattgaaatgttttaaagaaaaaagtattcacagatttaatacctattaataatataagagctgaaatgtaagtcatttcttcagtccttctcctctgtcggaatcttttttgttttaccataaattcacctgacgagggcactctgagatagcactgctctggggccatctgatcaccatcgggagcaaatctctgacctccttgcctgcagcttttacttaaccctgtagtttctggacgtttgtgcagtattgaaaagacaggagaaaagaaaacagaaacctggttataacctgacgctaaaactaaaaacaaggaaatgtacctctttcttcagaattaaaactaaaatcttaaataaaacagaaaacttgatggtgacacttgggttgtccttgtttttgtttttctgttttgttggatgtgagtttgaaaggttttgtgacaagtagccatcagatgtttccatttgattttacatcttcaacagtggggagggaggatggtttagaagaagaaagtggaggagaaacaaccattttattgacagtcaatggcatccttgacgttcagcccatcttgtcctcaagaatccctcttccagtgcctttcagtagaagattcctctttctgctattgtattatgcatgccaagccttcccaactgagaagccttatgtgccagtaatggagaggttattgacatgttgagatgttggttctctttagggagacctgg

SEQ ID NO: 127892 - DNA, 2003 bp, Homo sapiens
ggggaggaggggtgtcaagattgttgcattataaactagctaatttatttcccaaggtatcctgtaatcatagtgcacctgggaggatctaaatttctcactgtttctgcatcatgcgccatatgtgaatttctttggctaacatacccttgcttgatttgattagtctacaattacaggaacaaatgtcccttaaaacaaacttttttttagagtagttttaggttcacagcaaaactgagtgggaagtacggagaattgtcatataacccctctgcctttattgtcttttgactttattactaattttcaaataagatttatgtaaatgcaagtgttattctgttaatgcaaaattaaatgttcctcaatttcattgctcactaaatggtaaagcaaaagttaggagcagattgttctgagttatgggatattctctctctccctattcagtagaagagggaggatcatttgcatggacttcttagggacattagccactcggtgtaagatcatttatcttcctgaaaatgttcccatgtagttatacatcatctttttatttctgggggattttatttttcttataggaagttttccctgtttggcttttgcctaattggaagctattttaagttattcagcatgacagttggactgctttaaaagttagagtgtaccatagccgtaaaccttactgtgattgagagtgttctaggacttatatttatgatcttgtttgtgtctcatgtagttagggagccagggggaaactagtgattgtattcttgagcagaatttttttctcctggccgcaaagtccagtttcttcctttagtcacaatatctctctgctaatcatggccagtggacacactataatgcttctctgtttctcttttgcctcctttcaatcatgggtcttcccctgggctttccctttaatatttgaccctttaaaaaattaatagtctgtacagagtagatcgagagagtaagcttgcttgcttttttttggacagggttcaggttcaagttctcaataacaagttttgtgaacttggggaaattattcctgagtctgtttctttatctagtaaatgcagattatccttgtctgcctgcctctcagggctgttgtgaagatcacatgaaataattgactatgagagtgccttgtaaaccatacaacacatacaaatgtaaaataatatgcaaatataagaaatgtgaggtttagtaaattacatcaattatgaaatgaaagtagggttggagaatttattttcccttctgttgtcttgttttgtgtagcctagagtgctttttcttcatcttaataagttcagagatgaccttcgttcagtttagttgtagtattttatctttttataaataaggtcaatggagttaaatgcttcacttgttgaaacatgatataatttggcattgatcagtggttggtgcaaagcaaaatttcaaaaagaaaattctgattttgctaagcagcatagatcgtgcctgttagaacatcctcctcctccttctcagcgttgattgccaatcagttctgtagaatcagaaatatttttctatgcttttttcaaaaactccagtttgtaatttgacttacattgctattttcaaaaataaaacaactatctaagtatttgttaaacaattaggtagttgttatacttcacccttttccccctgaccagttagttatactatgtggattctggatggtagtagatcaagttagtttagtcacaatttataaaaagccttttctatgttgctagtgtcttctcatgtttgatactattcataaatagacccagaaaactgtaggactccgggactcaggctgtgaatgattggtagaactgttggagtagagcaggcagactgtgttggaaattattccatctagaaggtatcagctcctgcctcctcggccttagtgactaaatggaaatacattcttttcaaattcaaaa

SEQ ID NO: 127893 - DNA, 1829 bp, Homo sapiens
aaggaatagtggctgaagtagaaaaatgggtagaatatatcttagagacttttgtttaatatcctgcacacataatagtggagtatttgtttttaataaaacattccttctttaaacagttttgatgcgttggactttttaaaagtatatttgcttgtgttttggcatctgaaatgctattaaaaacatatcatcttagtggctcatttccttcagtttacatgcagagaagcctcttggaccccaaaacttaacttactcctcctgcattcagaaagctttgcatctttttggagagaaccatctgttcacagcattatacagataggaattaaacagattttgttggggaaagtcactttccagctcttctcaagtcagaccctcaagtctgcagatatcttgatgcatgtaacatttctaagacactgagctacatgctgaagaatgtacaggatgtccccatcaggcttttcagcggagttgtgagaggtgaagtatgagtacatggaaaggtggacagtaactgcagtcgatggcacggcatggtgtgctgccagatgaatggttcagaccctaagtgctggccggtggaagagaagagacttcgacttttggaagattgaataaaaactacttgaagacaacaagaaagcattctagacaaggagaatggagggaatagagtttagaaagcacaagtcatatgtagcgtgtctggatttttctgtttatgtcatttctactagtataaacaaatattgccttttttgttgttgttgttttgactgttactttgttcaggttgtttctgctcagaactctttttttatttgggttcttaagattttccacttaatccaaattctactttcagatctattaaacccttaagattttgtctgtgacctagtggagtattggtgtgtcttgcattataataaacatagttgtagaaatttgagtgtaaactatttaactagaataacatttttcataaactgattttataatgtctgtaacaattcatttactaagaagtcattttctctgcatattttagttaataaattggaatgatttttgtgactgccctgatgtacagtacacttatattatgaaggctttcttttaaatttcaatatgacaaattttgtctgctctttgaagtttagttcagcataaatcatttgtatttgagtcacttagagattcattgttgaggtttgaggaagtttagactttgttcaaaccaagactttgttcaaatgaagatgcactccatcccaaaactggtaggagatcacttataagagggaggggtgtgggggcaggagctaagacaggttattccctatgtccttctaaaaatgcacaaaggtttgaaagtctaaatggcaaagagttaatcatagtaggaaccaggtttctgatgtgtagccacttgcaccaagaaagatttgtttaagtaacctaaccactggagcctgtggttttgaactataaaggacaagagtgaagatggaagacaaaagctttttagaaaaacaaaatcaggttgtattgagccttttggtaatgaccattaaatatggctcaaaaactgaagtgcagaatgaacacttttaggtgtattttgtgactgggtctctcagtgactgcttcccggtaagggtgtatttattatttaatgagaagaccttgaggagggggtaccaaaaataaagtagaggcaggaattccaagacggcacaatatcctgatttggtggcacaaaaatatattcgtggaaacaaatctactggaattgtcttgtttgggggcttgtt

SEQ ID NO: 127894 - DNA, 1148 bp, Homo sapiens
ggctgagcgacgcagcgagactccgtctccaaaaaaaaaaaaaaaaaacatggtagcaaacgttcagggttatatgtttgggaaacatacagtacctactgaagttcaggttcaggcattgtctactacatagaaatgattaaatcgaggtccttttcctagaggagctcaaagtctagttgtaaaaagtgaacatgtaaacaaatgattgcaatacactgtggtatttgcaaaatagcgaggatgcctgccatctaagaactcaagtataattattcccattccctgcttttgtaaatcctaaaattatgtcacgtcctcctagggtttctgttatttttgcagtagccaaccagttcttcgttggtcagaattaagtccagaataaaagttttcttccttattttcaccttggaaaagagagatcgtcagcaaggaatgttttatcaggtttattttcttctagcagatttagacttcagagatgttagggtggttgacaccttccatgtctctgcaattttgtcatttgttttggggaagtcatattgggtgaatattctggtgatctgtgtattgtctccttattttacattcccttgaccatctttggatctcctcacagggctttgttcatggtcactgctcagttttgtgctcacttaaatgcttccctccaggctgctgctttgacattgtaaagatcttttatatgaatcttttttgtcccttgccctcatttagcgttgcttacatattgtggttcgggtctcatctgatccagtctgtgatgcttctaagggtgtatgtatcttttatattcaaatttgtttactttttcctctttttttatataactttgcacatgagtattttttattttttcttagattctgattccttagatccttcataaagcagccatctagattcttctggttctcattaatctgattctccttcaaaacagatttatagatccttataggaacattctagaagagaataatatacattatgccaaacacatctacttatattttgaaatgttcccactgtatttttttatttgctgcctgtggcctgtgtgtccctgtgttctctatgggatgccctttccctcttccacatcagctgcttttcctctg

SEQ ID NO: 127895 - DNA, 1575 bp, Homo sapiens
actgtaaggaggaataaaaagcaaaatagtctttttaaaacatagactttaatttttagagctattttaggttcacagcaaaattgagtggaaggtacaaagacttctcattatattccctgccccatcacatgcacagtgttctccattatcagcacccccaaccagggtggaacatatgttacagtggatgaagccaattgatgatctgggtggtgaataggtggaacacagaggagtttcagggtcatttttagaaagtacagattagttttaaaactaatgtagctttttcagattgtcttcttccacttagtaatgtgtgtttaagtttccccagccttaatttttaatcacacattttacatagctaaaatcattgagtttcagagtatcaatgcttattttaaaaaacagacatttattttaaaaacaatctgaaaaccttaataaatgtctcttaatgagaaagaactcttaaagatgtatgcttggtctgttgtattggaaatgtttatcaccataactatatccatctccatttcatttagttttataaaataatgaagttatatcattttctgaaataatttttcttctgaaatgaaagtaaatactcttaatgcctaaaaaatactttctaaaaatgaagctcataaccagattatgaagaatctgtcaattaaaatgatgtttcagaaaagtgggaattttattcttatttgggatttttgttatgttgatttaaatgcttaagacaattcgatgctgataggagccatcttttagaaaaagataagactgactgatctttactattgaaataaagtgtgctgtgtaatcaaatgcagtaaagaactgggtttgatgttttaaataacttttagataacttggaagtcttttaatttggaaaattatgaacatcagcaatcttaggaatttcaataggtatataaccataaagggatttgctgtataggaagcacaatactttcatctgaatgtaaacctgaagagagacttctgccccaataaaaatattttattgctactaaacaatcaaaagctattactgacttcatttggaatggccagtcccgagtgatctgctaagaaataagcagaacttcacttgactagccttaaaaaaataaaaattaaaattaaaaaaaagcagaacagcatggtttttaggaggctgttagagaatgtcatagcatcaagctccagagaaaatggtacagagtagacatgcaataaatgtttgtggaaggaaaattgatggttgagagtggtgtcaattcggaggcctgcaaagcatggatgtgttttgtgttaatctggacttttggaagcatttagtcagattcatttgcatatgagttataattcattttttggttcttttctggcattgtggtgttcattgttaagattttcccccctacacgtcacccactgactatgtgattaatttttcttctttcttttttttttttcctctgaacttgggaaacctcagctcttggcttttccttatttttccaacaccccctgtacacacatacacaca

SEQ ID NO: 127896 - DNA, 1765 bp, Homo sapiens
taggggattggttccacagattgcaaaattcttggattctcaagtcctcgatataagacagtgtagtatttgcatatgacctgcacatatatgggaggccgtatattttaaataatctctagattacttctaatacctattacaatgtaagtgctatgtaaatagttgttatattgtttagagactgacgaaaactgcatgcttaataaattacacaattttttaaaaaaattttctattcgatgttggttgaatccacaaatgtgaaaaccccaggtacctggagtcaactgtgtggttttttttttttctcctagtcagttaataataaatattcctagttgggaagcaaccttagttttctaataaagtatttttaaactcactccgtatatgtcagctgaaatatcaactgtgacatttaaaaaggataatgcttctaagtacaaatcattgctcaagaatactatgtttgtgaaaccttgttgatggattgagaagccactgctccttggacctccttatcaccctgtgatttgcttctgtgagttgtaatcgagccacctaacattgctggtcatactagccttccacttcttagtcaggggctatttccaaagaatcactcttgataatttgagatgcattaagaagattctactctgttttttggtcttttagagagtcttctctgggtttgagttatagagaaatcgagtttaggtacctagaactgagagcaagcctaagtaatctaagctacttgagaaatggactgaagtacccagatgttccataaaacagcttgaagttgttgaccttgagaaccatttccttttctccaggttcctcttgaccacacttcctaaggcaactattgacttcactgtcttagcccactttacctttattctaagagttcctggaagctccaagctgaccctggaacatactgtgcttataacaattttgttattccagctcctgttgggtgctcagacccactattgtgctgttacaaagcaacatcccaaaatgctttttcccctcatataatttataaagcctttaatgcatccattacctttctttcttttttatagcgggtgaaattcacataacgttcaattaattattttaaagtgtatgatgcagtgacccagtaccattctttaattatctcaatggtaaaatagcagaataagtaacctactctgctgtaagaattttagtctgtttcttgttggggctgtgtggtaatagctgcttctagactctgtgttttacccagtaggctgaaaggcaaatgttaaacctttaaatattccgtatttctgcatagcagtactactgcaacttaagcttgtgaatcaagcaacttgtatacacccttttaaaaaggcagtggggggcagtgcaaggagctctaggcaagagacacttaggagatttgcttttctgagtggtaaaaatgtttgaagcaactctaaatagctttgaaatgttagtaatagtcttactgtcttcatgacatttaattagccttctgtaagagtttgtttagcaaaggtaaaccataagcctagccctctatatgcatgtgtggttgaatgtgtgtgtgtttttatataaagcaattttcagttaaatcttccacttaatgaatgtagtagaggaagatgtctcatgtcattttggtgaccttgacctatgtctattcatgtatttattcctgctgtgttccaattcatatcttcaggataaa

SEQ ID NO: 127897 - DNA, 1068 bp, Homo sapiens
cttttaaaggagattaaaaaaaaaagtcttttgtgagaataagcccagaaatgcattgtaaatagttgcttagttgctgtgtaaagataagagtcagcttaaagatctctaaagttgaaatatatgtggttttgtatgttcctctggtttagcacaaagcataggagtggaaaaagcaaatattgagtgtttggttaaaaggggaaaaagacaaagacatagagacattcaagaagaccacattgaaatgtataatcttgtgccaagaagagtctattaaggcagtttcctgtgaagaaatggtgtgagtgatgtggaagggagttgaatgattttagattttgatgatgacaaagaacatgttagtgttgctaagggaatgataactaggagactgtggtcactgtgataaccactcaatgctaaatgatgattgagaaccagagaaaggagagggttggagtttggaaagaagcttgtcttttgtaaccgtctatatactctctcctccagtcttttcatgagtgtaggaagtcaaactatgtgagagagaattgtagaaagcatggaagcaattccatgcatccgcagatgggcacctggggaatcctgggtcaggtttccggtgagttgaaaatgatcaaaggaaaacttccttcctcaaagcatcgtaggaggacatggaagcagagtgctggggaggaccaggaaaagccagggatgagatgagacagctataagtaagcagccccagtgagtgtgaaggattggtagaaatgttactgatgatgtgaaagatttagacagagggattaggtatggtgtatgatgagtttggtagttgaggagcccttattacaggtaatatagcttctcccaagctcacttgcaaactggaaggcttttttaaaaatgggcttccacctatgaagggaaagcatctgctcttacatagttggattaggtcattctgctttatttatatatcaaataagaattaaggtactggtgaacagtagagataaagtaagaattttattgtaacaggttataaaaatattttgataa

SEQ ID NO: 127898 - DNA, 2032 bp, Homo sapiens
catgtgtagaaactgttttgttctctctcttttgcacttttgcactttctttttgaatggttgttaattatgcatagatggttaaaagataattattgtagcctaaatgcaatataatctcttttctaatgcactgcctagtataccaggaaatgcctcaaaaacagaacttcagtttatagttgacttatctgaaacttgaatacggagtaaacattgtatgtgaaaagcaaccatagtagtgtaacattgttactgaacaaacagtaattctgtgggatattgttttggaaatttcattgtttaataattaaaatgtgataataagataatattataagtacctgaccagaatgagactaaggcagaagagaagagattggatgtcctctaaaattaggccacctaaattgtaacagataattttaatcaagagaatagtggagtactttattaggacataatgtgaagtgatatttctgaaaacacatttcttgaaatagttttaaaactgataataaaggaaaagaaactgtacttagtttggagcagtggacaaaagctgattcagaaaacatgaccatattctgcctacatgaagcatctgggaagaaagggaaagtcacacctcctcttgagattttaaccattatgataaaaggtatgctttaatttgttaaaaaaaaaagtatgaaaggggataatgtgaatacaaaaaagaagcctagagattgaaaataataataatagaacatgttattaggagatggtacttaatgtcatgttggagttggagttttcaaggttacctctatataaaattggattattttctgttagatataatgtgacaaattaaatgactttatcccaaggtacagtgaggtaaacaaaaatctattcttagatatccttagatttggttaactgaggctgtagaagcagcgaattgtctagccatttaagttatttttgtaaaattcagcataaacatcaatctctaatttctatctagaagtgactttaagacattacaagaacattgccaatttggaaaatgccaataaaatactgtagacttattaatattgtagacttattatcagtcttttactatagcttaatttaattatggttttcatttttactgtaagaggccaagacttcacttatgtctcctgtggagctgaggctcctgggccttgttattataacaaactctggctccttgtaatgatgcttactagctcaaagccttctccagcattcagtgttagcctttcattgcctggatcttcttacaaagccatagcaagtggttagtgccatttgctccttggtgttgagagatatacctgttaaatgaggcttctttcctttctcattcatagccagcgtggaaaaatcatcaggtagtttgcccagatttgccagagccctaaataaaatggcaaaacgatctccctgcctgcttctcctccccacccccacttacatgcacaccgtaaatcaagaaatgctttttgggcaattagactttatcttctaaatttttgcatagaatggctaaacatgatcttttgcctcactttgtaattcctacaccttccttgtaagcttcaccttttgcttacctaatattttatttaaacatggttttttaaaaaacctgaagctttaaaatcatagtcataattaattttacactaaaggacagaagaaattatacaacacataaaagaagccactacttcacatagcaagcaaattgaaatcaaaatgacagaagaatgagaaattctttaaaagcttcaggttttttttgttgttgttgttaaattcctgcatgatgcatcatgtgcaagggaaacttaatatacttttacacccttaacctttataaagtgactagcttttcccttaacataggaatttttaacctggagcccagatttttgagagtacacacaaaattgtgggtttgtgtgcatgtacatatgtccatttttttctagggagaagatccatagtt

SEQ ID NO: 127899 - DNA, 1772 bp, Homo sapiens
ttggtttgttcagtgaattattaaagattgatatatctgaaacctatcatgggaaaaacagttgccagaggtttgacagaaatgcagcttcctttttttttgatctaattgaaaactgtttttgtgtttaaaattagtagttatttccttaattaggtgaaacctttttagcagcatttggtttactaagtttagaaatatttttgacataaatattcttgggggaaattttgattcgtgggcagttacagtaaattcattcagatctttttttttattattattggaaccatatgccttctttctacaaagtgatttaccttgtcctaaaacgtgactttgttttgtccaattccttcattttaggaatagcaaagctgtgttccagaaagcttaaataatttgttaaaggtcacatattcaattagtagtggaattagggtaagaacttagatctcaaattcaacaatggaaatgtttttgcactacaacgatgccctccttcataaatgaagatcactggcatgtgctttaacttggctttcttcccgtggcaattgtttttgctctcacacacttggaagtccctttttatcaacagtatcaactcatgagacaaattggcccagctcaggggtatatggcctattgttacaaaatagaataaagtgtatcgacttgatagaaatcagtctgtttcttagtccttattaatatcattttcttgctaagaactctagtctaaaatttgctttacagagcctcattgctatgttcttggggtttataagaatctttgccaatttactgaaaaactacaaaatcacctgttatatggattgacagactctttttctgctttgtcagttatccttccacatgtaattttgcagatttgttttaaaaaaatattctgccaagttgtttttattccatgatgttaaaaattatttggaaaacataagtcagtaagcattgttgtttcaagatatacctcaaaaaatatttgaaactgtttaggattggatttttttttcatgtttttgttaatttaaactttacttttgagagggcatttttctttaaattttctttgtttctatatgaactgttttaacagtgacttgattgaattttgagtcatgtgtgaaacaagtcacttgtagtcaaataattttcagttataatcaggagaaccgatctcattcatctataattctctgacctagaagtagtcatctcattttcagtcaattggatcattgtactgttaacattttactatttttcaattacttcaaaggtaaacttgaattttcagatgctgtatgttaatttactagttaatatttatagctttcatttttttctagtacataatttatgctttcaaaacatggatttgtaatttttctcttttaaaaatcagttttcacttctgtaaatcaaggtttaattttttcacaaaatactattaatatttaccatttactaggagtatctataagggtccaattggcttggaaaagaatggctttcctggtctttttttttttttttttttttggtagtatgtttataatctaaatctattgtatttgttcttatctctgaaacaatattactcaggatatatttagaatataactactttccaagtacttgataagtttatattttaaaattcatgtcttgtttcacacctggattccaaacattaagcatgtattttatatatgtatcagtattccaaatattgaaatcatttttaa

SEQ ID NO: 127900 - DNA, 1384 bp, Homo sapiens
atttgatggaagtgacttaggttggttttgattatgaatggttgagagtataattggagtgtcaagtacatttttttcctttgattagcaaaatcagtctatatcattcagtttttgaagctagtagcttaagagttaagtaactgctagaagtacataaggccttttgtaattatatgatcttaatgtgctaagaagtcacatagattttgcacttacttaatttgtaaaatgacatgtttaactttcagtagcatggatacttattaagtatgaaaatgagctatgtatctgatattcatcactatttttcttcccaacagaaacaatcccagtatcatcctctacagactggcaagcagcttttggctttggttcttctaaacaaccagaggatgacttgggttttgatcccttcgatgtcactcgaaaagccttagcagacctgattgagaaggaactgtccgttcaagaccaaccttccctttcgcccacatctcttcagaactcctcttcacacactacaaccgccaaaggtccaggctctggattcctgcatcctgctgcagctacaaatgccaattctctcaatagtaccttttcagtcttgccccagaggttccctcaatttcagcagcaccgagcggtttataattcattcagttttccaggccaggcagcccgctatccttggatggcctttccacgcaatagcatcatgcacttgaaccacacagcaaaccccacctcaaatagtaatttcttggacttgaatctcccgccacagcacaacacaggtctgggagggatccctgtagcaggtaggttcatttaaaacctttgagaatttttgaataactcatattttcaggttgttgggtggatagggaagtaactgttgaataacagagtactaatatcttggaaatgtctatgaaagattagtctttatcataatctaaaatatatttttcattagatggatgccttgtaatattgagctttataaggatggtggagtattatacttagttattgtttggaagcattttacttaataggataattaccaaactttcatatggtatacaaatgcaaaatgaaaaagaagaaaatggtctctgaagttatggtactataaagtccaacaccgtggtgaaaattatgattttatattctaaagtaaaatggttaaaaaaaatttttttaatgataattaatgagagcatgagggataaagccactctctacctacttttggcagttacttgttttgactgatacacatatacacacacatcaaaactgagctataaatatacttgagaactctgattatgaatgttttacaagcatatcatatgtctcagacatacaccttttg

SEQ ID NO: 127901 - DNA, 1045 bp, Homo sapiens
aatttttttcctataacacagtatcagaacaatacatttgagtaacgatagtcatgtaccacatatcaatgttttgttttggtcaacaatggctggaccacatatacaatggtggttctatataattagaaataacttttttactgtaccttttctatttttagatatatttagatacacaaatgcttacccttatgttacattgcctacagtattcaaaacagtaacatgctgtacaggtttgcagcgtaggagcactaggcactatatagcctcagtgtgtagtaaaccatgccatctaggtttatgtgagtgcacactttaatgtttccacaatgacaaaatcacctatcaatgcatgtctcaaaatgtatcccatcattaagcaacccatgactatttttgttcatgtgctgagttaaataaagttagttataggaatgatatcagtacactgttgcagtgcttatagagattttattttgtctttaagtcagtcaagataaaatggatttgaagtcagtgatttactttaccatggtactacattttctctatgtgaaaataaaatgttaatgtttttgtttgaatcagtagtttgcccaaaaatgtttcttttgtctcatttctcatgccttctctagggttatgattagtatatagaaatattaaaagaaatatattgctcttaaaaacctatggagaatatttcaataacttttatgccctctgtcaaacacccagaaaaatgtcagtattatttcaaaaactgaaatggggaatatgtttatcacatgcacaaaaataaatggtaggttagacttttgatctattaattgtaagcagtgccttttttccccctataagctattattttacccattatttttggagaatctaattacaatgtaagttccttaagggtagagattttatacaggttgagtatccctagttgaaaactcttgggaacagaagtgttttggatttcagatttttttttcttttggattttgggatacttgcattatacttattgggcgaa

SEQ ID NO: 127902 - DNA, 1054 bp, Homo sapiens
cgtagtgctacacccagcttcttgttctgttaatagctaattatgccacttagatgtggccatgttttagtagcaaagtaatactttacatgttaatgtatatttgaagcctgtgtcaaagtatattctgtaaaggcaagttttacctgttgataacttaaatatatcctttgtgttagcaagtgtttaaaaatatctcagaattacttagggactctggtaaatggcaaaattaagatagattctttgaaatgaatatatgtgggagtatttaatttagaagcaaaatgaatatgtatttgtatatatggtaacatgacagtgaaatttggaaatgtctgttatgttgacttttatccttatgtaaattttatgtttaaaatgtaagtaaattttatattttgtttaaaatgtaagtaaaaatcagtaagtcactttgactatttttcttttgaatttggtaagcagaaaaactaaaccttctaacttttttttagtccacccccatccttgaaaatgttttttctttgattcttctactatgtaattggtttatgttgcaaatttttttaaagtaatcatgagactatatttagtgatttggttggcatcgccattaaggaagtagtaaaagaaagtaaaattcaagcattgcctttggagcaagttagaagaaatcaaaacttggctgaacatctacaaatccaaactgagacccagctgtgtcagtgactacctgtttgcagacagttttgaatttgatttctttatctgtaaaacaaagtaattaaatttgattttagtgatttcttctacttgtgaaatctaataatttgagagactttgaggagtcttgatgccttttcattgtgttcctcttctctttgtttcagtgatcatcaaataccagatgcctcaatttagactaattgaatagaattttcatgatggagtctggatatatactttttactttaaataaataaatatgtatatattttgtgcatatatgtattttaaaaagctctgttgcccttttgggttaatttacaaa

SEQ ID NO: 127903 - DNA, 2451 bp, Homo sapiens
aactcaaaatttagtgccataggaaatatttataggtccaatagaaacaagcaagtggcctctcagaacagggaacgatgcattgtgcagtatatatgacacaattatgctcagttaagtgcaattgccctcacttgttattgttttgatttgttccgttttggttttgttgtataacatctatttagaccataatttaaaaaaattaacatccctgaaggtaagtaaaactattcttccagtctagatatacatgcaaatagtaaaatgttactcaaagtaagttcattatcatttatttttgtgtctaattagcttccacaggcaatctttgcctaatttttcccataatatttgtgacattgccttttgatgtacacctacccagctagagtaagcatagcattcttttgtgtatagagcagaggttggcaaactttttctgtaaaggccagttagtaaatattttagggtttctgagctatgtatgtagtcttctgtcacaactactttactctgcctctgttgcactactacatcctgcctttgtagcagaatggcagccaaatacaatatgtaaatgaatgggcatgaccatgttccagtaaaactttatttataaaaacaggcaactggctgtaaattgctgaccctgggtctagagtttaaaatacattaatttttattttacttttgataaccatagaagaaaagagaaagcaaaaactaattcatggaagttttacttagtgtcaagataatgaagaatatagtaaaactgttcatctatgtattacttcaagtgctaatctccaaattaaaaaggagactgatgaattttggctgattttcagaaaactcagtgttacaagacttaattcttacatgaaagacttggaagtaggtttaaagtggaccttacactttttgagctagcaaaaatgttcttcccttaatatgcttttctgtacaataaatgggttgatgaaatgccttaatttaatttatcagatatatatcatataattttgttggaatgactttcattgatctagaagttttgtgatatcctcacaggtttctcttacttgttttatttaaaaatttatttaaaatttatttaatattttattttttaaaaatattatttattttatttaaaatatatttaataattcagaagattattcagtattttataccagccattttgtgaatcccactgcagttttaatttcttctttcgttaggcgggtaaacaccaagaatatgaacagaagctacttcaagaattatataaattaaatcccaattttcttcagctatctacgggttcagttgataaaaataagaacaaagtgacaccactgcagaggtatgatacgtaagtattgatattgatagtcagacatcttaccttcttatcagttgatcttctcttttcattttagatctttttcaggcaaaatccttgttgacaaggtctgtcatttatgcagaattgtttagctgtatgggaaatgttgagtcacaatttctgggtttgaatgcttgctgcctacttttccctggtaacacttcagactagctttttgatgggttcaccttttgtggtgatttgcagactactctgagcccagggaatactttccttattaaagagaaaattaagggattttaggttttaaaaggctctgattacctaattgaggtcccccttgatataattagggggaaaatactataaaagggaaagtgggtgttatctgaaggaagccttgtgtgttggggacacagatattcaaggatatctagttccaggaatcactaaagtcatttaaatcctgtaaatgaacagggagtatcccatattcagaatcttacttatcttaggagaccagtcatctcctatcttccatctcattatggttttgggtaaactatattgtgtcaatgcttaaataaatttatggtcttcagtagagagtctcattctgatatgttgatcttcttatcttagattatattttgttatggcctgtcagaaaatcatattaataaatataatttgggaattttattctatcctgaactttctttaaatttgatgtgttaggttttttgttcttttttatttgataagtttaacttttatcaaatgaattttaaaagtaaatgttgtaattaatttatgttgatgatctttttttaaaattccaaagttaaatttgtttgaatgttgtcctaatgtctaggtgttaaatattatagcccagtgtctgtttggtgctaaaatgatgtaagaactattttcaaacatagctaataataactacatggattattgtttgagtccatttcttcaaaaacacattctttaaattttgaagtctgtgtttattcattttaagagtaaagattatttaaattattaaaaactaaattagacac

SEQ ID NO: 127904 - DNA, 1828 bp, Homo sapiens
ctttgtaattacgtataatatgaaatttgtttctggctcaataaacagcttcaggcatgtcttgcagggcattcagaaattgtgcgggacaattctttgttgtacggggctagcctgagccttgaaagacatctctggtccccatccactgaacaccagtagactctcccagtcactttaacagtctctcccaataaaagtttccacaaatttccagactgccccttgagtgcttccctcattgagaactactgccttaaacctatgatgctgatgcaggacaacctgtgaccggcctgactgaaccctttggagcaggtatcttagctatgacgctggttgctgagttggtatgcatccagctggaatattgaatgcagttccaaactccactagccagaaagctttttcaaactctgctcttctctctttatcaaccctgagactttgctacggatgacttaagggtcattgtgttagccactgttactatcatatccctcaggggttttgggtggaaaagagattgaaactcagtgtaattacctcaccttctaatccattagaattggctacagcaaacataacagttaccttatacttacaagcacctaaaataaaatataagattaattactttctattaattaggtagaagactaagaattaatgatacacccgccgtagatttattcatgaagctttgattctatcaaatgcagaacataatagctaaattataagtctgtaagaatattatcaaatatgaatgggaagaaatactttacacacacttgaatagttacatgcagaaagctttcatttgcagagagcttgctatttggagagattgtaggaacagtaggtctaaagatacattctaggaaaacagaattttgaggtagttgcaaattatgtgagatgtctttttatcaagttacataccggtcaaattagccaaggttaagtttgtaagagaagctgaaagaatgcatatagtgttcacaaagtaaaggagatgaggtacgtaggtaccaccaagaagtaaccaggtaataaagaaagaaacgtgtaaatttgtttccgaaatgttacgtaccaggaaaagtaggggaaaaagcctcatgagacagatgagaaatggtaaaactgattgacataggaaactgtatgcacaatgataaatcataaagcatagagggttgagtgggcactctgttacttgaaatttgtgatttataaacagtgttatatgcaatagatttatgagtaaagactgtctttatgtctgttctttcaattctgtctttacctttaatacataattttggtcattgtttttgaagaattgctttcgtgtaaggatcatctcttaatggcaatgtagttaagatctttgatctgttttgtgtttaagaatactgtacaggtaagatcccatagactattggagcagttattagaacatagtagataataccaaatttagtgagtctcagtttctattcagtgggtcaagaaaaaaaatagcttttaaactcttttgatttcctataggttagctacacaaactgcaattaggaggtagtgacatttattagaaaactttaaaaattatctttttccttttgctgaagagggatgatgaatgtctccattataaggataaagttgtttaaaatggggacagtttataccttatttcttcttcttttataggttttaaaacgaccagaatattttgggaagtttggtaaaatacataaagttgtcatcaataatagcacatcatatgcaggctcacaggtaactaattttagggattttt

SEQ ID NO: 127905 - DNA, 1067 bp, Homo sapiens
ctgacaatctgtgaaaattggataatgattctattttgctgttaaggctaacatgtgatatgaatactctgtttcttttctcttttctgtgtctgtataagaaccaacagtggaggtgcagttgtttgaactcactagagattttagtaacctagattttaaaaattctgcccaagtagtaattcttgatttttcagaactattactatactgtctcatcattcttattcattttaagccagtttggaggaagagggagaatttggtaatgtgaaataaaggacccaatttctttgtcattcattcgggggaggagagagcttaaccttgtttcttagtacctcttttttctcttcttccaccaaaagccttgttagagtaatgtcgaactcatactttccttgaggcccttggatatgcatctggtaatttttagtttctgatataccatgagatactgactagattgttgagaaggcaaatataagctgatcgacaggcagagtgtttacttggtaggagagagctggttttgggggatcttccaaaagatccttgagaagaatttaaagtaatacttggcatggtaccaatcagaggaaagattgtagtgaacatgcttaaggagataggaaccttgggaattggctgagcgtgttaaaggccccagaaggaggatctttaaggagtctaatgtctgtttttgtaaaaattaatttaaaaaatagttaatctttattgatgatgtgtttatatgtgttgcaactatacagggcttcaaaatcaatacgaaatgattttgaccccgcgaaagtcagggacattagtaagaaggatctgtcatggatgataaacatggaggcaactcaagagttactatgacctaggtccagggatgctggcagtcgttagttacatgatactcaggacatcaagttctttccaaatccaaaggagtggtctagagttgatatagaaaaagacttctttagtaagaaatgttcagcaaagagctcattttaggtgtatgactcaccttctgtagccagttctccctcttttttttt

SEQ ID NO: 127906 - DNA, 1040 bp, Homo sapiens
tctctttaagagattgataaattaaaaggcaaaagctcatatatcatgtttagctatactgtgagtcttataagaagctgggaggcaaccccattaactcaccagaatacagaactcagtctcacaatttcttagatatagttcctctcaaaccttttcctcaaagattaaattctgaaaataaccttgtgattaagagaagaaggctgtccaccaacagacttatctgttatttcttccttattgtgagcttaatggcatgacaagcagaggcaaagaggcttacatcagttcttcaaagtatgaagtcaaaaaggtcagagcttccacagcatggcaacagctttgcagatgcccacatcgtgatagttgaaatagcaaagcccagcaaaggttaaagctgaaagtgccaaaagccctgccttggcagctttctgcgaggcatccccatgaacatagtcagtaacaacttgtccaaggccccagtgaccatgaagagtgagggtcgcagccagggaatagcccatcgcagagcaaggattcaaacaagcagccggaagcagacccaggagcaaaacactgaaaaccttcttgctagtccagtggagagatgcagccttggaaccagaatggtggctcggtgacaagtgtatgtgctgtactccacatcattctgggataggtcggtcctgaagaaatgctgagatataagcaggtctgaccactggcgttcacagcaacagagctcgacctccttgggcactgcaaagggcactcagcctccagagaaccgccatctcgttcctgaggatgactgaatatattctaatattccatggtatggatataccacattttgtgtatgcctccattgatggacacttggattactttccattttttggctattgtcaaaaatactgttaggaacactggtgcacaagtatctgttcaagtcctttcagttctttgaatatacacctaggagtgaaattgctgggtcatacactaattctaagtttaataaccaccaaactatt

SEQ ID NO: 127907 - DNA, 1554 bp, Homo sapiens
aaatcattttctttcatttaaaaatcattatttacccagatacctgttatctgccctcctttatgaattctgtcttactgtacgcttcctccatgtccccttatgccctacctagcccaaaacactgaaaggttggacttccatatgaatcaatgctttccatgaagtaaaactgcagaagtggtggcaggatattcctgaatgaagtttgagacagatacactggcagagatctcttggtgggcaaggagcataagattagtagcatgccatctggggttagaatttaggaggtggtagaatgtaagtgactagctgacagtttggctaaagaagtggttgcatttaaccaggctaataaacatgagcttaaaaaaaaattcactggctaagactgggtcttgcacttcattttcagtttagtgtttctccttggattaattttttctgttttatccattactagtggtatactgtaaattgatgtacagaagtatctctaaaaagactaatttataggagtccagacggactagaagggttttaagcttataatacctggatccttttgttttaattaggtttctagataagtccttacaaacttcaaaggtgttataccctatcagatactttttcccccaaataaaactgtatttttcagttgaaaataaattgatataggcaattccttttcttgacaaccttcacaagtgtggtagagaattatttagcacactaattagtctcagcttcgattttgtgcagatttgattttacctattaataacactttcatcgggcttagcctttaattttataaactcctggcctcctcctgagcattaaattgataggaaacatactgatgctaatctctaattatacattcagaagttttttcatctcatcactctattgtccctttttatttgtccgtcatacttaaattttcaactaatttaatatagtttttctcattatacaagtaaacgttcatttctaaagattgaaaaataaaaggaagaaaacgaactacctctagccctctactcagtgacagacactgctattttcttttctttttcttttcttgagatggagtttcactcttgttgcccaggctggaatgcagtgatacgacctcagctcactgcaacctccgcctcccaggttcatgtggttctcctgcctcagcctctcaagtagctgggattacaagtgtgtgccaccacgcttggctaatttttgtatttttagtagaaacagggtttcgccatgttggccaggctggtctcgaactcctgacctcaggtgatccacctgccttggcctcccaaagttctgggacaggcgtgagccaccatgcctgtccctattttcttacatgtcctttgatacactcttttattactattcctcttttagagacaggttcttactctgtcacccaggctatggtgtagtgacgtgatcatagctcactgcagccttgaactcctgggctcaagcgatccttctgcctcagcctccgcagtagctggcactacaggt

SEQ ID NO: 127908 - DNA, 1143 bp, Homo sapiens
caataaatgactttaaaatttgtgaaagaaatgaagaagtgtgcttaaattaaaaagtgtgcttaattaaagcaccaacttccttgttttctctctgttctttcctttatttttaccattcgcacactgtgtttcctcagatattcatattttccagaagttttttatctttttttaattaaaaaaatttttggagacagggtcttgctctgtcatccaggctggagtgcagtagcatgatcatagctcattgcatcctcaaacccctgggctcgagagccttttgctccaatctcttaactagctggaactacacatgcacgtcaccatgctcagctaatttattttttatttttgtggatatggggtcttgctatattgtccaggctggttttgaactcctgacctcaagctattttttcatctcagcctcccaaagtgccgggattacaggcatgatccactgtgccaggccccagaaattttatgtctttacatcataaagtgttgactaaagaaggctgactcacagcgatggtggggaaagtagtggcagcatggaatagacagatttgcacagtagtttgcatagctatgtttagaccgtagttgataaattttgaaatcttgaagaacctgaaatttgcctgtgtaaacagagtgaaggtgacagagtgcttagtaaatttattaatcattaatatttcttccttgagcaacatcatcatcatcatgatcatcataaatgcctagtattatgtctgatacatagtatatgcctaataggatctttcgttttaaaaagagttaaacttgagtttcctggaaaatacacagatggtgaaagataaaagtaaacattactaaaaactgaaatgctctgtcctagaaatggaaatgtacagttatgcatcgcttaacaatatggctagttttgaaaaatgcatcattagattattttgttgttgtgtgaatgtcatggagtgtacttacacaaacctagatggtgcagcctactgtacacctaggctatttggtatagtctatgctcctaggctacaaacctgtatggtatgttgctgtagtgaatactgaaagcatttgtaacacaatggtatttgtgtattatacatatctaaacat

SEQ ID NO: 127909 - DNA, 1188 bp, Homo sapiens
acacatcaccaccaacaacaaaaaactgctcatgaacatttatgtataagcccttttgtggatgtatgttttcatttttcttgggttaatatatagaattggaattgctaggccatataggaaatatatgtttaaaactattttcccctggaccatagtgatagaggggaatggaggtgagaggtaagtcaaggctataccataaatgaccttatagttcatattaaggagggttttatcccaagtataaaaaaagccatggaagtgatgtaggagaataaaaccatcaaattacatttttacacctgactgctttttgtagattgagttaaaggtgaagctgaaggaggaagatccagtgaagaggatatgtcagttagaactctgttgcaaagaacataaaacttgaccaaactagcttaaacaaaaagagaatttttgtttcacataaatgagaaggtccaggaagcattgttcattctcaaatatttaaatactaaatatgtctgattccaaaatttgtatttcatcagctcttacctctcttctgaactctagatatgttcactaaagagatccttatgcttagaaaagtacctgatgtatatactagatactcaataaataatttgttgaataaacaaatgttcttgggcatccctcagagttatactgggaatcatacttgaaacctcctgctcttccgtttatcatcatcaataattatctatcctcctgacagattatttgtcaaacttgttcagttttctcaatcttcactgccattacacccctgatttctttcctacccttcttgagaaccttctgtggtcttcacatgctgcttctttctccattacagtctctaaaggttggagttactcaggccttggtcccatatcctcttctatttctttgtagccttccttggatggaaggtaaatattaaaaaaggaagataataagtataatattaagagtaaggcataagggtttgaattgattctgacatatagtgaactacatgctaatttgctgtaaagggaaagtggaaaacataccaataggtactctaagcaaaagtccagggaaggaatagatgtgtaaatttttttttttttttttttgagacagagtcttgctcgtcacccaggctagagtggagtgcagtggcatgatcttggttca

SEQ ID NO: 127910 - DNA, 1718 bp, Homo sapiens
ttcttaatgtcagtaagactataaattgtattttttttttttgagacagagtcttgctctgtcacccaggctggagtgtagtggcatgatcataacgcactgcaccctcggcctcccggattcaggcaatcctcccacctcaccctcccatgtagctgggactgtaggcatatgccaccatgcctgactaatcttttggtttttttatagagacagggtctccctgtgtttcccaggctggcctttaactacagggctcaagtgatccacccacttcaacctcccaaagtgctaggattgtaggtatgagctactgcaaccagcctttatttgcatcttttaaaagatttattttttacttttaacctttgtttagaattttgtgtaattcgtgtgttgcatatttaaacttctttgttctgtctctttaatttcctttggagccaatcattatctcttagggacaattcgaaagggttaaattctgtgagatgctatgacgtacttatggtgaggatcactttatatatatatatatatatatatatatatatatatatatatatatttttttttttttttttttttttttttttttttttttttgagtcggtgtctcgctctgtcgcccgggctggagtgcagtggcatgatctctgctcgctgcaagctccgcgtcccaggttcacgccattctcctgcctcagccttctgagtagctgggactacaggtgcccgccaccacgcctggctaattttttgtatttttagtagagacggggtgtcactgtgttatccaggatggtctcgatctcctgacctcatgatctgcccacctcggcctcccaaagtgctgggattacaggtgtgagccaccacgcccagcctgtatatttatatatgtatttttgagatagggtcttactctgtggcccacgctggagtacagtggtgtgatctcagctcactgcaacctccacctcccaggctcaagcgctactcctgcctcagccccccaagtagctggggctacaggcacttgccaccacacctggctaatttttgtatttttagtagagacagggtttcaccatgttgcccaggcaggtctggaactcctgagctcaagtgatccgcctgccttggcctcccaaaatgctgggattacaggtgtgagccaccgcgcctggccaatatattttatatagtaaggtctccttcagctagtcagcatgccttccaactctccgctaggcataggaacactgctcaaggtgccaatatattggctagcggagtgccaagatttacgtgtataacgtaagacacttatggaataatacaagtcattgtatatacaggagctgtagagttcagagaacggaagagtgtatgggtcaatagtttactttttattatctccgaccagctgataaaagacaataattaaatacatacatatatacataaaatagataatttactttcaaggctgctattctgcctataattttatgtcttgataatcttgcttcccaaaacataattttatcagatttctttaaacttagtctttaacttgattcttttatgcatacttattaccattttagttaggaagatgctacttttaggcatgtgtcacaactcataataattgcaaaatattctacagtttaatggtttttttgaggaccctcagattttataagtttata

SEQ ID NO: 127911 - DNA, 1822 bp, Homo sapiens
attgattaattgattgattcagacagagtttcattctgtcacccaggctgaagtgcagtggtgcgatctctgctcactgcaacctccacctcctggggctcaagagatcctcccaccttagcctccagagtagcagggaccacaggcacgtgccaccatgcctggctaatatttgtattttttgtaaagacagggtctccccagttgcccaggccggtcttgaactcctgaacacaagtgatctgagccaccgtgcccagccctattcttataatatcatttaaaggactgttcaacttgtaagctaagggtcatggcctggttgatttttatgaatatattcaatatccagaaaaacatttcacaaccagtaattattatttcactataactgtaacatacatctatcataaatgtgtgttgaaaaataggcaactgcatcagtaagaaatgccaatattttggttcttaattgctataaaaattaagagtgataccttagttgagacattggggaataataataaaattacctaacaactggaacaataaaatatttcattcaaataagagtgtgaaatatcatcatgaaagacaaattaagaattataatgactagaataattagcaaatatgttaattagtatagtaatacatataaatatgttttcacaaattaatatttataaacagataacaccacatttgattttaataaatacatatttgtgcatgttaataagcacatatctattatattaaatataaacatatttacacacagaagtacatatagtgtattcatatatcaacataaaatatatattggcataaaatataaggattatgtgtctgagtggttcagctctttgaaataaatatgtaaatttggtaatttccatgaatttattgttcagtgaatcaagttttatagaatgagtttgtttttgttatactaatatacaggattatatgttcaagtgcgtgtgttaccagattggaaacaggagggtcagttgtgtgtttattaaattatttgtccatctgtatgatgaaatgtattgcagccatgaagaagaatgaagtagagatgcatctattaagatggaagaatatgcagtgtcacgtaaagtgaaaaagggttcagaacaatgtactcattcttttccttttcaattaaaagagggtactacaagatatattcgtgagtgtatgtttatgtatatattgggtgtgtctataagaatacacaggaattgtttacagtggtttttattaggactttaaaagatggaaacaaaagttaatgggtgtccttttattgattttaattctgatcatccagtgagtaaaagtaaaattaattttttttttttttgagacaagagtctcactcggtcacccaggctggagtgcagtggcgcaatcccagctcactgcaacctctgcctcccaggttgaggtgattctcctgcctcagcctcctgagtagctggcactatgggcatgtgccaccatgcctggctaatttttgtatttttaacggagacggggttttgccattgttggccaggctggcctcgaactcctgacctcgagtgatctgcccacctcagcgtcccaaagtgccaggaaagcaggcgtgagccacaacatctggcctaaaattaaatatttatagcatatatattcattatagaatatgtgaaaaatgacaaaatagaagaaaagtcaaccaagataactattggtaaaagtttgctttaatgtgtttcctttcagtctttttgtttatttgtttgtttttgcaacttctgtctcc

SEQ ID NO: 127912 - DNA, 1083 bp, Homo sapiens
atgagctatgtcatgccactgcactccaggctgggcaacagagcaagacctcatctcttaaagaaaaaaatacaacatttccagaatctgcatttttgacaagactgtgtgatcaagtttggtaggcactggtttgaagggaagttaatcaaataggactgtatgtaagttgaattgtagatgagagaaattatggtaaggagtcagttcagattcctttatttcctatattagtaatccacttgaagtggagaccaaagggtatataaaaagagaattcttaaataaataagtgagatttaatgactaggatttagagaatggaggagagtgctatatcaatgattatgatcaagttttggcactgggcaactgaaaacttagtggaccagtgacaagaaatcaaaaccctaggtggcataaaaagccgtggtggttattctttactcccagactactagaaattattgttaacagaaaatcagcataataataacactggagaaaatcttgaaaaaggaatttagaaaaactcataatttcaaaatcctaaaataagcagcattttttgcaagttatcttattatgtgaactttttttagattgttagtagtttaaagccagtttgtacttttaatgtttcttatacttgtttcttcagaatttaattagttttaaaggaatttttctcattataaaatacataaactctcaaattctttttgttttgttttgtttttttgatgtaagttctcactctgtcacccagcctggagtgcagtggtgcgatcttggcttactgcagcctccacttcccaggctcaagcaatcctcctgcctcagcctctcgagtagctgggaccacaggtaccacgcccgactaatttttgtgttttttatagagaccaggtttctccatgttgccaggctgatctcaaactcctgaactcaagccatcctcctgcctccgcctcccaaagcactgggattacaggtgtgagccaccttgcctgggcatttttctttcttttttttgagtcaaattctttaaaaaaatacaaattataaataataactccagta

SEQ ID NO: 127913 - DNA, 1008 bp, Homo sapiens
gcctcccaaagtgctgggattacaggcgttagccactgtgctcggcctttcatctacttttatgagaggtattggtctgaagtttttctttctttctttcttctctctctcttttttttcctttttttgtgatatctttgtctggttttgatacctggctctctggaccaccggatttctttctttctttttttgatacagggtctcgctctgtcagccaggttagagtgcagtggtatgatcacagctcattgctccacctcccaggtccaagcgatcctttcactttagcctcctgagtggctgggattacagttgtgtaccaccacacctgaccgatttttaatttttttttgtttacagggtctctgcatgttgcccaggctgtttttggactactgggctcaagcaaccctcctgccttggcctcccaaagtgctgggattacaggcatgagccaccacactcctaggatttctttattgggagcttttaaactatgaattcagtttctttaattttttagattgatgcataatatcatatatttatggagtacatgtgagtattatatgcatagaatgtgtaatgatcaagtcagggcatttgaggtatctatcacctttaatatttattatttgtgttgggaacatttaaaattctttcttctagctactttgaaatacacagtactttgttgctgactatagtcaccagtactctgctattgaacattagaagttatttcttctatttgactgtatattttgtactcattaaccaacttctctttatcccctctcacccacccaccctctgcagcctctagtatctataattctatttgctacttctataagattaactcttttagtttctacatatgagtgagaacatgcagtatttgtcttgctgtgcctggcttatttcacttaatataataacctccagctcatctatgttgctgcaaatgacatgatttcattctttgaatgccaaatccattgt

SEQ ID NO: 127914 - DNA, 2955 bp, Homo sapiens
gactgatttctgttggctctctagacctagatttggattgattcataaacatttctttaaaaaaaagtgttttgttttgtttttgtcctgtgacacagcctcaggagactattcttatgtgccccaaaagaacaatttctgagttcatctgtgttgtgtatattaactctttgttcctttttattgctgagtagtattcagtggtgtgggtataccacagtttagctatttacccactgaaggacattttggttcttttcagtttctggctcaactaaaagctgttatgaacatttgtgtacatgttttcatataacataagtttttatttctctcagataaacgcccaagagcaaaattgctgggtcatctggtaagtatgcatttagttttcaaagaaactggtaaagtattttccagtatgtgagtacaattttgcattctcataagcattaaatgagtggtccagtttctttgtgttctagccagatagggtgttaccagttttttcattgtagtcattccaagagatccgtagtgatattttattgtggtgttttcttgcattccctaatggctaaagatgttcaacattttttcatatgcttattggcctttcgtaattccttttcagtgaattgtctgtttgtgtcttttgtccattttcaaattggttatctttactgttagattttttttaatctcttgagacttttctagatatctcattttcttctctttcattttatttttatttttctattaagttattggggtacaggtggtatttagttaagttctttagcggtgatttgtgagattttggtgagtgctttatacagtctggatactagttctttgtcagatatgtggtttgctagtattttctccctggttttaacttgtcttttcatcctctttgtagggttattcacagagtgaaagtttttaattttgatgaggttcagtatagcagttcttccttttgtggatcgtgcttttggtgtcaagtgtaacaactctttacctagtgccaatgcctgaagattttctctaagttttttcctaaaagttttatacttttacgttttacatttaagtgtgtgataacatttggatctagtttttgtataaagtaagtggtttaggttgataactcttcccccttcttgtcccgcttcccttcccccttcccttctccatccatggaagtcgcattgctctcgcaccatttattggaaaggctgtccttcttttattgaattgcttgtgcatcattgcgaaaaatcatttgggcatatttgtgtggacacatttctgggttttctgttctgttctattagtctatatgtctctttcttcatcagtaccacagttttaattgctgtagcggtatagttatccttaatatcgggaggcataattctacttgttttttgttttcacaaaactgctttaggtctcctaggacttttcctttccatataaattttagaatatgtttatctatatctacagaaacaaaaaaccgccagctgtggtggctcaagcctgtaatcccagcactttgggaggccgaggcaggtggatcatgaggtcaagagatcaagactatcctggccaacatggtgaaagcccgtctctataaaaatacaaaaattagctgggtgtggcggcacgcacctgtaatcccagctactcggaagactgaggcaggagaatcgcttgaatccgggaggcagaggttgcagtgagccaagatcgtgccactgcactccagcctggtgacagagcgagactccatctcaaaaaacaaacaaacaaacaaaatccttcctaagattttgctaggaattgcattatactatacatcaatttggggagtattgatatctttactatgttatattttcccgtcaatgaacatagtaagtctcttcagttatttagatctttgattttacgttagcattttgtaattttcagcatatagatcctgcatgtattttgttagatttatacctaactatttcattttctttggagcaattgtgaatagcattgtattttaaatttcagctttcatgtttattaatatatggaaatatgattgatttttgatttttgattttttttttttttttgagacagagtctcactctcttgcctaggctagagtgcagtggcacaatctcgactcactgcaacctccgcttcctgggttcaagtgatgcttgtgtctcagcctcccaagtagttggaattacaggtaacaccaccacacccagctaatttttgtatttttagtataaatggggtttcaccatgttggccaggctggtcgcaaactcctggtctcaagtgatctgcccgactcagctctcaaagtgctgggattacaggcacaaaataagactgatttttgtatgttgaccttgcatcttataaccttgctaaacttaattattttggggggatttttgggtagatttcttgggattttctagatagtcatgtcatctacaaatggggacagattttttcttctgttctagtctgtttgccttttattttcttgtgctggctggaatttccataattatgttggataagattggtgagaacagccaatcttgttttatacttgaagttaggggaaaatatactatttttcttttttaaattaaattaatttatttattttgagatgaggtcccactctgtcacccaggctagagtgcagtggcaagatctcggcccactgctaccttcgcctcccagggtcaagtgattcttctgcctcagcctcttgagtaactggtactataggcgcctgccaccacgtctggctaattttttgtatttttagtagagacggggttctaccatgttggccaggctggtttcggactcctgatctcaagtgatccgcctaccttggcctcccaaattggt

SEQ ID NO: 127915 - DNA, 1046 bp, Homo sapiens
tgacagagcaagagtccgtctcaaaaacaaacaaacaaacataaaaaccttaaagattgtattcaaatctattttgattctgatgaaagcaaggatgacagcaaaatactttaatatatgcatgctaacaaaagaacacaagttagacctgtgtcaccatatattctttgtcatgcctagcaagtattttcagctttggggaactctgaatgatagatggtgtattcatgtttgtagattgtggtttttattatatactattaaattctataatttaaacttgacatattagaggaaatattgttcttcattatttggagtaaaggattaattatacataactttttatagtcgaatgtagttttcagtttcagttttgaactctatttgtttttattacttctgctgggagtatgctgggtagtatggaaccaggcttcctacatatgaatgttggctctgccacttacttactatctgtgagacctaggttgttactttaccgtctttgggactcagcttcctcatttgtaaaatggagataccaggattgttgtgtggaataaatgggttaatgtatataaagtgcttggaatagtgtttggcacatcgtcgctttgtctaagtgtttgctgtttttatgcatttgaaggaataaaaaacattcatctttgaatttctctattaattcagtacacttgtaaaacaatgtctaagtactaaacatatattttcagtaatcacttgaccacatagaaatataaggaatgtgtttgaggggtaatcagaagattggcctgcctggaattcccttgaatcagagagtaatggaaaatgaacctgtatggatacaatagaaaatgattatcaagtgttttgaactaaggcatagaaaattagatgctgataagaggggaatcattgcaaggttgttattgttgtttttaagtcatgatagtgatgtgtttaaaatagtatttaggggaagatagttttgagtgtgcttggtagcatagaattatttcactataaggacagaggatttt

SEQ ID NO: 127916 - DNA, 1512 bp, Homo sapiens
tctccaaaaaaaaaaaaaaaaaggtttagtagaaaatagctaccagtgtttctgaatgattttaaagatattcactggagaataggagcttggaaaataaagaaatattatctttattacagtaagagaaatgaacatacttcatttgtaaaagagaaatttaggccttacctgcttcctatgtgtatattagttcagaacggttattaggagactactcacatttgaatagctataaccagtaaatattactggatgactttaataatggcctgatcagagctaaagaaaattctgatgaagtagggcattaaatatttctagctaccaactccctttaaggatgaataaaggtaggtccgcaggctgaggaagtatacagggagattgtgaaatgaaaacttatcctttcatttacttcgatatctttgttttgcacaggtaatattaaaaaacaggtctggttaaacatcagccgtatatgttttggttggaattttttttttaagttctgtgaactttgaagtttttttaaaattctttgttttggtttgtagaccctgcattaagccaactttctggatctgttgtgtatttctggatagcatactttgttttgtgaaggaaaattttacattttattttaaagctgggggaaaaaagtaggtttcttgtttctcgctttgtaaatgaggtagatgaataatactgtattgccacttattatcttcatgcttccttcaatgtctcaggtattcctctactgtatgtagcatgtggatctcaaagtttcccacagttgagtctgaaaacatctcaactgtgcttataattttaaaattaaacttaattttaccattttctttattgttattataaaatataggacctatcataatgccatgaaccttttagtgacttgggaaatagtgattaagatgatgcaacatagtacattattgggaaataatctgtttttcgttggcatcgcctctatccttagacctctttcattctagtaatatgacagaaatatttttgacattttaaaacttcctcatttagctgatcgtgtgtgctgttgaaaatgaacactagaatagaaagccattgccttctccttggggggtttgttttaacaggggttttcatgttttaattttggatttgagatttgagttgagatatccattgtgtagagaatcttgagaaggattatccatctttcttgctgtcaccagtgtatgtgggagggaagaaaatatcaaatatagggtatacaggagaaccttagtatttgggaatatcttcagtgatagctgccaaatccagtgttttccccaggaaatttgtatttaatcccttggagtatgggatgactttatgagtgtcatagtgggttgctgtgggtgaggagaggagaaaacgactccctgtttgaaaaatcttttccaaactgttcgaaaatttgagattaaattgaattaatctcaaattattaatagtttatgt

SEQ ID NO: 127917 - DNA, 1575 bp, Homo sapiens
ccgaggcgggcggatcacgagatcaggagatcgagaccatcccggctaaaacggtgaaaccccgtctctactaaaaatacaaaaaattagccgggcgtagtggcgggcgcctgtagtcccagctacttgggaggctgaggcaggagaatggcgtgaacccgggaggcggagcttgcagtgagccgagatcccgccactgcactccagcctgggcgacagagcgagactccgtctcaaaaaaaataaaaataaaaaaaaaaaaaaaaaaaaaaaaaaattagccggatgtggtggcacgtgcctgtaattccagctactcgggaggctgaggcaggagaatcatttgaacttgggagtcagaggttgcagtgatctgagattgcgccattgcactctagcctgggtgacagagtgagactttgtctccaaaaaaaaaaaaaaaaattagtagatcttatattactgcttttggaagcaattagtgaatgatgtaggcaaaatagtgattgaattttgaaaagcaattagactgaaatttcaaaggggtggagcatttcttaatagcaacaaacagatacatggtcattaatccaaatatctgaaattttctgagcatgtttttcagagtttggaatagagtggaagtgctaattttctgattatttaagaaccttttaatccattcccttagagcatcaggtgttttcagattgtgaattttctaaaataacattggctgatttgtgttattgaacattggttgtagcaacttttttccttttttcccctttattttctgcctcccatattttgcttaagatttttttctgaagttttaaagtttcatcagttatttgggtggaccgtcttgtgaatgctctaattgaagttgtataatataaacagtgttgcttttagtagttaggattaatttttcttttcatggaaatcctttctatttgattatattttttcctctaacttttattaattcttagatgagaattaggattctgcattaaatctttctgcacacatttttcttactgtcagtagggacctatgtcttccttgggtaaagaaaatgttatattttggttttgccatttaaaatgatataaagacgttattagtacttttttaaaaaggaacttttggtatttttaaacaagtacaaaagtaggtatgaaccaccatgtacctgttactcagcttcaaatagtatcaaatcttagtcattacattgtttcattcgtactagaactttttttctttttttttttgagatggtctctgttgcccaggctggagtgcagtggcatgatcctagctcattgtagccttgaactcctgggttcaagcaattctcccacctcagcctctcaggttgctctgactacaggcacaggaccatgcccagctaattttcttattttttgtggaaatgggggctcaccctgttgcccagggtagtctcaaacttctgggcttaagtgatcctcttatctcagcctcccaaagtgctgggattgcaggtgtgagccactatgctgtgatataataaaatgtctttat

SEQ ID NO: 127918 - DNA, 3908 bp, Homo sapiens
ttagcctcgccccagtcttggggtagcacatttccgcaaacaccgaggacacggaatcactagtgaaaaccgccgaccaaatgacattgaagcagcacacgcgtgcagagaaggaagcaaaacacgaagaaaggcatcagtccagcagccacgtgaggtgggcgatcccctccgccctctgagagaggacttcaactcccggcgtgcccctgggaggttaccctccgaggacttcaactcccagggtgctgcgggagcggccaccgcaacctcccactcagccgcccgccgctcctcccgcccctcccccgcccctcctggccggatcagcgtgcgcctgcgcacgggaggccggaggagtcttaccctaatgtaagatggtggcccgtctggctgtggaacccaccgaaagctgagagtctctctctcagccgtaaaggtcggactcgctgaagcaatcaggcccggttctgaagagttttttccccgacgctcgttcggtggtttcttgtgaggacgcggcagcccgtggagtcggctgagggaaaagcgaggcaaggcaggcgggtgagtctatgcggggctgggcttaggggaaacccggggctgaccggctacgagagagcggaggcttcgctgggactgtacaggccgcacccccctttctccccaccccccgcctcatcttcaccctcctcctccttggtcttcttcctcctcctcctcttcctccctctcccctttacgccacagcagttaccataaggaaaagggagcgggtcagaaggcagcgcggcggcaagcagcgactctccttcgagaatttctttaattggggagccgaggcggcttttggtctccagcttttccccctgcattttcaccggggcaggattcttaggtctcagccctccttgtttccccaatcccctgttccctgtctgacgtcctttccctctggcccccgtctcccaagaccaaagccatcacttccactctgatccgtgttggctgctgctgctcattaatcccactgctcattgcccactcgtcctgctgcttgtttttttgctccactgctaccactctggagttagcctttgcccccctctggtgcttgcaatcagcccacagtgtatctgccacactagagctgcttccgatttgcagtctttccttccaccacatctgtcatcttaaagctgccccttaagtatctagattatgctcctcctgctaacccacctgtttctcagccttcttgagaattgtccgttccttccctctttcctgtacagatcctttcaatatacacttccagaaaaagggaagccccgtggtggcccttgaaaagtaaaaggaagttgggaagtgaatgaagtgaggtaggatactattaaacgttatgagtgaagatcttttattcaggctactccggagaggaccgttttcgttttgctttctgtgatctatttgtcgcttattcgctctgttgtgttaggacttggctttttttcttttttttcgttttggaccggttttatcatgctactaagcgttctttggattgcctctccccaggacacttagtgtgggccctgatttataccaataaatattaaccccagcattacaaaataagataaatctggcgcacatacagaattcatctgtgaactccgctagcaaatataagtgatattttgattacatgtgggttatgtgtgggttctgtattgaggcttgatttttgactgagttttattgatgttcagcttaattgatgacattttatttatgatttgagtggaaatttcctctccagttaatatcagattttcttcttatttttggatttgggaagttctcttgacatttctaggatgatagttatcagaataaattgtcttgtcttgaaaatccattagttatgtatgcaaaagaaaaatcgacatttttatataaacctaagttcctcgtatttttctcatagaaaagaagggggctgggaaaagaatgacaaagctgtgcacatacatgcatttggtggaactcactgtcattgttatctacagtaaaaagcagaaaactggaagcaagaggtggcttatgatgtccatgttttggtgaaagcaaaattaagatgtactgactaatggtaaaatgggaagaagcagccctggctataatcagaccactgtgagataaagaattaccagaaaagcaaccaagattacatagttcaaatacatacatcccaagtttaaacatgacttacatgacattgtattcttaagatatatgtaaaaatgtttaaaatcagtgacagtctcatgtggcagtccattactgggttattgtaatttttacaaattttacctgtaaaatttggaatcttaacatttggcattatgttcacttgattgtgataaatggtctgttttaccaaatgtaaactaaggttagaaaagctgtttataaaacttttttctttcagccacttaagccccaatttgggggaccaaataaatacctactcttagaactgcaagcaatttatatagcaaactttgtgctaagttacaagttgagttttgggttttttttaatcacttacatttagtttatcagtaggagtgtatttaatagttgatctttaactctaaaaaatatactttttgttgtaatacactggtggagaagctttccacttttaaaaatcctaacacaggtttagaaactcttggcagtcatacttggctgaattgtaagcagtgagttctaggagaggattgtttgtctggtagaagggagtaagtgattttaatacatctttttttttaaaaaaaggtatttgtctcacgaaatattttctcaagtaattctttcccctccataatttttgcccgcagttactgaattcttcatttcagccctctgaagtcaaaaggaatttacttttgtatctttagtacgtttaaagaagatatctaaagttctttaacattttgataggaaatagggagctgagatttctaaatagttttgcttggttttagttttttgatctaacgttatgaacactgaagcttcatattttcatggtttcttttgataatttggaatactttctgccaggttgagtagttgaattcttgagatcaatagattatttctgtaagaaggttttgaacatgaatcgcttaaagttggcctattataaaattaggatgagacagttataatcaaatgacaaagtgcagaaaaataaaattgtttttgtaatgcccttcaacttgagtctaaatgggagtactagcgataacttgcaactcatttgttaaagaaagggtgttgccagtggatgaactcctagctttaggggagtcttattttaaaaatgattttgtgtgctttaaaggaatgaaaaaatatcttatcagtttaagcagtttggatttagaaatcttcccttttttcacctccctaatcttggctttaaaaggaatccatattcttcagtttaataaatttatctttttgttgttttgtatgagaaaaatattaaattttcttttctttctttttcttttcttttctttttttttttgagacagtctcgctctgtcactcaggctggagtgcagtggtgcgatcttggctcactgcaacctctgcctcccaggttcaagcgattctcctgcctcagtctcttgagtagctgggattacaggcgtgtgccaccatgcccggctaagttttgtatttttagtggagacggggtttcaccatgttggtcaggctggtcttgaactcctgacctcgtgatccgcccaccttggcctcccaaagggttgggattacagacgtgagccaccatgccaggcctaaaattaaattttctaatg

SEQ ID NO: 127919 - DNA, 1021 bp, Homo sapiens
accctgcggatgtggttaggccctggatgttcttgtacctttggagctgtagattttcggggtggaattgaatctagaaggtagtaaaggaactctggaagatttggggtggatcctctttcggtgattctcaattcgggccgtaccgccctccagtggtgtttgaatgagtgagtgcattttgattgtcatatttcctggggtacactgctgtcgcatagtaggcggggcaaggatgcagaaagtccttcatggtcagagcagtccggaaaaataatttggtgcctagaatgttaatgcctcgattgagatgctctgaagttcgcgggcaagattaagagtatatctgtgtggtaaatgcttgtgagaatctcacttaaaaggactcttttttaaagtattggttctattttccacaggactgatattcttgaaaagttgtctaaatctgttttgtaaatcaaatcatttcagaaaagctatgataaattataatgaaggctatgtttactgaacacatactatatcccagcattgcacttattatcgtgcttatctcattcagttcccgtttatacacctttggagtagttactgttacatactccgttttacagatttggaaatagaggcttcaaatagttacgtaatgtccccagagttaaacatctaatgatctaagtcagtcttaggtgcttaaactacttagtgctactgcttaagcacaacctaattcattttatgatattagacgtatatattagaaggttagtaatgaagttacatgcttaatattgcggtccttccttcccaattagatatgcttaacgtgtggttgtatataatacatttctctattttattttattttttaatttttctttttgagatggagtcttgctctgtctcccaggcgggagtgcagtgatgcgatccgcgatcctggctcgctgcaacctctgcctcccaggttgaagcaattctcctgcctcagcctcctgagtagctgggattacaggca

SEQ ID NO: 127920 - DNA, 1005 bp, Homo sapiens
cactgtgcctggcctatatacattcctttagtacatactcgccctaagctattataattattaaacaaatcattggagggaaaaggagttgccaacagcagcaaagagtgtacattgtataataaagccttgtgtcaggagtgtttaattggcaacataggaaacatttttaaaagccaagagtcaggagctggttttttaaaaaactaaacgtcttagggaaggaactctttttccatcaaggaatgaatgttgggttgagtgggtaaaggaaatgtgtcatatacatgcaatatgcataatacatatacatgcatatacataacataacgtatacatgcatatatatagtatccttatgcagccttaaaaaggaaggaaatcctgtcacataaaacaacgtggatgaaacttgaggacatactaagtgaaataagccagtcacaagacacaaatactacatgattccacttatatgaggtatctgaagtagtcatactcatagaaacagaaagtagaatggtggttgccaggggctgggaaaggggaaagtggggagttgtttagggggcatagagtttctgttttgcaagatgaaaaaagctgtgaagatctgttgcacaatgtgaatacactgaacactgctgaactgtacacttaaaatttgttgagattgcattctatgttatgtgcttcctttaaattacagttttaaaaaatcaaacatcttggagttgtaaggaaaaaatacagagattgtagagttctaagacctatggttggccaggtgtggtggcttatgcctgtaatcccagcactttgggaggctgaagtgggcagatcacctgaagtcaggagttcgagaccagcctggccaacatggtgaaaccctgtctctacaaaaatacaaaaattagcctggcatgatggcaggtgtctgtaatcccagctactcgggaggctgaggcaggagaattgcttgaacccaggaggaggaggttgcag

SEQ ID NO: 127921 - DNA, 1375 bp, Homo sapiens
ttatttttatttatttttttattttttgagatggagtcttactctgtagcccaggctggagtgcagtggcgtgatctcggctcactgcagcctccgcctcctgggttcaagcgattctcctgcctcagcctccctagcagctgggactacaggcgcatgccatcacgcctggctaattttttgtatttttggtagagacggggtttcgctgtgttggccaggacggtcttgatctcctgacctcgtgatgtggcccgccttggcctctcaaagtggtgggattacaggcgtgagccactgtgcccggccagattttacatttatgtatgattatgattaatgtttttcctcactgcagtataatcttaccaatacctcacacatggtgaatgagtgagtaaatgtgatttgctggaggtatccctaaacattaaggaaaataaatgtatttctcaactgactaaactacatggtaaaaatacatatttagtaattttgaaaaatttatagtgtcccttcatttgtaatcagtaaaaaagatatttactgtaatcctagcactttaggaggctgaggagggaggatcacttgaggccaggagttcaaggcaagcctgggcaacatagcaacatcccagttctacaaaaaatacaaaaattagccaggtctggtggtgcgcgtgcgcctgtaatcctagctactagagaagctgaggcaggaggttgcttgagcccaggagtttgaggctgtaatgagctgtgattgcctcactgcactccagcctgggtgacagcaagaccctgtcacaaaaaacaaacaaaaaaaaggtgtttactgaaattggtcaaactcaagacagattgaagataactctttgttgcggctacctttggtgttttttttttctttttcttctttgagacgaggtttcactctgttgcccacgctggagtgcagtggctcagtcatggcatactacagcctctaccctctgagactcaggtgatcctcccacttcagcctcatgagtagctgagactataggcacaagccaccatgcccagctatttttttttttttttttttgagacggagtcttgccctgtcacccaggctggagtgcaatggcatgatctcaggtgactgcaacctctgcctcctgggttcaagcaattctcctgccccggcctcccaagtaactgggattacaggtgttagccaccatgcccagctaatttttttgtgtgtgtttagtagagacagggtttcaccatgttggccatgctggtcttgaactcctgaccttgtgatctgcccacctcggcctcccaaagtgctggattacaggcatgagtcaccacgcccggcctgtttt

SEQ ID NO: 127922 - DNA, 1036 bp, Homo sapiens
tttttttctttttttttctttttttttgctttctttagtagaaagaaccccagcctgggaaccagttgagctgatttccagtcttggctgtaccactagagagttttatgaccacagacaagttacctgacttagctggatgtcggtttttctgtctgcaatagaggagctagattcaatgaccaatgtgtaacctttaagttccgaaactttagatgtatgatctatcagctaattctgtactgtacgtcatatgttaaatatttgcaccaaattatcttttaggaaataagactacattttatataacattaataaactgttacttgctctgctaagtaattaaacagttcatatatccatttgttatgtaccatttgaagaccttattatttttatttattatgtaattgaaaagttctgtagaaacttgaaaaatagtatgctattttgtatattttctccaaatttttcagatcagagtttagcagtcacagttattgagaaggtagtattggaataaaaagtttaaggttatgcaaaatattacttcataaaagtctgttctaaattagctgataagaaatacttctgtttgtcatgttaccaggctgaattatcatgaataagcttctgtaggtaacactttgggaccttgtctccagtgtgctattttcataacaattacaattttatcattgtagccaaaaaatgttcaacagcatgagaaggttcagaaagccagtacagagggagtcgccattcagggtcaacagggaactcgacttcttcctgaacagctcattaaagaagcctttattctcagtgacctttttgatattggagaattggcagctgttgagcttcttcttgctggtaggttgacatttaactgaaacagtggtaaaataatgcaaaattataaaatcactcatagtttaaaatagtttattgtttagattctatcatagtttctaaggctgcagtttggtaaaaccatattcaaaatatttccttttttaatctttgttgtttt

SEQ ID NO: 127923 - DNA, 2705 bp, Homo sapiens
agtggcccaaattatttttggattacaaagtgctgggattacagattacagtcttgagctcaggagttttagatcagcctgggcaacatgatgaaatcccatctctacaaaaaatagaataattaactgggcatgatggcatgcacctgcagtcccagctacctgggaggctgaggtgggagaaagacctgagcctgggacgtcaaggctgcagtgagccatgatcacgccactgcactccagcctgggtgacagagcaaggccctgtctcaaaaaaagagcgtttgctatacctattattatgaagaagcataaacaatattgtttaacgtagtttattgatttcttttcattacagtccagagctggcttccatgacaacacgctttacagatgagctgatggagcaaggattgacttataaagttcttacgctggtgtcacagattgatgtgaataatgagtttgagaaactacagcgagagagaggtttgggcagtgaaaaacatcgcaaagaggcaagggttcaatgaaatcaattcatgagttgtctgtcaaatctcagaggcagaaacatgacaattagaatgttcattttttcaagatgaattatgtagctgataccatgcctgattgccacttttctttttttttgcttttattatttttcattgacacaaaactgtacatatgtatagggtacagtgtggtattttgatacatatgtatgatatgtaataaatcataattagcatatccatcacctcaaacgtttattatttctttgtgttgggaacattcaaaattcactgtactactgtttgacagtacagtatacaataaattgttaattgtagtcagctcgtaatgtatattaaagtttgtagtcagctgtgtccataaaattgacttgcagttgtttcagcttcggtatagtcatttatgtgccattctagctctttttatgaaatgaacaagaaattggtcatcccaatttcttaaggaacttaaggataaggaataaacaatagggtttgttcagaattccagaggtgacgtcttaggatcacttgtggattttgataggtttttttattagcctttgtaaaaggtagtttgtactttggaataagaccaggcttcactgtaatttatttatactgatagtcatgtttttatttctaggtttctgatctcattaaggagtgcaggcagtctcttgcagaaagcctttttgcctgggcttgccagtcacctttaggcaaagaagacactctcctcctcattggacatttggaaagagtgacagttgaggctaatggctcactggatgcagtgaatctggctcttcttatggcgcttctatactgttttgatatcagttttatagagcaaagcacagaggaacgagatggtattgagttttatacattttcctacattaaaaaaatcagatttaaaattgtggggataacatttaaaaagggtgatattttagctactaaaatagtctgctctgttcctgtgtttgcagtccgttcatatttgaatatttatatataagatcacatttaaaaaacagctgcagtcctgttaattatttctgttttttggggggatttggaatggaaagtattaaagcatatattatacatgttcatgattgcacatgcctaatttacttaattgcttgtttctttaccattcatttacattttcaaactttttattaaaacattctgagacagtgactgtcatttcagtaatgtaatctttgatctgtgttttctgtgaagtaaataaaatttttgtgatctttagatagcatgatttctattttagaatttatgtgcagaaaaaatgagtgtctaacttttttcttgtttatttgtagtacacttataaaaatgactgaaaatagtgaaattgaaatttaggattattgtcattttctttttttgtttttagtatgtgtacaatcaacagtagtgtaccttttgggatgtagaaattaatgttaattggtcattattcttctgtgagaatgctcagattttctgacttttggatattattcctgtgtatcagaagtgagaatttatctggtgatcggtaaagtggtctatttttgtgttttcagatatgattcatcaacttccactgttgacagaaaaacagtacattgcaacaattcactctcgtcttcaggactcacagctttggaaactgcctgggctccaagccactgttagacttgcctgggcgctggcattgaggggaatatcccagctacctgatgtgacaggtgaattgattgtaggtaattttgttatgagaaacagcatgttagcacttaatgacatttttggaaggagtattatctttgacatacataagcataagcataggaagatatccagagttgtattaaatgaaacctttagtgtagtagtgaaatacagacttttttctccttgtctctcaaaaatatcatatgaaatactatttcccattcttggagccactgacaatgctcttttaccttcagggtatgagtttaaaatttggaatgacagtgtcacattaattttttttttttttgagatggagttttgctcttgttgcccaggctggagtgcaatggcacagtctcggctcactgcaacctctgccccccgggttcaagcgattctcctgcctcagcc

SEQ ID NO: 127924 - DNA, 2059 bp, Homo sapiens
ttcaaatgtacagtttttaaaagcaccctgaaaggtctacacttgtaatatattgtgcagttttggtaccatacctcctgaaaagtataaattgattatcataaatttgcccttaggattcttgtattatttttatttttataggatctatagtgatttttctctttaattcctaaaattggtaatttgtgtcttctcccccagttcttagttaaccttgcttgaagtttattgatcttattgatctttccagtgaattagcttttagcttcattgattttcttatattttgcttcaccattgttgatttttgctattatgtttattattttcttccctctgccttgggtttaatttgctcccttaattttgttttttaagatataagcttagattattgattttaaatatttcttttttctaatatgagcatttaataatgctatacatttacctccaatcactgctttagctatgccacacaaattttgatatgttgcattttcttttttgttcagtttaatatgttttctaattttccttgagacttctttgattgatgggttatttagcagtgtgttgtttaatttccaggtagttcacagactttcagatctctgtcacaggtttctagtttaattccgttgtgctcagagaacacgccttgtagaatttcagttgtattaaatttgttgaggtttgttttatggctcagaatatggcctatcttggtaaatattttatgtacacctgaaaggaacacatattttgctgctgttctgtggaatgttctacaagtgtcaattaagtcaagttggttgatgctgtttttcaagttttccatatccttactgattttctgtgtacttgttccattgaatattgagagaggagtgttgatatttccaactgtaattgtggatttgtctagctatgttttttttttttttaacagaatttgtttcttatttttgttggcatttagttcacacaaatgttgtgaagcagtgattctcaactgaggtataatgttcttcagagtgtgtttgggaaatgagtggggccagttttgcttgttatgatgactctggtgttgttattgatagttggtaggtagttccaaggatgctaaatgtcctggaatattcaggataatccaacccagtgaagaaacattgtgcccaaatgtcagtaatgtccccactgagaaatactacagttaagttcaacttttctatagtggaaaatgcattcaagttttaagatattatacattatgggtagtaatattgcaaataagattcctggcatgtttcttcatgtcacctaaagtggaatagatatttaaaaaatatattcttgtatgtagtcactttaagacagttgcctgatttcattattattagcatgtacaatacatttacatattaaaactatatctaataaatttaataggtgaaacagctgaggaatcgggcagatgaagatgctcgaatgattcacatgagtatgcagatgggtaatgaaccccccatttcacttagaagggacctggaacacttaatgcttttggtaagccattatattagaaagcttgtcctctttccctcctttcattattttttcccctaactttggaaaatttcaggtgtaatactttaaatgtccttttttttattgaaagtaatttttcagtcatagacatttccctacagtctttgcttactctttgcagattggcgagctatataaaaagaacccttttcatctggagcttgctctagaatattggtgtcccacagagcctcttcagactccgactatcatgggctcttatctaggggtggctcatcagcggccccctcaacgccaggtgagtctttaggttttcctcttttatactctggtactgtgatagagagtcttgaaaacatgaaagatattacttcctgattttattgctgttaacacaaatgatcactagtgtaacctttagagacttacactttttaaattttatttatttatttatttatgttgagacaaagtctcactctgt

SEQ ID NO: 127925 - DNA, 1034 bp, Homo sapiens
cctcagcctcccaaagtgctgggattgtaggcatgagccactgtacctggcccagatgccactttttaaactgtattgtttcagtgtttttctcatttaaaaaatacgttttgagccaggcacggtgcttcacacctgtaatacttgcactttgggaggccaaggtaggcagattacttgtgctcaggagttttagactagtctgagcaacatggtgaaccctgtctctacaaaaaatattttaaaaattagccagacatggtggtgcgtacctatggccccatttgcacgggaggctgaggtgggaggatcatttgggctgcagtgagctgtgattgtgctactacattccagcctgggtgacagagtaagaccctgtctcaaaagaaaaagaatgttttggagaaagatttccttaaaaatttttaaagtttttaagaaagctagcagtaatgaaaaatttgaaacatgtggaagagggaattattataaggaatgccccacattttaatttcacatcttaagttaacatcttatgatgtttgcttcatctactatattattattttatttatttatttatttatttattttgagacagagtcccactttgtcacccaagttggagtgcaatggcctgatctcggctcactgcaacctccgcctcctgggtttaagtgattctaccgcctcagcctcccaaggagctgggattacaggcacccgccatcatgcccagctaacttttgtattgttttagttgagacgggttttcaccatgttggtcaggctggtctcgaactcctgacctcaggtgatccacccaccttggcctcccaaagtgctgcgattacaggcgtgagccactgtgcccagcctgctatattatttttactttcgttttattttaaagtaaattataggcaaatacatgaattctatcccttaatatttaagtaagtatatctctcttaaaaatgttattttgctacatcatcataaaacctttttttttttttggagacggagtctct

SEQ ID NO: 127926 - DNA, 1043 bp, Homo sapiens
ggggtttcaccatgttggccaggatagtcttgatctcttgacctcgtgatctgcccgccttggcctcccaaagtgctgggattacaggtgtgaaccactgcgcccagccaaaccatttttaaacctagctgatttaatagttatttccagacatctgtagtgttttcagttctcagttccaactagtgagtttgagtaatactgttagttgttgataataggtttaaggcataaggaagaaaaagggaaaattaagaaatagacttaaagaacaggagtatgggaacgtggcattggtttgaccacagaacagaatatgcttaagttaccatcaaaaatgatttaaatttcctaggtctagatactaatttggctgggatataggaactctggattttaagtgtacttttgaattgctggttgatttttggatgagtaaatgtcacatgtcttatatttttaaaatctgagtggtcttatattttgtgacattgagatatttttttaaaaatgtacttttatttcataaaggtattttataattgcattaaattgctaatgacaagcttaaacaatttttcataaatagaatatcagttaaatttgtctgttgcgagggttaagtcagagcactacttttagtttatatgtagtctttattagctagtccgtgttgccttaaagttaagatatacattatataaaccatttgtttctctctttttcaggttgtcttgtcaaagtttgttaggcaaatgggtgacctgttgcctccaactatttatattccttatttgaagatgctccagggattggccaatgggcctcagtgtgcccactactgtttcagcctgctcaaagtcaatggtagtagtcatggtaaggaatatgtggatgttgttaaagtttgttgttatactcttttaagttcagtatcccactacctattaagaacattggtgtttgaactaggttctaccagaggtataaattattttcataacaatagggtgaaggaagcatgcatacagctttatgcatag

SEQ ID NO: 127927 - DNA, 4137 bp, Homo sapiens
agcactattaatatgttaatgtctgcataatactcttcacttcatagctaatagtttttattaccaagttttctttctttttctttggaaggttgaactaaatgaaatagaatcccggtgtgaagaatacccattgactcgggccttttgccagcttattagtactctggtggagagctcatttccttctaatttgggtgctggactgcggccccctggctttgacccttatttgcagttccttagagactctgtgtttctacgattccgtacaagagcttaccggagagcagctgaaaaggttatgttcagagaaaagcttttttctccttatgcatttactgctttttcttttatcaaaagtatatggtgctaaattcatgttagcttttgaaaggtagtaaaattcacagtctttgttttgaaatatctatgaagtggtctgattagtttatgtgcactaaaaaataagtttggtcattaaaacccaagcactgacattagtcatcagtaatctaattgataggagttcatatttcatatccttagtttaacaagttttgactaaaatggaacaaaaagtgtcacatttgttggaaacacactactactgcttattggaatggtttaggttagggattgaaataagtttaaacttgcacagcagtttctattgattagtggcactgggttgtggagtactggtttagcgggaaggagtattgtaatccattaggcatgtctgccatggatggaggctgagagagcactgatctttatgacacatttgctctggttgcaagacactaaccactgagcttatatatatcattttatataattccaatattaccacgtggcaggtactatttaatattcccattttacagatggaggcttagcaaggttaaggaacttgcctaaggtccaggaccaggatttgaacctaggactctgattccagatccaagctcatagccactaagctatgtaagagactcttccaggttctgatgtaattcacgttagtctataatactgtttattaaccttacagaatacccttggttgtatcttgtaggaatgtttctgctttattttggtagttggcgcagatcaagactccatctgaaaaaaacaagtgtatatatatatgaagaaattatatcatccttaattttgttgccaaaggaaggataactacttttagtctttttcctatgcctgtagacttaattaacaattgagataattagttatattactttgtatttcttttttgtcacttagcatcatggggatttttttcatgtcctaagatattctttgaaaatagtctttttagtgactgcataaaatctgttacttgtatctagcatagtttattcactgccctgtcattggatatagcttgttttttatatttagtcacaaataattgaagttctttttttttgtcaattgcattagaatttttgcttgccaggttgtaaaaataaacactgaggtggggtatacactttacttaggctctagaacttaacatgtatttcctgatgggaagaaaacaataacagcaaccatgcctcattaataaagtcatttcagatgaataatgagtgctgataattacagcactcatttcatcaaaatgttctgatacttttttacagttgttttaaatgtcttatatgctttttcttaaaaaggtcattgtgatctgagtgtttagagcattagttagccatattctctccagatgctatcacttttcacccatgcagagccacacttcaagtgttgctgcttttccctggctgccattgatttcagttccaccccaacttactctaaaaaactttccctcaattttgtgaatttattttacttgaaagtgttcttgagatctaatttatatgactattttaggacactagctgctcacacaaacagtgctttggattgagataaataacagcgtgttagaggcaattggtatgtttaccagtcctaaatccattattatgtggtaatatgccttttttatttaaataaaattttttgaaaattttggaaaatgcaaaacagtgaataatataaaaataatttaaaagtcactttatagtcccattttctaactcaaccttgatacaattatgtgcagtggaaataataattttaaaatagtaattcataaaaccaccctgtctgcaatgaccaaacccagtcttattaaaattctatgtagtggattttttaaacaaagttttaattttactggctatgcagttgtatataatttttttggcataagtatttttctttactggtacatagcttttaaatacattttgaataagaaggcgataatgggaatatttggggcaagcctaccagtgattgtgtcttcttaaccttctttgactatagtcacggatggaaccctggtctgagaatgagaaggcctgggcttgactttcagcctgtttgctgccaggctttatgatcttggggaattcattcactgctctgagcttcacttgcttcacttataaggaatttagatgagatgatttctcagattctttgcaggcaggcttgttagagaaaatgtgaaatgtttggcacttgaaaagtgtccaaatttgatgtttaattataaattgaatatgactagatactaaatgttttcaatgtattaatgaattccaaacatctataaaaatgtatctttaagaataatgcattgaaaatattttaccttgaaaatgagccaattcattatcttttagcaaaataaagcaaaatgaattgggatttctatattgcttagcgtaagtgaataaagtggacaagaaacttcactcattttctggaaaaagaagtgggaagagtgaaaagccttgcaaggccaccaccttggtctgttttattgttattgacctatttatatctttctatagtgggaagttgctgaggtggttttggaggtgttttataaattgctcagagattatgagcctcagcttgaagattttgtagaccagtttgtggaactacaaggtaatttaattctgtcactttcaaacaagttgtcaactatttataatttataaattatggctatgttatatataaattaaaaattatacttttaaattagaatttaatcttttgtttcattgttttaatcattttaatttttctgttcaagagaaaaaattattgaatggaagatcaagaacactgcattacaatttctctaatgagttaatagaatagctgactaactgctttgtgcagatttgcccttaggagaattactgctgtgtctctaaattgaaacttgcctttatctatctagatgccatctaatttacaagtctcatacatttcatataaatcaagggtgtgacaaaaatactaacccatcatctcttggaatatgttatgttctatttaggagaagaaatcatagcctataagccacctggatttagtctgatgtatcatctgctgaatgagtcaccaatgttggagcttgctctcagtttactggaagaaggagttaagcagcttgacacctatgccccctttcctggtatatgcttaaaagccttcatgtcttgcaaacagctttgatgttttcatcttttgtaaactgagaatttgaaatagatgatctctgaagtcatttttcactgtaagattctctctctgtatctgaagtggtgttttcagtgaatcatttaaatgagagtattgtaagtaaaaacagactaaagtacagagagaatctcactgtcactgtgtttcactgcagggtcttttgtaggtaaagtgatctttctatcattttaacatctttaacatccctaactttaaagtacttttttgtccatcccccacctcataatatttttaaaaggacttactatagtgcttgatacatagtggtcaataaattttacttgttattattaccactaattattatttattgaatgcttactatgtatttggctcttttaaaagcacattgcatatattaatgcattcaatctattcaaaaatgtgttagatcttcttatttccatttaacaaataaagaagctgaaatacaacgaagttatactg

SEQ ID NO: 127928 - DNA, 1020 bp, Homo sapiens
ctagaagtgtctccagacattgtcaaatgtgccctggggctcagccaccccattctgagaactgttgctctaaacaataagggaaaagataaagaagtgatttgagaatccattccatgggagttttctggattgcaaaataacgatgacttgcatagatgaatggttttgtgaagttggagctgaaattttgaaacaatgagagcataaatctctaggttttgctgctgaaagttggaaacaagagtctgaatctctagatctgaaaatctaaaacttgtcatttgtcttgttttcctaagaattgactgtgagtttttaagataaatttagaactttctaactttatttttggttgatagggaaaaaacacctggagaaagcagtacagcattgccttgcacttctcaatcttactctgcaaaaggaaaatctttttatggaccttctaagagagagtcaactggctctaatagtctgtcctttagaacagcttttgcagggaattaatcccagaactaagaaggcagataatgtggtaaacattgccaggtaagttacctttgtaggtagagaaatgaagtaaacagatagacattctagctttgattttcaaatctggttaggtatctagtgcatcacctttttttttatttttgcctcattttactttttttttttttttttttttgagatggagtctcgctctgtcgtccaggctagagtgcagtggtatgatctcagctcactgcaagctctgcctcctggattcaagcgattctcctgcctcagcctcctgagtagctgggattacaggtgagtgccaccatgctcagctatttttgtgtttttggtagagacggggtttcaccatgttggtgaggctggtcttgaactcctgacctcatgatctgcccgcctcagcctcccaaagtgctgggattataggcgtgaaccaccgcgcccagccttattttactgttgccttctttagctaccctgattttaattactctgaac

SEQ ID NO: 127929 - DNA, 1051 bp, Homo sapiens
atgtgctgatttttgggttgattttggtataaattgttattactgatttaacatcctcctagattattaaaggcaaaatcagctcagaaatagaaaatgggtgataagtaatacatttctaaagagagaagatgaaaattttattttatgttttagttaagatctcgtaacattgactatataatgaagaggtcagtaaacagcaatttcgtgattttttttttttttttaactagcttgatgctttgggaaggaaaattaggaagcaagttttgaaatcaatgaatttataaaacttttgtttctttaattatgtgtatagagagctaacttacggcaacttaaggaactgagttttctattaaaaatgtaactaaaacgtaaatacctaagcaggtttgcctatttttccttatggatgaatatttacatatatcaatcatagtttttctaatatttagaaacctgtaataatttgtcattttttaccttcatgttacttcagagtataagtcagaaactaatggctggatttgtggagtgtttggattgtgaagatgcagaagaatttgtacgtctggaagagggtatgccttagattaatgtgcatacacgcattcttttactttttatatatgcttaatttaaagaaaacacttgtaattgttaactgttttagtgatggtgtaagaggaattgagaatttgctagaatacaggttgagaatgcaaaatccaaaataaaatctgaaaccttttgaccaccaccaacatgactctcaaaggaaatgctcattggttcattttggattttggatttttggatttttggattatacatcaacctgtataatgcaaatattctaaaattcaaaaaaatctgaaatctgaagcacttctagtcccacacatttcagataaagagtactcaacttgtaaatttataaggtttttaggattccactttaaataaatctgaaatgaatgtgatagataatcaggcaaacgatctaaagaaaacatggagttggaatacaagttttgtatttttt

SEQ ID NO: 127930 - DNA, 1745 bp, Homo sapiens
aaatgttaaaccacatcattaattgaggtattataaaatcatgcaatttaagtttaatttttcttatgtatttgttttgtgaaatcaaaaccaaactatgatagttttttgagttatgtatttgaaaattactttaaaatattgttttatatatcagtgtcaaaatacgatagattcaggatctttgtgaaattaaaatcagtaatgaaaacttgattctcttttactcttcatttactttagcccatctttcgtaaatttatactagcttatttttttctttcttggtatcttttttttcctcttgtaattttacagagtgagaaattattatgttgctgagtttcataaattattgactttgttacatgggaaaatatctgttgagttacagaatttaagtctgttttgatactgtgttattactctgggaaacaaaatttacatgtttaaattctagaatatgaaatatctatgctgaaccagatgtcatggcttatgaaaactgcctcaatagagctaagggtaacctctctgaatcgtcagcggtcacatacccagaggctcctacacctcttactggatgacatgccagtgaaaccatactcaggtgagtattagtatttgttttattgtgctggtgactagttgtcgtgaagacaagcacaaatctgaagcttgtgcttagtatgtgactatagaccaaaactatcttctcacttttagaatttttttttcttaaaacacaaaaattttaactcatcttatgattgtcatttattattattttaagcatccatattacactataatcataccggtattatatacaaaattgtcagtggagtttgtcatactgagccagcatgacctaagctatttcagtatgtattattcatgcaaattaagcataaacttttaaaatcatctcattggcatgattgggtcttgccatttttgagaatctgattattctctttacaattgtgcagtggattccatagggacagaaataattagattaatgttggtagtaaatcctcatcaatctttacattttaattatccatttgcacagggctctttgatgtagaaacaatgacctagaaataagataccttgtgtttgttatttccaaataaatagttttaagagtatgttcttctttttctgattcaatattattgatattccaacagatggtgaaggaggaatagaagatgaaaacaggtctgtttctgggttccttcactttgacactgctacaaaaggtaatgccctttgaatttgtaataaatttattttatagacatatattaaaaaaaaaaaaacttcaagggattattatgcctgtgcctccaaactctgaactggtatagaaaagttatataaaggattaattgccacctgaaaattttttttataataggattatacaaaaggaaagaaaatatttttgttaatggatgtatcagaaataaaatcaaatttagattccaatacagttttcagtttcttgactattttatgctctttctgaaaatagcactgtctttgaaaatcaactgaatatgatggcttgcctttcttttcaatgtcccaagtaaaatcaaattactttttattatttctagtacgtcgaaaaattctaaatattcttgactcgattgacttcagtcaggagatccctgagcctttgcagttggatttttttgatcgggcccagattgaacaagttattgcta

SEQ ID NO: 127931 - DNA, 1329 bp, Homo sapiens
taatgattatagctgaaagcaggattctcactctaatttgcccttgtcctttaagatactggatgatgaagctgcgcaagagttaatgcctgtggtcgccggggcagtgttcacactgactgctcacctaagccaggccgtcctcactgaacagaaggaaacatcagtcttgggaccagcagaggcccattacgcttttatgcttgatagttgcttcacctcacctcctcctgaagagaacccattagtgggttttgcttctattggagattcttcactttacatcatattgaagaaactgttagacttcattttgaagacaggtttttttcatttaaattgtctataaattctatcttttgtatttgttttaactttaattgagaaaagattttcatttgacatcttcctaatctccctaggtggtggattccaacgagtgaggactcacttgtatggctctctgctttattacttacagattgcccagagacctgatgaaccagacaccttagaagcaggtagaatgagatcaattcctaatcttttctggattgggagatggttactttaaattgaaaaaaaaaatcacttctccatcttttgactaatcacaactgtaaaaaatgagtgttagtgtcatttttaaagcatttactcaaaagttgaggaagaatgtttagtttttaagaattatgaagtagtacatgagtactacttttaagataaccttcaaataatactttagctttatatacttctgtaactccctcacttgcctcaagtccgactgaacagtgtgctctacatagaatggtccaatgtctttctttcctttgtgctacatcagagtacttatctagttgattcttttaaaatatctcggcctggcatggtggctcacgcctgtaatcctagcactttgggaggccgaggcctgtggatcacctgaggtcaggagttcgagaccagcttggccaatatggtgaaaccccatctctactaaaaatcagaaaattagcagccatggtggcaggcatctgtaatcccagctactcaggaggctgaagcaggagaatcgcttgaacccaggaggcagaggtttcccagattgcgccactgccctccagcctgggcaacaagagtgaaactctgtctcaaaaagaaacacaaaagtctttgttattccatgatatggatgaaacacttatctgccattttccttattcacaggcatttcaattgtttctaaatttttattacaaaaatgctacatcaactttttttatatgcctatatttctcaaaaaggatactgcttaatggtgga

SEQ ID NO: 127932 - DNA, 1246 bp, Homo sapiens
tcccaaagtgctaggattacaggtgtgagccaccacgcctggcaattttaaaagatctcaataaaagataaaagattgattagcggctgggcacggtggctcacacctgtaatcccagcactttgggaggccaaggcaggcagatcacgaggtcaggagatcaagaccatcctggccaacatgatgaaaccccatctgtactaaaaatacaaaaattagctgggcatggtggcatgcacctgtagtcccagctactggggaggctgaggcaggagaatcgcttgaacctgggaggtggaggctgcagtgagccaagatcatgccactgcactccagcctggagacagagccaggctctgtctcaaaaaaaaaaagaaggaaaaaaaaaaagactgatgagcaggataaatacaggacgttggttctcatggagtcttgtaattcattttgatctctttcagaatgatttatccttttccaggtacaattattatcttagtgttatgaaacatgcatgaaataggtgcattgtgttattagagttaacctgcttggacccaccggtcagtgggcctttgtgtacaagcagtgatggaaggatttttttgttgcgttttttttttttcttccttagctcatacctagcatgtgaggtataattactcagttattacactgctttttactggagtgtttttttctgttttaatccttttagccaagaaaaccatgtgggaaaggctgacagcccctgaagatgtatttagcaaattacagcgagaaaacatagccattattgaaagttatggcgccgccctcatggaagtggtctgtcgagatgcttgtgatggtcatgagattggaagggtaaagcaactcttatttagtattataattgaataagtattttgacttattaaggtataaactgattcacggctgggtgtggtgcctcatgcctgtaatctcagtgctttcgaaggccaaggtgggtggatttcttgagtataggagtttgagactagcctgggcaacatggtgaaaccccgtctctacaaaaaatacaaaaaattagccagccatggtggcatgcacctgtagtcccagttacttgggaggctgaggtgggaaaattgcatgagcccaggaggcagaggttgcttgcggtgagctgtgatcgaggcacttcactccagcctgggctgcagagtgagaccctgctgcaaaaaataaaataaaataaatt

SEQ ID NO: 127933 - DNA, 1083 bp, Homo sapiens
ctgcctctgcctccctaagtgttgggatacaggggtgagccactgtgcccaacctagttattatttttctgtgttttctgtaatgagcattataaaacttcacagtgagaaaaaacagctgttaaaaaaatttcttttctctaacaagcaatgttagagtctactaaaatacatctaatgccactagtttaacgtgttaggttttgttttggaaatacatctttacctgagagctttcctttattgataaattgaggttctggagccatagtttttaacttctcaaaaaaaaataaaaaggaaattttgttgcaagtaacattctctttatgaaaaacattcttcatatttcatatctgatgtcagataaattcagttactgttgttgattttggtagcatctacatgttttggactttaatttattcttccttcagatgctggccctggctctacttgatagaattgtctccgtggataaacagcagcagtggcttttgtatctttctaacagtggctacttgaaggtcctcgtagacagcttggtagaagatgaccgtactttgcagagcttactcaccccacagcctccccttttaaaagcactttatacttatgaatctaaaatggtaaggctttctagacatttgatgttagatcaagaagtcgttttctcttggctatagatgtattaaagaaaattaatgtggcatacattctgaatatttctatcataagctggaatccttttttaaggagttttaaactttggaatcttcctagtgtgcaaaagatgagtgaaatgatcctcaaagggatagctggataatgggactgctgcttccctcactcactcaggttgctcatgatggcaatatgacagccagtgctccgtgaggacagagcaaaattgtcctctcacaatacaatttagactatagtagttgcctattgaaaatttccatgtagatatgctagttctattctaaacacagcattttcaatatagtatataattcattgtttctttgcctgcaaatctgttttaatttctttttcctcctagttaaaaggatcacaaat

SEQ ID NO: 127934 - DNA, 1026 bp, Homo sapiens
ttcttaactacattggtccatttttatactgttgtttgaatgaaacactgtagctaattaatagaatcataagacaggaaacaagagattgaaatttgttcttctataaaagaaagcagttattgtgataggagtaagctggcttctaaagtgtaatttaaccaggtatctattgagagagggctatgctaggccttgcaggctgggcatggtggctcacgcctgtaatcccagcacttcgggagactgacagatgataatactgcatttatatatgatagagaatgaaataatttaaatgagtgattttgctgtcaaaatttttttaaataccagaaattagttttattttgattacttttcagtgaaacactaacattccaacacacatttttttaaaaattaatattatatgtaatttagcctttcactgattgattaggcttatcatgaatctacaaccttgtattgctttattgtattttggaactgtgtcctaaaacactttgatttctggtaattttttctgctttctctaccatcaggccttaggccatctcaccaaggtagatgctgctgttctaaagtggcaccttattttatatcatagcaatctgggttgacgtcctacttcttttaggcctatgtggtcttcaagttagtactttttaaaactcagagactttgcctttcttcccctagattgagattaagattttttagtagaagtgggacattatgatataagacactggttccctaacaccaatcttgtattgactgaagcagaatcacctgaggagcctcttagagaagcacagatgactgagttctgtgaccagacattataagcttaggctaggaatctttattaaaaaacaaaaatgatcacaattctgagtgattcacatccttggcttgttttggcatatagtctgcctttaaaatgtttgtaagctagttgagatattcctaagtgaaaatactgaaagaggactccatgagtgtacattataaaatgccaaa

SEQ ID NO: 127935 - DNA, 2841 bp, Homo sapiens
cctcccaaagtgctgggattacaggcgtgagccaccatgcctggttcctatctctattataataaaaatgaatttttttaaaaaaagaattagacaaaagcttttatgtgatttccccatgtcatgctagttactgtttcatagaacagcttcttgaattcactagtcatttttatacccatttatattacattcttactctagttcatttggccaaacaataaagaaaataggggtcagataatagttttcatacagtagttctgagttatattcttctacagtagtctccaaatgtattaacttataagctttaaaataatcctttagtcttgtgaattttaaatgtttacttcctgaagagataaatatgtgagtgcagaaaacaattgcttatctgttactcatcctcacttattgtgaggctgagtattgtattactgagtattatggtaaagttgaaggttacttccttcaacattatttataaaatgaattatgcatttatatataattttctacttctacctgttttttctattcctcttccttttcaatggcttaggtattgcagtttcttatttcacattctgataccatacaagcaattctgcgctgtcaggatgttagtgctgggtctttgcaggaattggctctgctgacaggaattataagtaaagcagcacttcctggtgagttgattatgttgaaaggatttttaataattctttaaagactgacataaattaatagaatgagtttttttgttactttgcagctatatatgacttatttgaaattggtactgctaacagagcctttatttatgtaataagtttatgtttataaaatgatacatgcttggctgggtgtggtggctcatgcctgtgatctcatcactttgaaaggctgaggcaggatgattgcttgaggccaagggttcaagaccagcctgggcaacatagagacaccctgtctctaccaaaaaattttaaaaattagctgggtgttggggcattcacctgtggtcctggctacttgggaggttgaggtaggaggattacttgagttgggaaggttgagactgcagtcagccaagattatgccactgcaatccagtctgggcaacagaacaagactccgtctctgttttgttttgttttttttttttaagatataggcttattataaaaatattcaaaaggagataactaacactcaaaatctcaccacctagaaattaccaaatgttgacatttgataaattttcaaacattgctttatgtgtacgtacatatgagaaagggagggggagagagagaaagaaagcaacagagacatacagaggcaactaatgagaataggatgaccttttacatgctgttttaaaaaacaaatatttaattttacatgaatttatttatttttttattatactttaagctctagggtacatgtgcacaacattcaggtttgttacataggtatacatgtgaattttacatgaacacagacaaaaatctaattgaagagaaacgaaaggaattgccaaattccagacaaatgtttctttactactagagtatgtcaccttttaaaagatcactgcgagtaaggaaaaacattatgaaacattattaagatactttggttactttccccccttataatttctttactacatgtaaattttgaatcagttaactccctgatgggaaagatgaaatgatgacttcttttacacttcctcttccaccctcagatgatgtttgcttatatcattttaaccttgtcaggttttgtaacatttacatctgttatgcaaccataatatcctcagctacttagttttagttgtatatttacatggattcactgcaaaacaccagttgtgttccccaccatggcgtcaccattcacgagttctttcttttgatttatctcttggtatttttttttttctttctttctttctttctttttttttttgagacggagtcttgctctgtcgcccaggctagagtgcagtggcgcgatctcggctcactgcaagctccgcctccccgattcacgccattctcctgcctcagcctcccgagcagctgggactacaggcgcccgccaccacgcctggctaattttttgtatttttagtagagacggggtttcaccgtgttagccaggtcttgatctcctgaccttgtaatctgcccgcctcggcctcccaaagtgctgggattgcaggcttgagccaccgcgcccggcctatctcttggtatttttaatttgtactgaggttccttccctcaagaaaaagcatgctgtctcatattcctgaaattctctaagaatgtctgaaggttgtctttgttctttaatgacaggacggccgattatgattttcttttgcttagaatatgtaatataaatgatagtagctggcatttattaagcatgtatgtgccaggtactgttttaaatacttgacatgttaattgattggaagacacagcagtcttatgaggtagaactgtcattatccacattttacagctgaggaggctgaggcacagggaggttaacttgtccaaagtcacacagataacactgcatagtatagagtttcccaggcagtacgtcttttgaatctatatatgtaactacgaggctacactacctccatttttatgttgctttggagatgtctgaggcaacctctgaatccaccctataatccccaataattttttttgtctgggctgtctcggtggctgagccctctgggttgagagacgttgagagttggccagggctgagtacagtgccagctgagttacttgg

SEQ ID NO: 127936 - DNA, 1036 bp, Homo sapiens
aattgtgtatattgtttttgatgtggaggggtgtgtgtgtgtgtgtgtgtgtgtgtgtgtgtgtgtgtaaggtttatactttgatagagttctcaaaggactctttgcctaataaagggtaggctctgccaatgtgcatcagtcagatttctttattctcgcaggatttccagccttatgtatgtacctgattacagtggctcctaaccatttgttctttaaattataaatggcatttaaaagtaatcttgggttggttttaatgacaggttacatgtccttaaattctggggcatcccttgttttaaaacaggtcatttgaaattcatatgaaatgcttataagtggaacattgttttatgtcatcacctctattagatacccaagctccagtggttccatactggcgcctgcctggtttaggcattatcatctacctgctgaaacagagtgctaatgatttcttcagctattatgacagtcatcgacagagtgtcagcaagctacaaaatgtagagcagcttcccccagatgagataaaagaggtacgaatcttataatgagctggggggacttgagaaatcattgctgttactaggccagggtactcagactgagtaaagacaacgtatacagtatgactgaaggaattggaatgattcttctgtgtgatttgaagaagactccttcgccgtagcaccagccttataagcatagaaactcttgactgaaaaacagtgaagtgtagcacctgttcaagaaaatagaaaggcagctggcctttgaatgaagagttttgggtcatttatactctaaaatctgttctgagaaaggcttctgttacagattttttttttaatagaacttgggtaaatgtctctgtgccttcagcatcttcaatatctgtttagcaaatctttcaaacaaatgggatagcatatgagacttgactgccttccctcagtgacccagaagcattccctctacttacagtattaataactaaagatgctgcattaccaggattgctactaag

SEQ ID NO: 127937 - DNA, 1050 bp, Homo sapiens
tttatgaaatcatgcacttgaatgatgaccttgaaatataggaactgttcacttattctcatattatttgggcaccaaaaccaggtggaaggagataaacttaattttttcccagtaaatgcctaatgtatttccaaatcatagtttttgttcttatcttttagagtagctggtaatactgataaaatacatgggcactttctgttagggaagaaggtagggacatgagactgctggcacaggaccccaaggtccccacctctttcctcagcacaccttgctgcttcctcttgaggagccttcagtgagaccctgtctgttagactgaggctgtgggtacctcattaagtgagtgcagtctgtccttttttcttctcctccgaaactggtgtgtaaaacatatttgatgagattatgttcctttaatctgagctctggtatagttatcatagagacctgcctatttattctttggcgccatctggagtactacttgttacattgcatgcccacggattctcaagattccttatttgcctcgagaaccttgtttaaaagcagaagactgcaaggtaaactttctgctaaaaattaatgaaccataaatacctatttgtgccttgaaaagctagtaccagtttttttttatttttgtttccagattacttagagtgaattgggtgaatcaagagctgtttagtcactagacgtagctatttcttgcattttactttctgttcacgggacattgtgctgagcataagaatattctagagcctgctcatcagctgttccttagcttcttgctgcagttagggggctgatccagctctagaagaatggaggaggtctgctattatgctgattcttattgctggagtgggcctctgtgactgatggccatatattggatcccttaggtggaaggaaatagagaaaagctgagaaccctggtctggaccagtgaaatgctttctaggggcttccatttgctaaaagttgaaaattgagttcccaatcttgagccgtgtttttcatggtgctattgtt

SEQ ID NO: 127938 - DNA, 1277 bp, Homo sapiens
acaaaagcatgcaagtgggtttttaaaaattgcaaaatgaagtaaaaagtaaaagcttctttcccacctaccctcctgtcctccctccctcccttccttccctgcattctccttccctccctcccccgccagtcttactgacttcttgtatggcccttcaggaaatgtttttgtgtgtatgttagtatatcagcatcagcatcaacattcattgctatttaaagcaggtttttaaatttatacaagaaaagaaagcaggaaaaacatgagaattaaaccaaaaaattctaaggtagaaaatgtgaatgtttagttaatttagtaacacattacaaaaattcaaaagtatttacattgaaagaaccacattacaaaaattctaaagtgttttaaattggaagacttagaataaaagaaatatttgagacaacaattttaacaaaatgtcttttgtgtcaccgctagcttcaggctgatgcaatcaacgcttttggagaatcactacaaaagaaacttctggacattgaaggattatattcaaaagttcgatctcgatatagtttcatacaggctcttgtcagacgtatccgtggcctcttgaggatatcaaggaactgagagcccgtgcttatgctcttctatgagagagatgaattggggagaattgtctccattttatagattagtttctttctaaattatgaccaaaaatattttgctatttctttctttgtatatggacatcttttctgtaaacttcttcccctagttccatcctcactagtaaaaaataaatactttttaaaaaaacaaaacaaatgtatggttaatcttttgatcttttatcttttgatcagcattatcaggaatctaacaaataaacctacaacagtggtgattttcccatagagatattattctgaatgccagattaaaggcatagtctgaaaattctaattttttcaccctttgtagctacattacactattaacaatattcagggttactaaaatatagccatgctcttatagaatagtgtactcaatactgtgaaaatgtctgaaaaagtcaagctttttcctaaaattatttaggttttccttttttttgtttttttcttttctgcacgtaagttgacaatacaattgtcccttggtatctggtgattactggttctagggctcccacggataccaaaacctatgttttggcatgcatgttccttatataaaatggcattgtgtttgcatataatatagatacatcttcttgtata

SEQ ID NO: 127939 - DNA, 1015 bp, Homo sapiens
gactgaatactttaaaaactgaataatttttatttgatttaaaaaggaataacaatatccataaccaaaaaaagacaaaaaaattgcagcatgcaacaagaaaaatctgaactttggcttgagtttccaggacttgtagtcaagtatttatgtgggttgtgaggggataagagaatttagggtagctttatacagtgttaccatttattcttttttgttgttttatttttttcttatgtttggttggtgtcaccatttattcttttgtatgctgtttagcctctggagagggcatctctgtgtttatagaagaaaaatgtgactctcatgttgtacacagccctagactggacatcaaggtcttctaactgtcctaagcttcttaggaagatattgtctatgtattttagtttggaatcagactggcacaggactcggcatgcactataactcttactgttctattttttcagcttggatttacactgggcaacgtggttggaatgtatctggctcagaactatgatgtaagtggccatatccatgacttccttgattccatgtaactgttttagagtgacttttctttgtttgaggtaaggtgtgacttccagcataaatgtagtccatatggctgaggcaaaactcctgaatattgtagaatggtttgccattgtttgaaaaagtaatccaactcatgaaacagctgtcctccatatcaccacaagagggcaaaatcccttcagtttagctgggctcatgatcatcctcagctgtggcttgttagccgagagtaatattaagttgggctcttaaaattctttgggaaatcatgtgataagtgagaatttaaaaattaattggataatattttcagccccactatccagtagtagagatgacttagaattttggagatgcatctgggtagggggactgaaaaatatagatctatattccatctccaaaattctaagtgtagcacatttggggacagagttttgtgaagttgtat

SEQ ID NO: 127940 - DNA, 1070 bp, Homo sapiens
gaaataaccactatttagcagatctcttttggaggaagataaaagcttgtaaaaccatttatctttggaggaagagaagtacaagaatattgattaggtagatgcaaaattataataaccttttttctcttcaaagataccaaacctggctaaaaaacttgaagaaattaaaaaggacttggatgccaagaagaaaccccctagtgcatgagactgcctccagcactgccttcaggatatactgattctactgctcttgagggcctcgtttactatctgaaccaaaagcttttgttttcgtctccagcctcagcacttctcttctttgctagaccctgtgttttttgctttaaagcaagcaaaatggggccccaatttgagaactacccgacatttccaacatactcacctcttcccataatccctttccaactgcatgggaggttctaagactggaattatggtgctagattagtaaacatgacttttaatgagtagtgtcttctttatcgtttgcgatttttactaccttttttcaaaagaaaaattgatgagttttgtatagctggtcagatacaaataatagtgacttcacagtttagtaattataatgggtacttgttaaacatttggtactaaattatgttgctgcaaagtaattaaaattagtatctagagctagtttctggtgaattattcatttattttgtactgttgttaggcagctctgtagttgctaatttaaccaataagtcaatttgctattcatgaagaaacgattctgagaatcctgtcaggaattggggaatgaaaaaatacacaaaataatggtctttgtcccagtagagttcatagtctatttagtgtgcatgtttttccttaatgatgtatttgatctgacttttttccttctcaaaagaatcatacttgggattacaggtacatttgatgttatatgatggataagtgaaaagtttttaaaggagattttataccttttcacattaaaaaaggtatttatattattactttgtagtgattgtcttaagaaaaaatatagcccaaatgta

SEQ ID NO: 127941 - DNA, 1071 bp, Homo sapiens
gtataagtcctgttctttttagaataacatacaacgaggctttttcaccaaggtgtgctggagacagctcatcccagcttgcaagagctgactgataaattttcagaaattttgtgagcaggttaacatcatcttgagagcttgaagtcagccatgatgagattatttacaccacaaaaattcgcaaatattacaaatcagcactggtggttaagcatttaccagcacactaccactggctactgaatccctggaattttttaggtactcagagagggtcagagctcgacttaattcactttttaattctccctagggaaaaaaaaaaaaaaaaaaaaacaggaaaaacagaaataaagagcccctaaaatgttgggattagaggggatgctagaggccatctagtgaaaacactgtggacaagagaggtgacaagaacgtaatgctaacgagtatggacaaagagaacgagatccagaaccctatttccagccactgctctctgcaacatcccacacggactctacaaaaacaacagcaaaagagaataattgttttcactccactgtccctgcagtaaattttcccattttaaaaatgaaatatttgatttatttttttttttttttttttttttttttttgagatagagtcttgttctgtcacccagctagaatgcagtggcgagatcttggctccctgcaacctctgcctcccaggttcaagcaattctcgtgcctcagcctcctgagtagctgggactacaggtgtgtgccaccacacctggctaatttttttatttttagtagagacagggtttcaccatgtcaagcaatctgcccacctcagcctccaaagtgctaggattacaggcgtgagccaccgcgaccggcatgaaacatttgattttcaccatgcatttcctcaacctgagaagcaggcagctcaataatttcccataggttttacagaaaaagagccacttcttgcttctctgaagatttctagggagggagtgagagctgttctcagcaaggtggattatctgccttcaggtgacgggactattga

SEQ ID NO: 127942 - DNA, 1071 bp, Homo sapiens; identical to SEQ ID NO: 127941

SEQ ID NO: 127943 - DNA, 1039 bp, Homo sapiens
gccacccacacacagaatcacattggcatctcagttaatgctacgaaccagagcctcccatctgtgaaatgggaataatataggaatctccagatgggaagatcctttggcagcaacctggtttgtcccctgctccaggggccaccaatgctctccacgttcttgcagatggtgtcccagctcttacataagcacttcctggaatctaaatatcccacagagaaattcttccttctgcctgatttcaattcctccagggaaattccagctcattttgttctccataaaatagaaaacccttttcacaaaagatttgagtatattcaaacattacaaagtcaagaaaggaaggtttataaaatattcacacataaccttaccagcctaccttttcatttttctttatccccttccaaatataagccatatgtataaatatttgcaacacttataatcctaacgtagacaccattttgtagcgttcctcttctcattaaaaagcttcttcacacacaagctaatttacatctccgtcattcaggcaaatcgtcctcactgccatccttcctgtacaggttattccaggactcctcacccatgctccggaaaatgcagaatgggtgcttttgtgtgggggatgtgatgataaacttgatgtgacaacttgactggccacagggtgcccagattaagcattgcttctgggtgtgtctgtgagggtgtttctggatgggattagcatttggatcagtggactccataaagcagattgccctctcctatgtggatggacgttttccaatctgttgagggcctgaatagaacaaatggtggagggagcaggaattcaccccctctttctagcctcactacttgagctgggacatatcatcttctctctggacctcagactgggatctataccatctgctccccttgttctcaggccttcacgcctgtactgaattacaccactgtctttcctgggcctccagcttgcagatggcagatggcagactgtgggacttctcagcctcca

SEQ ID NO: 127944 - DNA, 1039 bp, Homo sapiens; identical to SEQ ID NO: 127943

SEQ ID NO: 127945 - DNA, 1109 bp, Homo sapiens
tatggtggcaagtgcctgtagacccagctacttgggaggctgaggtgggaggattgcttgagactgagaggtttgaggctacagtgagtgagctgtgtttgtgccactgcactccagtctaggcgacaaagcgagacccactctgaaaaaaagaattggggtctgtaaagaaagtttaaatctggttaaatacattttaaagggaatagagtccccttatataatgattgaagaacagaccagcatatgtggatggaaggcacacacctggtggaaagaaggagcttagagggaaattagtttgccattagagaatagctgtcataggacttttcatgcagcacagtataccagaccaccataagatttttttttttctctttctgtagcatcagtgattctcaaaatgtggtctctacaccaacagcattgccataacctggaagcttgataaaaatgcaagcttttggacgctagccaagacctactgaatcaaactcgggctggacccaacagtctatgttgtaacaagccctctaggtgattctgatgcgtgctgaagtttgaggaccattgaataagaccataagagcaagaaacagtcaaatagcctataaatagatgccatcaggcatgacttcctaaagagaaagtaaatggaagcctttaacatgtgaaatgtagcaaaactggccaagttttgaagctccagatgtccaggaaaatctttaaaaatgagtttcaaaggtatattctggccaaaagaagtcagggtgaaatgtaacaatggttccaaaggtgtaatactggtgaaaatgacccttagttattcttaggaggtttttccgccttatgtccccaaagctggattcctgagactcaagccttacccttaccttacctttccttgaattccaaagtaaagtggaaggtggaagccaggcacagtggctcacgcctgtaatcccagcactatgggaggccaaggtgggcagatcacttcaggtcaggagtttgagaccagcctggccaacatgggaaaaccccatctctaccaataatacaaaaattagttgggtgtgatggcgcacgcagctccttgggagggt

SEQ ID NO: 127946 - DNA, 1109 bp, Homo sapiens; identical to SEQ ID NO: 127945

SEQ ID NO: 127947 - DNA, 3604 bp, Homo sapiens
agtaaaatgacgaatacagtatttgttcttgatgtatataatactgaatgcactctacaaaaagtgtttcaaataagaaaaaaataatttgtcacaggaatactttagcaaagtgatttactttttccccgtttcatactgcacatagggatattatttttaaagcctaattagataaatatatctaacttgctcaacgtgctcttcctaatcatctcatccatgatagtataaataaaagccagtgattgcctgggttacaattcttagtgcctgaaaaataatgtggcatttttataattaatccataatgttgccaacttgtttgtttttctgcagtagaatagactccactagtaaaggaatttttaattcttgatgtaaacattaacctgtgccatgtgagctagtcttacattcccttcccccagttgtgggctcatttaatgagccctttcctctcttttccagggtgctgataagactgtgaaaggcccagatggactgaccgcctttgaagccactgacaaccaggcaatcaaagctcttctccagtgatggatggatggactgataactccggaagaatgactctcctgtggcctcacactgctgcctgtctgtctgtcactctctatctgccagcttcttcagctaaatactttaagaggggtgaggggagagagaaattcataacaaatccgactaccagaaaaaaaaaattgttttggaggaggggcaaaaggaaccatgatcaggcttttactgggattcctgatcaagtaagcctcttccctttctaataaaatatacaccttatacccaagggagagcaaagacaaaatacaccagtaacatttgaccttttcagctccctagctaatttattagattgtgttgaaggtctgattctacaaaggccaactctacatatttggtagccctaactgtctgagcagtagtggctgctgtgatgtaaacttagggtgctgagataagcaattagctctagccttctgccttaagaatgcactctactggggatttcctggcatagttaagagcgctgcctataaggttggtgaccaaatctttcctcggtgactttaagctttatgtgaaagcttagttaaggtgaggaggggcacactcctaaattgctggatgactgaactttggattttctctcccctttcacatggatttcatgtctctttagataaaactgactagttttatttataaaatcttaagttttggaagtctaaaggagaaaccattccagtatgcatatttttttctcctctagattcatacatttatatagcattgaaacactttcaaactcctgctggtagtaaaaggggatttaaaaatagaatcatagccataagcctgttagtatcatatgaagagagaacagttatcttagtacctatggattttctttatttgctgtttgaatggattgaccttggttatgtgttgagaattaaggaacattctttgaaatgcctctctcagacccatcttggaggctgattacttactgcaccaaagctatcactggggtgagatttactgtttggacaaatttagccccatcccttcaaaaatacacttgtaaccaggtttcccagagttgttgataggcttctgctgaacatatgccaacccacctgcataatatatttttgttgcttttataaatcatgcattacataaagtgtgacaacttcaaaatgtattctctgttcttggaatacagtgccctaaaatggtgttcttatgacctgcagaaaatatttacacatatttccaaatatttatttcatgagcagtacagctaattaaaatatataagcttaaattttatatcttacatttaaaatattaagattcctttgacttgccatccatataagcttgctaaaaatattaagaccaagtcatgcaataattgaatgtacctcaaatttttaggggagggtgggttagggactgatactcagattgtggataataattgaattggtttttaaaggcaacatagcattctacagcagggttaatctattatcaagaacagtcaccctggttaataacaagttttactgatcagttgctggttggttggttggttggcatgtgggtgtgtgggtgtataggtgtgtgtgggtgtgtgtgtgtatttttccccatgagtcctttttttaatcctgtggctttttcacttacaactagcctaaccctgtaattttcctacatccaagaaaacaatcacaaagtagtggtttaaatactttgttgtatttggctaattttgctgtcttaatgcagcctattaagagttgggttaaaaatcagtaatcagtactttattacatcactgaactaaaatatggagacatcctcattgaaaatggagggcactctatcagtctataactatcaacgtagtgcaacagggtgttttgatacctttgttttcacctcttgacataatgctatttaaaggcttgaatttttccctttatataattttcacctttactttcaaagtgttttgttgtagttggctattgcagagagtgcattgtcctatcattcctaaacctggtctgctttctacattcatggtatggaaaccatgtgattctttgtacagtttatcctgatgttgcttgtaatgcagtagaggctatttcgccttcgcttttctttctcgacctttttgtaaaccctataattatgaagcgattgcttgagaaaataacatataaacatagaatagaatagactgaccaagatggttcacagtttctttttttaactaggttatttataatgtatttctgaaccacttggcagacaaattcacaacacttaatgttcatattttgagtaaaggaagctaaaaccatgtttgctttctggtactacatgcattagcgaaaggttaagtaagttttgttctccactgaagtaatacttaacatctcagaaaaaattttgcatgttctgtagttttgtattaaatcagtcatttcatatgcactatatcaagtacaaacaggtagtttacctgtttatagtagtgtactaacaaagtctcccttgcagcttcagactgttatctataggcttatcgttcaaatacagcacttgaatatcccaagtagttcttctacgcatagctcacctttctaaacccagttaagcatggaagagaggtagtaggtaggtgcagtgtgtggaagctgcaaacaagtaggccttttattcattgatatcttttcccaagtactggattttaaatctgtatgtatctgtttgatttttttttctaatatttcagttgagctgctgttttcttccatgcaatattgtatactcaattgtgtatagaagaagctggtgagagtgccctcctacataaataagcaattgcagtgttttgcatgcaaaatataaaaaatttaaattgtcctgattctattttgtaaatggagaaacaatcatatctttctaagcggtaatggaggaagactagtgctttgtgcattttgatatatttgagttcattttttccacaatgtcatac

SEQ ID NO: 127948 - DNA, 1031 bp, Homo sapiens
ctctgtcctcctaggaaaaacaaaacaggatatattttttattctatagagaacccaaaccattgttctgtactccttattcccaaaacatgaggcttcaggtcattgagaccttgtggttgtaagtttccgttgttaaagagttgaaaacattaaatgagttcctgaaaagttggcttgatttgcatgtacattaggccctaagatgtcatcccagaaggttctctgtgtgtgtactgtgttgctaaattattgattgtgagttgtcttacttttaactagtttgttttttcttttgcttatgcccattttgttcttttgtgtctgaaccttgactttttttagccaaataagtgacatttggagatagctatgttggtagcagaccgtttgtaaccatgtagagctgttgttttatatgaaagagattttcttctttttgaaatcagcatagtacattttagttctgctttttcaaaattaattactttgattttattattgcataagcttctttaatggataccctgtagttttgttaggcagattttttttgaaaattgattatactctttcaaaaattcttagttgctaaaatagagttgttccagtgcatcttttaaaagttataatcagtgtttatattaagtctaatttgttctgccttttatcaaaagtagaattcttatggattattatgaattcacttgaaaagacttggtttaagaactttccagattcattgacatttccaatacattatccagttgatttatccttagcatacgaaaaaaggcaaaataataaacagggatttagaaactcagtatgatcacaactaataggggagaaatcagaaaaacaaacatgattgctagaatatttgaaatcaaactttatatgatatgctgtatcatttataatttattataaacccaaatacttaggtattattatctctcttttatggataaggaaaccatttatctcggggtggtctaactgcttgaaagtcaaatacaatgtaatgg

SEQ ID NO: 127949 - DNA, 1031 bp, Homo sapiens; identical to SEQ ID NO: 127948

SEQ ID NO: 127950 - DNA, 1031 bp, Homo sapiens; identical to SEQ ID NO: 127948

SEQ ID NO: 127951 - DNA, 1017 bp, Homo sapiens
ctaaccatgggatctgcagataaagacagctttaattcttccttttcgaaatggatgccttttatttcttttcatgcctggttgtactgattagaaccgctagtgcaacattgaagtggtaagaacagacatccttgtcttattcctgatcttaggaggaaagcattcagtctttcaccaattaagtatgatcttaaatgtaggttttttgtaggccaaggaagtttccttcttatcctagtttgctaaattctgatgacaaatgcatattgggtttttttttttttataatccattgagatggtcaatcatatggctttctctgtgttaaaatggtaaattatattcactgacttttcgaatattaaatcaaccttattcctgggataaaccccactggtcatggtatattatcctttttacatagtgttggattacgtttgctaaaattttgtgtaaaatttttccatcacttgtcatgaggaatattggcatacagtattttcttataacatctttgtcttgttttggaatcaaagtaatgctgaactcatagaatgagttgagataacatcccatcgcttccattttcgggaagagtgggtagaattggtattatttcttcccttaaatgtctggtagaattcacagtggtgccatctggagtctgaaggtttctttgtggggaggtaatctgttgtccaatattggcactttgtatcttcgctcttttcctgatgacgtttgctagaggcttatcagttgtattgatcttgaagaatcagcttgtgattcctctcatttttctgttttctgtttctttgatttttaccctgatctttattcttttctcttgcttattttggatttaattttttttctagtttcttatgatggaaatacaaagattattcatttgaaatctttctatttttccagtacaggcatttagtgctataaatttctctataagtactgctttgctaaggccctgctgacaaggatttttttctgtca

SEQ ID NO: 127952 - DNA, 1017 bp, Homo sapiens; identical to SEQ ID NO: 127951

SEQ ID NO: 127953 - DNA, 1017 bp, Homo sapiens; identical to SEQ ID NO: 127951

SEQ ID NO: 127954 - DNA, 1032 bp, Homo sapiens
atggtaattatccattgagactactaaaaggtgagctttctggtggattttgaggatccaacatgcttacaggtgagtgcttgtgagttgcattgataaatagccccttttaatcttcagcaggtctgatacatgtactctcttgtttacatgtacttctatttcacttgctgtgaaatagaagcctggtctctaacttccctttctctgtggtttcctttccctccagcctccattctaattacatctgccgttgacactctaataggtttgaaaagcaacaattgtgcaccatgtgaaaggatagaatctcttgaacctgagaaagatatcaactctaatctttagaaattccaagactcattgagatcacttttcactttcctaataaaatagccaatttaaaagaggtcctgattcaatctactttgcatttattggttttaggcagcttcccttttttttcttctttaaattattagtttctttcttataaaaatgtatcactgtgtgttgccctttctacagaagggctggtgacctattcagaaagcatatgtcagcttgtataagatacaggtgccctcagtagacagagaaacattagtatagattcttttctaattattaatgcttttagtcattttaaaaaatatataaaatagaggaagatctttttttacattggaacataaatgttcattcagatgtacataggctatataaagtgttttggtttgagattctaaacattttccttttattagtgcagataattaaaaatttaatgaattaaaactgatagaaattataacaatattatgagcttgttatttaaaaaagcaaagctgtattgaataaagtaaaatatcccattgactatttttcctacctatgtggttcctctctttaaaatataaaattgattaggtgtttttaaaacagaaaagaataaagaagacaaaaattggccaaaattttactatttagataactcctaacttttaaaaagtaaaattaaattaattcaga

SEQ ID NO: 127955 - DNA, 1032 bp, Homo sapiens; identical to SEQ ID NO: 127954

SEQ ID NO: 127956 - DNA, 1032 bp, Homo sapiens; identical to SEQ ID NO: 127954

SEQ ID NO: 127957 - DNA, 1047 bp, Homo sapiens
tccctgatttcacctgaaatgcttacatgtgtagtaaatagcaatgcagtttagtggcagtgtatttggggggtaaaatcatgatgaagaaagacaaactcaaacctcagccccaaatataaaactgaatcgacattgtggcagagtgggaaacttaaaattccaagctagcctgtctttccatcctgaaactgtgcctttgtaattatgagagaacttaacatgtgattttaatttagtgataatctaaaatgaatcttccaaaacaagtataattttatgacaaccacggatggcatcttgctcaccttctaaaagtgtgagaacccagtctagattttaactcttcaaagaataggacctgacctgggtttttgcttcagaggctgtgttaggaagcaagtaagcgaagcagtttcttaaaacttacaggattgtgcaaggcaaactgctgaaggtttttactttatttaatgccattacaatttagactttttggatgctgcttacctgcttagttttttgcagtggagttttaggacaggctgtcttctcgtcactgccttctcagctggtagccaactgaaacttgacttattggctatttcaatataaagctaaaaggtagaaattatttggtacacttaccagtggtgggacactgcaatactctggaagtaagtgggcttttgttttcctgtcatggtggaacctaggttgtttgatatacttgaaatacaaaaagttgattaagtactaactgaacttacagctaccaaaataacacaatgtatttagtgttttcctgacacattattttatgtcatccttgtgaatactgggaagtaagtcctattattggtcccattttacagattactgagatgcaggatacttaagaaaagttatggagatggtaaattgtgaagcaagaactaaattgctgactccaaaactgaaactctttaactgctccacgcactatctctcagtctaagatctaattgtgaaagcgtatcataccaagatttctagtaggacattccc

SEQ ID NO: 127958 - DNA, 1047 bp, Homo sapiens; identical to SEQ ID NO: 127957

SEQ ID NO: 127959 - DNA, 1047 bp, Homo sapiens; identical to SEQ ID NO: 127957

SEQ ID NO: 127960 - DNA, 1051 bp, Homo sapiens
cataatatgtacctaagcaccttgctctgtgatcaaatttaacaccctactaacttctaaggtcacagttgctactagtctcattccctagatgagaagacagagaacaagaaatggtaggaaacttgcctatgattgcatgctatacattgataaagttgacatcgtagcatttaaggcatttatctctgctgtcaatatcacttctggtcattttcttgtgtgtgcatatatgtatgtatatttatctctattatttatatattttaatccaatcatattatataaacttttaaaagaaacttgattatgaagaataacagttcaattctgagtgttgcaaatgtgtgaatctttggtgtcataggtttatagttcaagtgttgttataataaaatttcagaatgacaaatttcaggtaaaaatagcaccactaagtaatttgaagtcttttagaatcgtaaggagtggcatttgaactgagaaacaggcttatcaggaaatgtcatgctgacatccacagtggaggaatcgttcctgtgttcttatattagtaacagtccacccagagctcggcaatcagtccacttatgtaaaggcgcaatacacttagggccccttccacatttaacattctatcttattgctttcaaatttatttttagaggtgaattatttatgtcctcataggtgtagaaatagtcttaccactcagcacttttcatacagtaaaaggttacttcaaaagtgcagcggatatttactgcgggttttgttgccttgagtgtgcagggaataagggagctcttgcagaagtcagacttgggggtaaaggagaaagtttgcaggaaggtttgggggtagtacatgtgccaggtatgtttggcagggaaaaggagggggaaacatttatgaaatttttaaaaaataaaaataaatttcacaaatagaaatctgactttagagatacaattagtccaacagatacaacacttgttttttagatttttctatgtttttaatagataagtgaaaattagggtctgaatag

SEQ ID NO: 127961 - DNA, 1025 bp, Homo sapiens
gaagcttttttttaatgtgtttgacttatagaaattggatagaaaacagctaaagtataaagaagagtaccatatggatattgtaagtttcttttcctactaaacttggaatagttagacgtgcaatagaaatccatatttaattctctttccaacagcttaagaaatggaaagacttcttggtgtagccagggaacaccaatccagataattaaagggtttatttaaaatgggtttttaaagagatgtatgggaaactggggcaagttttcctggaaaatataaataacttaaaaacagactaaattgggatatgatttaggtgatggtgaccagatgttctccttagctatcagtagatgttaagacatgggttagaattgtggccaaaagaacataaatggtagaggaggtgaacatgtctgtgcttttggcaggatcaccaacccatgctgtcattactaagaactggtattttgtttaagtgcaggaactggatattctcaaataagaaggctgaagagtaagacatgattttggcattgttctatgtgtttagtttctctctcggtccttcatttagtggagaccatttctaaggctcacttggactctgaatcattacataggctttgaatcaagagcttccatgtggggtcattccttactttcattagagaccaagccaatccaattttcttttttctgcatttatatctgtcttgttccctctcttatttcacttttttcttaatgaaaggaagttctccttctagtgaaacagaaaatcttgctaatcaaggggcatatgaagcactgtaaaaaacatacttttgaaatcttgagggttaaaacacttatctctcagagaagacaggtacagttcaatttgggacacaaaccggataattagctggaaacatttctcgtctttatttactttaatatttaccttccacttgagtcgcagaaggaaaagcgggagaaccagccattcccactctcacattttccgcatgctttct

SEQ ID NO: 127962 - DNA, 1097 bp, Homo sapiens
tgagggagcctgcaagatagtaaagctgatttatcagaactagagaaaaagaattatgtacttcgtatcaaaataatttttctaaatttgatgcaaaactgatcaacgtcctatgagagaataaaactataaactttaaagcaatcatctcttcttgacatttgtgtctctataggacagaaatctatgttaacctacagttacacaattcttaggcctgcgaaacactattttagtatgacattataaggacattcaaactcctttttgccatttcaaattttggtcaatttttctaattagttataagactaaacccaaagtattatttatcttagaaaaagattaaacagggatatgattctagtatataagtatcaatttcctgcctaaacttataataggtactaggtctgtccataattatgttttcataatgtttcattaaggaaaatagagggatattcaggaaaacactatcaatttccaagatgatactatagagggcaaccatttaataagtacttatatgggccatgtaccatgttaagtgctttatgtacattttagtttaattagtaaacaatcgtgtgaggtacgtattattatccccattttgaaaatcaagtaaatgagtctcagtgaggttaaataatttagtcaaggttatgcagccagcatgagtcagaattgaaattcagtcttattctgagttttatattccctcctatgccctgttatactaccaaagtcttaaactctgagaaatttacaagggtgtttctagttaaacgcacgcatgaatgggtttagttttgcttgtgtgatagaacatgtgcaaaatggtcctttttcctttaaccattttgtaactgcctgtgataagcgacctttctgttccctactcactgaatgaaaacatacatgttttaaagaaaaataaaaccattctgtttagctcttggaagcctctgtttctcaaactgttttctttgtaacttatttatctttcttatatctcttctggcccccgatacgcctgtaggtgggctggatcctttccatcctggatgaactgcagctgagccctcagcctc

SEQ ID NO: 127963 - DNA, 1313 bp, Homo sapiens
aggccgaggcaggtggatcacctgaggtcgggagttcaagaccagcctgactaacatggagaaaccccatctctactaaaaatagaaaattagccggggtagtgatgcatgcctgcaatcccggcggcattacaggaggctgaggcaggagaatcgcttgaacccaggaggcggaggttgcggtaagccgagatcgtgccattgcactccagcctgggcaaaaagagcgaaactccctctcaaaaaaaaaaaaaaaaaaaaaaaaaaaaaaagacacacagagacacacacacagagaagaaggccatgtggtgatgggggcaggaattagagtgaggcagctgcaagccaaggccctccgaggatcgtggctctcctcagaagctaagagacaggcatgaaattcattctccctccaagccttcaaaagggtgttcaaccttgttgaaaccttgatttcagacttctagcctctaggagtgtgagagaatacatttctgttgttttaagctacccagtttgggttccccacagaacacccattgccattgagtgggatcttagtattcagtggaaaagtgtttgagaaatgctcacacaatgtttgcagttttcctaggactcatactcatcatctctgatccataacaacaaccttttggggtggtcatatcgggctgttcacttctacctaaagataaagaagagtcagagaggcttactcactatccagagctttatggcttctttgctttcttagggcagtgctaggaacctaatatagtagccattctataagtcgagttaccttatctagccatgcagataccgcagttacataggctcactgacacgtatgcacacaggtgcgtctacagcaggcttgagtgtttaggttgagtggtatgtggttgaggtgtaagtgagcagacaggcaggttggtgtcagaagctgggagctgcagggaacagagtaggtagatggtgaggtgagtgagcgtgtatgttgtgtaagaggaaaaatggaactgtcagacttcaggatgctgttaccagatatatcttctctatttttaaatgtgagcatgccaccctctttttgtggaccagctaataggtactgctttgcttttgttattgttttgttcttgtattttgctttagtcttttcctcgtagataatgtttggtgaaaatggcttaaccctacctgtgacaccctgccttaattctaagttttcttctaatgttgcttgcaatttgccaaatacagttttactgagaaagtgaatgaattgagttagagaggccatg

SEQ ID NO: 127964 - DNA, 1037 bp, Homo sapiens
aataaatcgagtttccatcaaagcttatagaaggatatgtatagcccccaacgattttaaccaggctgcctaaaagcacaaagtcccagaaccaagaccttttttgttgctttagctgttttaactccttgtttataaatttcatttggagagttttgagagttctggggagaacagggcctgtttaagtgaagttgggaatcaatgtcagggaaagacccagatgaacaggctctggattggaagtcgggaaacctggagctgaatctcagtgttactgctcagtgtgtgacattgagaactcgtgacctttgggccttggctaccttctaaaacagagagtaggattaaattcttttttattaatttatttttgtttctagacctgtaattaatcatttgcttctcttctaattttgttgtaaatttaattgacttaaatatcaggatttcaactttatgcatatgtatttttaattaaagtataattgcatggaattggattgaattaacgaaatccatgagaagctcagctgtttggactaaaatgctgtaaataatgaattaacattagtgtcttggttaattgcgtaaacactggtcctgggatgtaagataataaaaaatggaaaaaatgaaagccagtattacttacatatatacttttgaacaatttctactgatggactatgattttatacagagtcatcccttatttccaaattgctccctttaatccctttctgttactttttaggggatggctacctctcttgacaaatatatgaacagatacgtatatcctctttaaaccttgtatcagtaaatagcattgctatccactgaatgattattacttgttcactaatacctttaggccaggaaaagcaacaaggagaataaaggaaattttaggtagaagtaggaagaaacagagttgagaacgttcccagtttccttctgaagcttcctcataatttcataccaggtacttggccctattaactcatattacaaaacgtctgaaagatgaagaa

SEQ ID NO: 127965 - DNA, 1054 bp, Homo sapiens
tgtgaaggtaacaaacgtagaataatagttgtatattatgttgaagattcaataccaaaagtgattttttgagtgactcaatgggatgagtttcttaggaaacaaaacacaacctttggttcaatagtaattacatctttcaacatttcaatgtacattaaaataatcaaaaagtactttgagttcatatataatatgaagtaggatttaggctcaaataattacgcacagtttgttccctgacataaatcagaggtgaagtttgtgcggggcttgggacaatttttttattgcgtggactatcctttacattgtaggcagcttgtctaagtcagccaaaaagcactgtgagctgctttgaagacaagcaaagttagtgcccatatggtataagaaaaaagacaacaacacactaggtgattaagaactctcttggggaatcaaaccaagacactgagtaacttcttagacagctggttccttttctagaacaacaggatgagttcaccagtctctaatgtgtcaatctttaggaggtgttctgggtaagagacttcctgattctctggtgcttttctgctctgcaagaagaatcctgattctgttctcacgtgcagcatcacccagagagggagctggcaagatgaggatagatagaaaacgggagccacataaacctacaatcagactgaaactggaaccagaggaaattgagagaaatttgcaaagtgggtaattagaaaagggtatctctggcttatttgcatgttttccataaattttttttttttttttttgagacggagtctcgctgtcgcccaggctggagtgcagtggcacgatctccgctcactgcaggctccgccccctggggttcatgccattctctttcctcagcctcctaagtagctgggactacaggcgcccgccacctcgcccggctaattttttgtatttttagtagagatggggtttcaccgtgttagccaggatggtctcaatctcctgaccttgtgatctgcccgcctcggcctcccaaagtgctgggattaca

SEQ ID NO: 127966 - DNA, 1027 bp, Homo sapiens
cactccctttctgagacaataccactaatataataggtttgggcttctatcaaggttgtctggttagtcatcagggagcacagagtatttctgagttatacatgcttttccctgttgctttgcacaccctttgttcatttgcatgctacagggcactgctgtgtgtgctcatacttgcttattcttttaggcatatgccatagtattgccctaagtgaagctgggactttaatagtgattctacaagactccatttaatacccaattggtggtctggatgaggctaaaaggaacaacgtttctggactttaagagactttcaaaataggaggggagagggcagtgggtctcataactttccaccctgctccaccatcagactgacacattgttttggccagcatttctcaatctgggtttgccaggaacctagattttcacaatacaaatgtctaggcttcagagcttctaattttgtaggtctggggatgataattaaggtatttcccaagcttggctggtgacttatacagtggactgagaagagttgatctcactgtggctttagccctggctgcacatttgaatcaccgagggaggttttccaaatattgaagcctagtttctacccgtaccatttagatcagattctcaaaaaccagaccactggtcttaggcttctctctgcttttcaccaaaaagcaagatgtagaaaagagcagtaaacagagaggggtgattatattatgggaaaccacagagaagattcagtgtagtcctttttatggcggttatttttgtttctgttttctgattaggaaggagggatggaggataacaatatgaatgcctagaagctaaggacaaagccatttcaggtggaaggattcatacttacgaaggcatagaaatgagcgattacttttcctggtggaaagaccacatatgtggattcatgagggacacccttgcatgaaggacgacagggaggtggtgagtagggaaacccaacatctaggttgaagat

SEQ ID NO: 127967 - DNA, 1009 bp, Homo sapiens
aattccaatcctccatcaagccagctaatactccatcctcagtcctcagcttagaagtatagcatagtgagctctttcccatcttgcaagatggcgggtgaaaaagttgagaagccagatactaaagagaagaaacctgaagccaagaaggctgatgctggtggcaaggtgaaaaagggtaacctcaaggctaaaaagcccaagaaggggaagccccattgcagccgcaaccctgtcattgtcagaggaattggcaggtattcccgatctgctatgtattccagaaaggccatgtacaagaggaagtactcagccgctaaatccaaggttgaaaagaaaaagaaggagaaggttcttgcaactgttacaaaaccagttggtggtgacaagaacggcagtacccgggtggttaaacttcgcaaaatgcctagatattatcctactgaagatgtgcctcgaaagctgttgagccacagcaaaaaacccttcagtcagcacgtgagaaaactgcgagccagcattacccccgggaccattctgatcatcctcactggacgccacaggggcaagagggtggttttcctgaagcagctggctagtggcttgttacttgtgactggacctctggtcctcaatcgagttcctctacgaagaacacaccagaaatttgtcattgccacctcaaccaaaatcgatatcagcaatgtaaaaatcccaaaacatcttactgatgcttacttcaagaagaagaagctgcggaagcccagacaccaggaaggtgagatcttcgacacagaaaaagagaaatatgagattacggagcagtgcaagattgagcagaaagctgtggactcacaaattttaccaaaaatcaaagctattcctcagctccagggctacctgtgatctgtggttgccctgacgaatggaatttatcctcacaaattggtgttctaaatgtcttaagaacttaattaaatagttgactacgttaaaaaaaaaaaaaagt

SEQ ID NO: 127968 - DNA, 1928 bp, Homo sapiens
tgttacctgaacaagctaaaaatctaagggactttgcatttcaagttacctttgtctggaatgttcttctaccaaatattcaattgactgtctctctctctctctctcttacctaatgtaggggtctgctcagaggatgtcatgataccttatcaaaaggaaatcatgggccaggtgcagtggctcacccctataatcccagcactttgggaggccgaggtgggcggatcacaaggtcaggagatcgagactatcctggccaacatggtgaaaccccgtctctactaaaacacaaaaaattagctggatatggtgatatgtgcctgtaatcccagctactcaggaggctgaggcaggggaatcacttgagcccaggaggcggagtttgcagtgagccaagattgcaccattgtactccagcctgggtgacagagaaagactctgtctcaaaaaaaaaaaaaaaaaaaaaaaaaaaagggatatcatgataccttatcaaaatcagcatcccttgccctactcttgatcttgttcttcatcactgctgtcatgatttcactgtatactaagagtgtatttgtttgttgtttgactcgtctcccaggcagtaagctatctcaagcgggggcattgttgggcttttttgttttatgcccaccatccagaagacttcctgcacatgaggcgtaactattagctccataaatactagctgactgaatagcaacgtcagtaaccaagggaattggtttttgatttgcgtggctttttattttgacagccttggaaacaacagtgagtctgcccagttctcacaagtgtctagcatggcgcctggagcagagtttgcacatataaatgtgttgggtaaattagtgaatgaccaaatgaatgaataaagtcactttagtgctttaatcaccagtacatcttcagctaccctttagacccattcattacacagagttactatggcaaaggaacctaaccttgtctaagggttccatgaaggcctccctgaggagggtacttcatcatcatcatcatacctaacaggttctgagcacttactatgagccatctactgctttatgaactctaactgatttaatcctcacaacaaatctatgaggttgataatataattagtcccattttacagatggggaaaataaggcacagagaagtagattcatttatctcaggataggtaactaataaatggtagtctgtttccagagcctgtgcacttcaccactcactatgctatacttttttttttttttaacgtagtcaactatttaattaagttcttaagacatttagaacaccaatttgtgaggataaattccattcgtcagggcaaccacagatcacaggtagccctggagctgaggaatagctttgatttttggtaaaatttgtgagtccacagctttctgctcaatcttgcactgctccgtaatctcatatttctctttttctgtgtcgaagatctcaccttcctggtgtctgggcttccgcagcttcttcttcttgaagtaagcatcagtaagatgttttgggatttttacattgctgatatcgattttggttgaggtggcaatgacaaatttctggtgtgttcttcgtagaggaactcgattgaggaccagaggtccagtcacaagtaacaagccactagccagctgcttcaggaaaaccaccctcttgcccctgtggcgtccagtgaggatgatcagaatggtcccgggggtaatgctggctcgcagttttctcacgtgctgactgaagggttttttgctgtggctcaacagctttcgaggcacatcttcagtaggataatatctaggcattttgcgaagtttaaccacccgggtactgccgttcttgtcaccaccaactggttttgtaacagttgcaagaac

SEQ ID NO: 127969 - DNA, 1048 bp, Homo sapiens
ttgtatgcaaagtactcaggcattgcaaatcaggcaaagttgaaaacaccccagtattattagagctctaccacacagattctgcaacatggggaaactcaatttaatacattttcattgaatacctacctataagcctccgtggtatgaaaggcatacaaaatgtgtatttactatatatattgtaaagtgattatatatactattgtgaaactagatcactatttggtctactagctaatatttatatagatggtattagcatagctattgccacataggcaaagagatccatgttacagatgacagaattgcaggttttctcaagaacttctagtggattttaaagtattattggaaggtggaaacttttgttcagacacaaaagtgttgtactgaagtaaagattgctgcataaacatgcagtaatttatttaaaggtacatggtcctactagagcatgggcagttagtctagaggtcctgatcaagcatggtgtaggacagagagcttgtgtgggatttctatgtgggggcttggcaattctgggattaatttcagcaggttcctgaaggtcaagtgggccaagcttcaaacagaagacctgtggttatgtctattcagtggcgaggccagatttaggaagccgagaaatcaaacattatgaggaacaactagttccagaaatcaaggtcaggcaagggcaagaatgcaaggagaaatgtgagtcaagatagtgtcattgctgtcagaatacacatatgggcctgatttgaagaggaaagggtttgttctagggtttctttcagagtgagaggtttactacgtatggtggtgctaaggcacataatgatgatgaagaagaagatgacgatgatgccgtaatgataaaagctgccatttgttagatctgtgctatgtggcaagcactgttagttcaacaaatatttttagtacctagtatgtgcctacatactggggaaagaacaataagcaaaacagataaaattcttgttctcatgaagcttatgtttacgtggaaggagac

SEQ ID NO: 127970 - DNA, 1114 bp, Homo sapiens
cagcactacctactcaccagctctatagccctgtgcatctcatttctctgcagccgagtcctttcttgttagaaccttcaccctggctcctctacgacaagggtatctttcttctttattctggtgcttgcctccttatctggtttccccacttcttcttgcccttagtttctgctgatatgttcttttgtccagttgcctcttactgggtctccctgatgccagttgtgtgtccctgtgcaggtctctgctctactgtgacaatatgttctgcctgtttgcactttctcagtctttgcacttctgctcctacccaaccccactgagcaggtctagctccatatcctggatcccacccataggcttatccacaccagggagagttccacccctggctatgtctggaatcaggacttgctgcatgttgattcactcattcagcagtatttattgagcaccatttagggatgtgattggaagaagatctagtctcggtgctcatagacctcatgtgaaccaatgaggaatcagaattgaattttgattaaactcagggaccctgattcctcaaaaaaaatgataaatttggagtaaacttcaacaaccctttaagctcaagcactcagtccacaaaatttctctatttcagacatttctccctagcccttaaatcctctgtctacaagctgattgactaatatattcagctaaggttataaaagcaaccagggtttcttaggcagccaaaaagaagtcagagagcgaagaggagagaaaaagccaagaatgccatagatcctggatcaggtgggccagctaggggagcaaggtgggaagtacaagctttttgatgcctgagaccagtggtttgagtggggagcttgcttgggaaaaatcagcagggtccacagaaatgaaaggggatgtctaccaggagcagctaagaagagccgggagggaggtctggggggctcctggtcctcaccttgttttagggtgctgcccttgcctttttcaattaaagaaacagaaacagcagctatttggggttttgagcatggaaaggtggaggacagaggagctgtctgagttatcttaagaatctggttttact

SEQ ID NO: 127971 - DNA, 1051 bp, Homo sapiens
ttaattcatgtttcttaccatattgaattggtttttgccacttgtaacaaaaggattcctgatgaatgcctcctgtgtttggagtcttattttattcttcctctctgtagctgcagggtctaatatatacctaatttataatctgtgtaggtgccaattacatatgtaattgtgtgagcatatgtatataaaaacttagaagcagatatgcccctgagagcaaaataaagaataaagttcctaaaacatacagagaaaaagataatgtaggagaaagaaagcagacgttttaaagtatgcgttgtttgagcttttatgcgtctgtcaaacaaccctgaaagttccatcacgtgtgatattttaaattttgctcccaaatggagaaaggcatcttcccacccctctgctgtgagtcaaaccactcaagcagggctgtggctgtcagtgtgaagccagctcttccaaggacccaggggaagctgccatcgctgccgtttctgcctctgcctttctttgctcaaaagttggcaaatgctggtcatgtcgtggatctatttatagtaggcacacgtctacccaccttgttcttttcttagcatcaacttgacatgctatcaattatccatgaggtgaatgacaacacaagggaagttatttgaggcaggtgccctgaggtgagagatgagggggtggcagaggtcgcacagtgacagctccgaatgaaaagggtaaaacaaacgtcccttgctgcatctggctggtgaatgattgcagacaggttggtgggaaaccctgagctggtcacgcagcagtctcccactgcccttcttccctgtgcctgctgatgtttgaaaagcccatttgaaacagacaaggggcaggacctgaagatgtgatctccctccagtggaggtcatttttgttattctcttaagccacaggaggggaggacacaaggacctcctggggacagggggtggatgtggcagaggctgatactcttcctccacgtaggagcatttctggtgggagtgaagcagccaccggggga

SEQ ID NO: 127972 - DNA, 1070 bp, Homo sapiens
tctgcaaactctgggagtgcaaccacctctcctagatccaccaacaaaacagccagcaagcctagatgctatcatgtctgatgtcagatgtggttcagacacaaatctatttgttccccaaactgcacagactgctgaggacagatgtgaagccctctgtctgcctttttaaagtccctctttcttgacatgaggtgaagcggcaagccccactaaccactggctctccttgattgaagggttgtggactctcaacacatcaatagcttccttgaacaatccctccaaaactgtccaattcttgatccttttaaggaattatgagttttataaacagtttatagcaccttttttggtaaattttgcaaaacgtctagctcttttaaaaaaattatttcttgatgcttgaaagaaaatattcactgaaacatcatgttatgtgagcatcatttttctacccccatttagaaaaaagcatttctgactagttgcagaaggaattttgttacatggatatagaattggctgcatctagggatagattgaatggatgacaaagtgaaaccacgctttctttatgaaggttgtattttcaccttccttgtagacacccttccttttccagggtgcccttagataaacagctgtgcatcttacaggaattgcttacaatgatagatttcccctaagctcatgactgccaaatttgtctttgtagcccagacctctttctgagatgcagatccatatatctgatagcttactctacttctctgatcaaagtattacaagtttagctcacatcatcattactctaaataccattcctcattctgaatatctatttgccttcatgtaatttatctttagtcttaagaaatggtacttagaaacccttagttgtttaaatcagaaagttgggagtcatcaacagattcttaagttcttgtcaaccatgccactttagcaatctggtgatgtctctgaccgcctttcaaaacagtgtttgtaagaatacaggactactatggaaaccaatgatatggaaacacagttctgttatgaatgac

SEQ ID NO: 127973 - DNA, 1080 bp, Homo sapiens
gaagcccgagggaatggaaagtgaagggcatctccctgggatctagtcctttgagatgttggactttgagcaagctacgcaacttccccaaagttcagaattttaatctgtaaactaagataacagctatttcacaggttgttgtgagggagacaaaacaagctaaaatatataacaaagcaggcaaagatgtatacttcaagagtcactacctacctaggctggggcaattagaaattctaaatatatgtacataagtatttagcaaagttatatacttcaagagtcactacctacctaggctggggcaattagaaattctaaatatatgtacataagtatttagcacagatgataaaggatgggcaattcattctgagattaggctgtagttcttcttcagtatggaatcagagctcaattatctttaaccattgtgatttggggaatagttttggtcctaattgggtgtacatgatgcctttgtcttcagaagtctgatcaatcaggggatgctgcaccacaacccttatactacgttttagtgtttctcaatgtcaagagacttctgtaacagatttcagttctttctgatggctttgaaaaatgctagtaattctctgtctttctaatggagtattttgtgtttgttgtctcctgaggtcagaaaattactttggggaagttgacttttgtgagctgtgagtatggtgtgtgtgtgtgtgtgtgtgtgtgtgtgtgtgtgtgagagagagagagagagagagggagagagagagagagagaaagagagacagacagagagaattaaatctgtattgttagttcttggttagaatagagcttaatggatcttcccatttgtgaaaaccccataactcttcctgtgtaatatcattaaagagcctcctgacagcagtaggtaaggagtagctctggggtgttactttttaatcactttaagcccattttcgtgtgttattacagaaccatccctcttctttatcactgcatcttccaatagcacaccattgctccaggaccagaattcagcaacaattttagtttttctgttgacaa

SEQ ID NO: 127974 - DNA, 1802 bp, Homo sapiens
agacactttgaactgatgacactttgaatcgaattgatgaaaggatgatggggaattgttcagctgaagaggggtgggaagggtcttctacaaaggtcaagaggtcagcataagcacaggtatggccatgggaaatgacttggctgattaggaaataaaaagcaagttggtaaccgagaaatataacatgatcagttgggtcaagaagtgagacgagaatgataacagtgtttatcacttaaattgtcattttagtgttgctattcagtgagggagattttgtcataactcctgggatgctactggcatctagtggttagaggtcaggctgctgataaacatcctgcaatgcacaggatggcccctcacaacaaagaactctctggtccaaagtgtcattagtgccaaggtcgagactcccttcttcggatctttttacatttggattgcatcattcaggtcttaactcaaaagttccttctttagcagcttccttactcaccccctattgtcatataaaaatttgcctctccttctctgtcactctctattacaaaacaatgttttttgtctttataccttttgataccatctaatgttatattatgcatttgtttatttttattatctgtctctcctcttttaaaatataagcaccacaaggtctttgattggttcactgctgtatctctagagcttagaatagtgtgaggcacattggaaaatgcatggaaaagttcaatatatgggtgttctgagtggaagaatgtggtaagttggacatagactctgagttcctggaataatcacagtagttaacattcatttttaccattgatactaggccctgttccaagcattttgcatgtattaactcaatccccaaaacaacctcagggggtaggtatctgattatttccattctacatatgaaccaactgagaaagagagttattttcccaagatgtacatctagcaaggggcagtgttcaagaggtaaattgcccaaggtgatcttgtgtgtttattcacacatgctttttgtggctattagtctgagaatgctatggggagttgggggttaagtgacttgggaattggatttgaggggtttcaaacaatgcatccaaaacatagatggacgggaaatataatgaactaaatgttggtcatatcgcactcaagggacctgtgagccatcaaggtgaaggctaacatgaaaaggattctctcattcaagagaatggtttcagatgaagtgtggaatttgtaatgggaactgaaatcaggagagcagacttgattatttagggacaggttgatgatgggaacagacccagggaacaccctgacatcacaaatatataagggcctataatataatataaaagggtacccataatgaaaatagaaagagcagtagagtcacatttcaagttctgctttgggcacaagcttctatctaaagtctcttttctcccttgtagaactaatcttttctctctctgttctacctacagtattttatattttcaatgtattaagtgacataagagaggtgttagataatagctagtactacgagtgtcacctaagcccgtaaacttccacaggcctacatcttcatctttgttcatatccatgtccctagcgtgaacatccatagctgacatctagtagtctttcaatattaataaatagatgatgttgaatatgtgaattagaaaatgtttattgggagaataaatgtatcatttcattagaaaatttgtttgtaacccacatcaaaagaagaagaagaa

SEQ ID NO: 127975 - DNA, 1154 bp, Homo sapiens
ttcagaatttttaaacaatgttgttcttagttcctcttacttctaaaggacttttaagagtttttttaggtatttcatctttcccaattctctgtctgtgaccaggggtgaattggtaattttacatctttttttcaagcattccaagtagaggaggcaccccctgtgacttccagtggcattctgcagcaattaagtcgcattcattcagctcatcatttaccttgcagccatcaactcctttcaaaatatccctttgattgtcagtaactacggacgtgaagctgtgggtttcttccaggaacaatgctcttctctgtagcctgtgttctcccagttttctgggaagccctgagacttgtcattctcctagcagctcagatgtcattctcctcaaacacccagatttcatttagcaccaacgaggtgctcagtctgggatttctgagggactgtcactggggagaggctgttgctaatgaggtgcaaattggcagcagctggggaggagctgctctccccctctagggctgggccccaggggaggaggggagggttgctctgacattttcagaggaggttggtgaggggccgaaactagagactcctcaccctttagcaaggcctgatgccggctgggggaggcccttgcgtcttgctgagaggctggtctggtctcacacagccccacctccagagttgctgccagctggctaatttcttggctgccttttctggctggctttacttgcaagcaggagaggccatgatcagacacggggttttcccagacattggagagacagctaagaagacccacagcccccagagacactgtccttgggattggtgttctagaaggttatgaggttggggtttggtggtggaagaggggttactgtagcaactgttgaaacaagagagcccatccatctccccccagcatttgcccgcctgttttacatggaagagcctcttatgcattaaactgttcacctgagtgctcccaccagctgcgcttctctgcttctgcaaggtgcagggctctcacagccattttcatctgcaagggtctctgccagagctgtggcagagttttctgtgggatgaatcagaaactatgttctgatgaagagaaaatggagggcagtggg

SEQ ID NO: 127976 - DNA, 1049 bp, Homo sapiens
ctccagcctggtgacagagtgagactctgtctaaaaaaaaaaaaaaaaaaaaaaaaagtttctcccttttaaattggccccctctcaatgcaaagactaaggtgtggcatgtttcttttcctatgcaattgaagcaccgtcctcagtgtctgaagttacacaggaagctgccaagcatgggcttccctgacagcgcacaacctcggggctgcttggttttcatggctgtcttcattagcttgggctgctgtaacaaagtcccatagactgggcggcttctaaacaacagacatttctttctcatcattctggaggttggaagtctgagatcagggcaccaacatggtcaggttctggggaggaccctctttggggctgcagacagctctcttctcatggtgtcctcacagggtggaggtagtgaggctcctgggggtctctttctagaggggcactcatcccattcattagcgccccacccttgtgactgaatcacccccagtggccccaccttctagaaccatcacattgggggtgataatttcaacatgtgacttttgggaggacataaacaccagcctaccctgctttttctcacaatattccaggaagccacagacatcactcctcttgtccttcccagtggcctctgaaggccattcccagaggcagcaaaggcaatccatgcacttccaagctttttgtaagtgcagctcagagaaggaaaaagcttttcttggttcaaatactgaccgcaacgattaacttacctccctacctgtgaatattaatcattataagttactgattttgccaaatgcttacactgtgtcaagagctgctaaatattttacatttgggatttcactggaccgtcaattaagtagggactattattatttccattttacagagaaggacattgaggcttagagtttaagcagcttgcctgcaagtcacatagctgagtggcagagttaagatctgtgcccatatttgcatattgcttattacttccctattgcagcttttcttgtcctcttttcacc

SEQ ID NO: 127977 - DNA, 1956 bp, Homo sapiens
ctcagagggtttctggaaaaggggtcagtgaaaacattcttgtaaccctactctttctgagttagtgttcccttcccaaaaaccatataaagtattaagcctgtcacaccatgtgctgttatgtaagcaaacgcagatgacagaggtgtgtgggtttgggagggtgtgttttatttatgggggcaggtgtgtgaataattgggatccccatagacatcgcctggcctggaggccacagtcactagggcatgtgctctgtgtctaagtgttgacttctgatgactcctaaaacgccttcctggtgaggttgttgcttctgcgttcctcccatgcattttgttcgctgtgcgctgagggagttccccacctgagttgttctcttagttactcacacagatcaggtccaaatggatctttctttttatactttggtttctaaaaatagacagatggtggggagggggtagctctagggaggtatgctaggacactggcagttctacttcctagttatgatggcccgtctggcccctgggggaacagggactacattcagcctaatttaggagctgtgagttggaagggggtggtgattacatgaagcacagtgtaggctgctcctggcttattggtattcatcagagtcctcactgggtaggaagacaaagccagagtttgcaagggaaatcatttcagcttgcctcttgtcaggggtcattctctgagcctccttttttaaaatgtatgttgtgtggggttttggctttctgagttgcatgctcacacatgcacgtgtaagtgtgtacacacacaagcatagacatggacacagacgcagcatgtttctatagaagaataataacattgcgtctgctttacaatccttacatagaggtggattctacttcgtgaacatcatttccttttaaataaagctttacagtctccaattcctgcatcagtgtcacctcaggtgtctggttaaaagtgctcaccaccctagacttgcagaatcaaactgtctgtgggtgagaatttttaacacgctcctcaggcgatgtttatgcagactaatatatggggattgccaccctattttgcccccaagactaaacaattgatctttgaactcataaaccctccccatccaaaccaggccagtcagtctcaaagtcagaggaaagatggtgaaaaggaggtgcttccatctggagcatgtttgtgcctgggtaacaggaaattgtctccattttgatcactgttacttatttgttttggagtaatggtgaatggcctgcccactcgtcatggcggccattggtgctggactcctgcagcagggctggctgttttactgtgggatggatgaagggtgtgtaaaaaaagagcaggtttgtcaggagctgagggtcggctccttggtggggaccacaccacctcccttctgggggcacctgaggacagtgtctggtgggagcttatggagaggaggcaggaagacctcacagaatggagtctgagtgaaaggactgagttagggtatggagcatggctgcttgcgtgagggggatcatttgaggtggaggagtggagatttgcaggtaggcaaaaaatatcttttgaagaacatgtgtatttttggaatgaaacttgacaggcaaaaagaagggggctttgggagagagggtgtgtgtgtgtgtgtgtgtgtgtgtgtgtgtgtgtgtgtaggggggtctcatctgctccttctgttgctaaggaacatataagctagggtttaaaaataaatgaggagtgggtgggcatatgcagtgactcctgtctttttaggaaccagagccctttacaaaaagcctttaaataaccatttctggaggcagattattcattttgcttgacttttactttgttaagtaaaataaactgctttctgtactcctagatttcccctcatta

SEQ ID NO: 127978 - DNA, 1062 bp, Homo sapiens
tcctatccatttaaactgctgaaagcaaaatcattcttgtggccaacctgtccttaatttgctcaaattgggagaacttgtttcattggtactagctgggggtgaagatgtaagcccaggaaaaatctgcttgtccttctagcacctgaatgctattcgggggtagactgtggtgagaagcaagttatctgcgaaagcccacagcattctgtgaacaaatgatttgatgatgttttccagtgaacttatgtggctgtctaacattgttacatcacagcacacattttccgagaatccttgagacccaagagaaagcatctgctcataaaatctttccactttgccatatgcactgggtttgggggtgggggatgaggatgaggaggagcttcaactctttacaccactcacagggaactcttcccgggtgctctaactcaggagggtgtgttgtcagatccttttctatgccttgcagtgttcagaatttgcaaagaattttaccatctgctctgtgtgctgatgtcacacagagcagagtatataagactgttcttatccctcaaactttgccttttaaggagaggcacagttgtcccattttagggataaaacgtctcctttttttttttctgctcttgctctcttgtctttttcctggagaaaggctagaatctgtttcaaaggatggttttaaagacccttgactctgggcttgagggtccagttgagcaggcatctttgttctttcatatgttggcttcgtttcctgactctggaggtgctgtgagcgtttaagaaccacaggcttgagctgcaggtggctgtttgcctctctgccttaaacagagccgttcttgtttttcctctcctttctctctctctcttctaacctgcctgtgaatgcctgttactctgtgttggcatttccagtcacagcccccacctctggcctttctctctctcttctaacctgcctgtgaatgcctgttactctctgttggcatttccagtcacagcccccacctctggccactccttctgttgttctctgctggtcat

SEQ ID NO: 127979 - DNA, 1050 bp, Homo sapiens
gatttctagatgaaaagatcttttatctgagctatggagagtggaagaggacagggccgggagagtagatgaggaagtctttttcatctttcttcagtttttctctgggagactctgggaacagagctgaagtggtgcgaaagcaccttcacacttcctttgctgaggtgatccgctaattgcatgctatcaggaaatgtgtaagatgggagtgagatggtttcccagggggcccttcttcctgtgctccatcaagaaatacattttcacttgctggtgtctgagcagtgcctgtgtggctgctagagaatccttctggcttttctaagtgaatgcacctctctaagctgcaagctttctggatggccccaccctggtctcatccctgagaaatcttgtcattttttcccactggtatagttttcttctgcatgagtgatgcacatacactgcccggcccattagttgtaggcgtttgtggctcagtttgctccatttatttcttattttgttctcaggcatctttagggctgtgagctacagcttttctccttgagcatggatttgtagaatcataggagcttagacttgagatacaccttagatatcattgtattgaactgctaatcaccttattttacagaaggagaaactgaggcctggtggggttaaagtcatcttaacatttagaggtagaatggggacgagaacttggtcacttaacttttgaactggtccttactttggtttctcttgctgctatacctcttgctccttcaaggaccttgccccagcaagagccaactttagacttggacacaagggcccttgatttggactcagtgttttagagggccctgtgctggctctccttcagccatgtccccctccatgggatgtgtagttggcaggaccaaggggatgcatccatctggagctctcaccctagccctctagaacttactccagtacctaggatcctggaattccctgtccaaaggtcttagctcatttccagggcctatgtggacttctaccccaaatctgttc

SEQ ID NO: 127980 - DNA, 1063 bp, Homo sapiens
cctcatgaggtctaatgaagctctctctgccttgcgtatgcagattctccggcatacatcctgctcttctcacttctgtgccttcactcatgccatcacttcccttttcattcatactttttatttatttattttttgtgtgtgaaacagggtcttactctgttgctcaggctggagtgtagtagtgccatcatggctcatggcaacctcaacctcatgggttcaagcgattctcccacctcagcctcccaagtagcggggactgcagacatgcaccaccacgcccagctaaattttgtattttttgtagagatagggtttcaccatgttgcccaggctggtctgaaactcctgagctcaagtgatcctcccatcttggcctcccaaagtgttaggattaaaggcatgtgccacctcacccggtcccattcatactttcagtacaaatttcaaagtacagttcactactgtggtcaacaaataagaaattggcttatacagttgtcaccgaaaaggtatatttgctacggtatataaatgtgaggatgtttacatatgagcacttctcatgaaaatatcgtctgtcttcattccattagaaactaactcaggatttggtttgtaacaatgtaatcagggctggccctttatttgcctttattatcaataaagaaaggattaaattttaaaagttaataatacttagtgaaataatacttagtaaataatacttatttacttagtaaaagttaatacttagaatccatattgagacactatgtctttgcactgagtgacagacagtagtgcctttcagctttatgtactgcttcaaagtaattgctttcgtttgtataacaccagttattactatcaaatgcatcttactcttttaatttatgctgtgatgtggttcagaagtgtcatcaccataacaatgaatcccatagtggcttctgaatccagggttattggaggagaaatgtttcaagaatgaagttaaggacagcccttcctcattatcctggataaactgagataaggaaattcaatatccttgact

SEQ ID NO: 127981 - DNA, 1055 bp, Homo sapiens
gaagcctcgacttcctggtttaagcaatcctcctgcctcagcctcccaagtagctgggaccacagatgctcaccactgcacctagctagttaaaaatttttttttgtagagacagagtcttgcattgtagcccaggttggtgttgaactcatgggctcaagcaattctcttgccttggcatcccaaagtgctgggattacttgcgtgagccactgtgcccggctgcttctttctttcatgtttttaaatgtgcttatttatctatttttgaatagataatacatttacatgatttgacaaccaaaaagagtagctcattacatattcaaaatcctccctcctattctattccccatcaacccaggtttcttcctgcctttctcaggaagccaagtttctttcttttctatggattccttccagagtttctttaggcatactcacatgcaagcgaatacaagtatagattctttctttgctgttcatatctatcaatcttttccctcacatatttcattttcttttattctactttcaatcatccttcactgagcttttttggggagaaagactagtggtcgcttgttttgcttatgcctgatgccctgaacaagttcacatgtgtgcttgtcttttttcctgcagatgaggtggaaagtgagaaatggtacctgtctacagacttcccttcaacatccatcaagacagagccagttacagacgaaccacccccaggactcgttccgtctgtcactctgaccatcacagccatctccaccccgttggaaaaggaggaacctcctctggaaatgaacactggggtatgctcaattttcgtctgtttaaacaggttggattaaaagatacagatagatcctcattctccaataaggtgtttaatctttttggagttagtggctgtgtacatttaaggacatgcaacttcatatgtgtgtatatacatatgtatacatttaataagggtatgttgatttggtgccaacttcctttaaagccattgttcggaaaaaattagtagctaagctgatttcatt

SEQ ID NO: 127982 - DNA, 1032 bp, Homo sapiens
gccatcatgggaggaagcccggcctgatctttccttttgagaaagaggcccaagtgtccaggggtcccagcccagcacactcccagccagccttcccactaatgtgctgtgtcagggaacacagatgaaatcagctcacccacccagcccaacccacggaggagggagaagtaatatattaatattatggttaccttcagccactaaacattggggtggtttgctacacagcacgagctaactggacattgtgtgtgtagaagggacttcatatcgagcagtggatgaggtatttggtatgtgcgtagggtatctgtcacattatggttaagagaaactgagttcttcctcctttgtttcttgtagcacttctcagaacttctggatgagttttcccagaacgtcttgggtcagctcctgaatgatcctttcctctcagagaagagtgtgtcaatggaggtggaaccttccccgacgtccccggcgcctctcatccaggctgagcacagctactccctgtgcgaggagcctcgggcccagtcgcccttcacccacattaccaccagtgacagcttcaatgacggtaaactcagaggaggaggaagacctggaccttagcgcctttggttctgagctcttgagggtgtggagtgtgtattatattaaagagggtgtcagcacccttattagtgagatacctacagtgtgtacggccttgtgcttgggctgtggggaaaagcaaagaggcccaggacccatttctctacactgcccaggttcccttggaacttgctataactgaaggatggtcattactctctttcaccctatggcttcagcagcagagcagccttttgcaaatcaggccggcctatctggctggtcattcctaccagtacagtaagtctcttgtttcaaggggtcatgccatttttttttttttttctgagaaagaactattcctctatagaagcttcttgggcatcctctcaacccaattccatcatgttctattgaccccatgtcccccac

SEQ ID NO: 127983 - DNA, 1370 bp, Homo sapiens
attgaatatggaaggtgctattattattaaattttcttcgcattatttttattcctgttggtacttgttggatactcttgggccatggaaggacaggccctactaggctagaggctaatttgggttcagaaagaatgaagaagtgcattttgggggtatttgcagctatatgtgtaaataagccaagaagtaggcagattgaatttttatgtgctagctaattctgaatcttgcagctctcctttgttatcaggagccacttgtggggtgtttctcccttcatctcattaactgatttatttgtattgtgggcagatgctcttaaaatgaaacagtggattttttttccacatcaaattctaataactgctataggccattcaggattggcatgcatttgggaaagtggatcattacttgttttaatgatgaaaaattatgtagtttaaaaggaattagtatggtgcatgacccttgaagcaaatatcatatgtaaaaattcatttttacttaatatatacattaggaattagtttttaaaaataaaccatttctggccaggggcagtggctcacacctgtaatcccagcactttgggaagccgaggcgggtggatcacaagatcaggagttcgagaccagcctgaccaacatggtgaaaccccgtctctactaaaaatacaaaaattagctgggcgtggtggcgggaacctgtaatcccagctactcaggagactgaggcaagagaatcgcttgaacccaggaggtggaggttgcagtgagccgagatcgcaccactgtaccccagcctgggcgacagagtgagactctgtctcaaaaaacaaacaaacaaacaaaaaacccatttctgaaagcagtttgaggttcagagcaaaatcgaacagaaggtagaaagatttcccatatgtcctctgccccacacattcatagcctccgccactgtcaacatctaccatcatattggtagacatgatggtagatacattgacacattgttatcactcaaagtccatagttcacattagggttcactcttgtgtcgtacattctatagatttggacaaatgtataaagacgtgtctccaccattatagtatccgtgtcagagttccactgccctaaaaatcatctgtggtccacctatttattcctccttctcccagggtgactccttttacaaaatattgaatataccctaccaatggatttataataggtttcctttaaatatcatctctcaatgcctttattgcttaatctatttcacatacttcatttacaaaaaaaaaaggttcatctggatactaccaagcaaggtgtacatatatttatttatttaatttttttttt

SEQ ID NO: 127984 - DNA, 1070 bp, Homo sapiens
cagaaacagagcaggaggacttggtggggtagctgcagagtggcagagcccgaggctccaggctagtgagggagccaactcaaatgaaggtcgggccggaggaggcctggcacagttataaacctcctgtaaagacagggcaggggaaggaagtggatgtggaggtggatattctagacgtgacaccagccaagccaggctgtgactggtcttcagttaagaaatgtgtcttatataaatgtgtctactttgagcatttcaaaaattcttcttcctccctcccctcagttttcctgtaaaagtttctttaaaaaactcaacttggtcttggctagaccatcaggaataaagagatttatctaaacttaggccagggcagaacaactaacctgtgatctgggagcccaggtatgaagtcacaggcgccatcttagtctgacttccttttctaaaggagtgagccaaggggggcaaatggcgggatcaagacacaggtgtggagaggctcaggggagccccggagggcacaggccaggactacacccccagtttgaggctgactgaaagtgtcacaggttctccagctctcctgtttctcttcaggattcatttttcctcctcaagaatgtcttcagatagtagacccagagaagcgagggtgtaggtgagggagtggacagagatgtagccagttagtgggtatattagttttctcttgctacgggtgttgagcgggtgtggctgccataacaaaataccacagctgggtgcagaaatgtatgtctcgtgattctggaggttgggaagtctgagatcagggtgccagcatggttggtttctggtgagggctctcttcctggcttgtaaacagccaccttcttgctgtgtccttagtgggtagagtggagggaagagagagagcgagagagagagagagcgctagggcttcaacatttggatttcggtgggactcagttcagtctatggattgaactatatatatatatataactatatatatataactatatatataactatatatatataactatatatataactatata

SEQ ID NO: 127985 - DNA, 1606 bp, Homo sapiens
gggtaggtagggtggctgtcaaacactgagcaagacagacagtccctgtatattctagtgcaaaggcgggaaagcaggggccagatcataaaaactggaacagataaatcagtaagctaatttcacagactggcaaatgcagtgaagatgacaaaatgggacctgtggctaccgtaggggtcatggacactgtttctctaaggtgacatttgagttgaaaggctgagagcctgagggctgggcggggatatcctctcagccatggggaagttgggaaggaggctgagtatgtggaagagatggttaatagaaatcaaacacaaggagaaccttcaaagtcagatgataaatcaggtccatactaggaagatcttttccaagtttcccagaaaagtaaatcaaacctcaccaggcctctagatggttttaattacctttttgtagggctgctgaacagggtattagtcatatacttgacaataaggacttgtggatttttctcagagatattaatggatgggagtaaatttgcatttgaaattttatttttaaattacgaaaataacatattaccaaagttagagaaataagaaaagaaaaactcttatgttcccactatcctaccagccctattgtctattttgtatatttcttgaagactaggtctcactctgtcacccaggttatagtgcagtggcgtgatcctgactcactagagcctccacctcctgggcttaagcgatcctcccacctcagcctcctaagtagctgggactgcagctgtgcaccaccacgcccagctaattaaaacattttttttggtagagacagagtctccctatgttgcccagactggtctcgtctcgaactcctgggttcaagcagtccttctgcctcacctcccagagtgcaggggttacaggcatgagccaccatgtctggcctgttttgtgtgtttcttacagtctttttcatgtatatgattttagatagttaatacattgccctttgaatgcatgacagacatttcgccaataattccttgagcttatataccatacttatacatttcaataagtacaatcaattcttgttatttgcagtggttatggtctcttaagtcactgtgaacactgaactagcaaatactaaccctttgctgctaagggaaatagaggattaggttcttgcgggtgtctgattacatttttatcactaatcagtatataaccttgttttatgtgtgcttctgtttaaagacaccatacttaatgtatcaatatattgttggtttattaacattgagctacagccaagagtgctatcacccatacctgaacaaagcttatcgaacacgtggatttttttctgtgaggcatatcacagccgtcttgtacttaggacactagatagcacttcagcactgtgcttgggaggtgttttagacagcaacgtcaccaacaaaaagcacaaagatatgaaaaacatggcactaaatagaccatgaaaaggaacctgcgtaatagcctgagagctacagcaagaaggcagagtgtgccctttttcagccttagctgggcacgtgcatgtcagtgactcaaatttt

SEQ ID NO: 127986 - DNA, 1035 bp, Homo sapiens
gtccagggcaacatcagctgtggaggacaaggaagggatggggtgtgccaaaatggggtagaaacgacgctgtgttgtattggaaagaaaatagactttaaagtcagaaagaaaggtgaaaatagcaagcttttactgactggctgtgtgatcttgggaaggttatttaactccctaagtcttgtgtgcttcaaccacaaatgggaagagtataacctaccttgcagcattgtgttgaggattagggataatgcgtattaaagcagagatcctggcacacggtggtgctcagtcaacagtggctgttaggtatttacatggtgtcccaggaagtggatggggcatcacagtgaggggaggtgatggttggaagttcatgcaggtggccaacatgaggctgagctgccagtggttagaaggatcttaggaatgcagtgcagggcaggcttcctgttcctgggagggaaacttgtgagtcagtttccagcgatcgggagcaggggccacaggaacactccagttcagagacatggggcttggtgtctgggagagaatcgaagagccagaaccaaactgtctgatcaggttcaaatcaatagcaagggcacttgcggctgagtcatccggagtatctcttgttttgggttagcattagggagaagctagggttgggggagtgactgtgggaggagggctgggactcaagctaagcctagtgtttgttctccttttacatccgctagtagtgtggtgaccatgataacattccagaggctcttttcttcctgagtccttggcccaaagttaggtaaattgtctctaggtagataatgatgtcccgataatgagctcagagtccaaactgctaggctgatggagattcactcaccttttgccttggtctgctcaggccaccttaacaaagtaccatagactgggtggcttaaacagcagacgtttatttcttacagctctggagactgaaagtctgagatcagtgtgccagcatagttgagctctggtgagcgcccgctt

SEQ ID NO: 127987 - DNA, 1259 bp, Homo sapiens
tcctagtttgcctttcccaactcctccctctcagttgaaatcctgaggaccttcagcctatagctctagcagctttggagcctgtatggagaaatcccatgtcatgtattttaggagcctgggccactggttggggaagtctgaaagtaggcctgatttttacaggtgtctgcaatgcttggggtaagccctgggcaccagcaagtcttctcttcccctttctctggttgtgtttgtctaggcctggggttgccccccaccagtttggaacctttttaactgagcctgtggtcacttgcataactcagcctgggtgaccactctcctgagctgccccaggccaggcgaacccactggaacaatgaagctcctgctctgcccatccccacggtctagagcaaagagtctcagtcttggctgcacatcacacttacctgggagcttaaacaactttgatgcctgggtcccagcccaagagattctgatttaattggttctgggatgaggcctgggcatcaggcattttaaaagctctcccagtgcttccaaagtgaaaccgaggtgagaactactggcttggagtatgactactcaaagcatggtccatggtctggcaacattcatctcctgggagtttgtcacaaattcagaatctcaggccctactctagactttctgaattataatctgaagatccccagatgatccatgtgcatgtaaaatttgagaactgctggctagaatattctgctgcctcctgtgaggctgattggactcacccatcatccgcatgcaccaggtactgatgccagatcaagctagatggagcccaagaaactgatgtggcctcccctggatcccttcttggggatctgttctacatctgagtcaggctccctgctgtctccatttctgactgatcccttttatacctgtccactcagaagtcccagcatgtctcaaggccagagattgaaagagccaggcagtgttctttgttgttgttgttgttgttgttgttgttgttgttgtttttgagacggagtctcgatctgttgcccaggctggagtgcagtggcacgatctcggctcactgcaagctccgcctctcgggttcacgccattctcctgcctcagcctcccgagtagctgggactacaggcgcccaccaccacgcccggctaatttttttgtatttttagtagaggtggggtttcaccatgttagccaggatggtctcgatctcctgacctcgtgat

SEQ ID NO: 127988 - DNA, 1006 bp, Homo sapiens
ggtaatttataaaggaaagaggtttaattgactcacagttccacgtggctggggaggcctcacaatcttggtggaaggtgaaaggcacatcttacatggtggcaagcaagagagagcttgtgcaagggaacttctctttataaaaccatcagatcttgtgagacttattcactatcacgagaacgatacaggaaagacccacccccatgattcaatgacttcccactgcgtccctcccatgacacatgggaactgcgggagctaaattcaagatgagatttgggtggggacacagccaaatcacatcagcagggaacacaattcaaccccatagcactgggggttcactagagtttcataaggttcccaaggactcatggcggtgaccagagcagtgtgttttctactgaaagaaacctgtgggagttgaaaacctacagactgaaggttcttaagctgagtttatggcctcaagagggtctgggaacttctggaaatgctctttagggcattgtatgtgcagtgcatatgtgtgtctttcatcacattttcaaaaggtttgctgacctaacagtggtaaaagctaatgtcccagagactgtacctctaaagtagaagctgagaaggaacaggtctgtgcacactggtgtccaccaccagcataccccccacctcattgtgcagccccatccccctggagcattccagagaagctctgctccctcttgctgctgggcactaattagaccctgactgctggcaggtgagcttactgcccaagaactaaagagagagagctcttcccccaaaagctgccctgtgcctctgtactcgaaacctaaccctttgttgacttcttttactttttatttttggagcaaactctatttttggagaatacatgaaacgagtggctgtcttacatcataaaccagaaaaaccactgtgcttattaaaggcatttcggagtattctcaagattcggactcaaagcagacaatagtag

SEQ ID NO: 127989 - DNA, 1032 bp, Homo sapiens
ccagtgggagtggagttgatggcatggtggaaagggtgggctttcaaggcaggccattttgatgttgagggacacaggctctctggtgaccttgggtacattacttcacctatttggatttcagtttctttgcatgtcactgcctgatccataatagaagtacttttccaacctatcccctaagtcaaatgtcttctctttgagaacaaggtgtcccaaccttaggagtctgacatcattcagaaagtggagagagcctgtcattattctctctcatgcatctttatttcctctcctctccagctcctacattgtgctgtaaacacaggcctctgccttgaacacatgtttgccagatgctccctcttactcatttcttttctcttgtttactgccaggttttctcaagtgcgtggtcaccagccatggcctccatttccttagtctctaccctgtatcctctgcccgctgggtcctactgctcaacctctccctggctgctaaatccaatagtcttttctctgtccttacctgcagggcctcatgggactatttggcaatactgaccacaggattgtctcataactcgtttttgctttggcttccatgacactctggcaagcttagttcttcctccttttctggcttccataccagctgttaaatgtgagtgttttggtacttggccttctcttctctctgtatgttcccctgggctctgctataaacttcagtgcatctggttctcagttttttatacttgttatttgtcttttgacgaaaagcagatctttggagtttgactcaagcctgctaggtccacctgagcagcagaacagctctggctgggtaacccttgaattttcatgtgtttcttgatgtgtttcaaagaagagctgggatgttgatccttcttatcgctgcacccatttatctcagggcatgttgagtgactcagctctcttgcagtgtaaacccaagaggagctcatgggtcattcctgggattcagctgcttctacagtccgtgtca

SEQ ID NO: 127990 - DNA, 1104 bp, Homo sapiens
gcacctttcaacattctcgccccttttgtgttcccctcctttcttagacatcaagtgttcactgtaatgttctctttccaatttcatcccttcaaattttgctgtcaggaaagatttgataagctttcactagaaattttagtgttagtaagatttaacatgttaaccctaaatgggcatttatatttaacaataattacttcaggtcaaaagggtgaatctccacttggagaacctagggcgatagccaggtagtagtgggcgaatatttggggaatgggagaggaaccctcactgccctccattatttcataatgtggctcttattcataaggcagccttgtttatgtgttgctaatttgtctatgatctagaggatttcccttggcttagcaaaaaatctttgacggattattttactgtctctgaaattgttctcatgatagtaacattggttgggaggtggtagacataggcacagtcctgaaagatgagagggcagtacagagttttatatttgccctccttctcgaatgatccctgagttacagtgttcatgggaaacaggggtctctgatgtgacattgcttttgcaggagttataagatatagcatctagattaataattgaattaattacagtgcttgcagctagaagtaactgaaaatggattcagatcggctcatacagtaagtaaattatctcatgttgcaagaggttgtgaaatagagcccctggccgggcgcggtggctgacgcctgtaatcccagcactttggggggccaaggcaggtggatcacaaggtcaggagttcaagagcagcctggccgagatggtgaaaccctgtctctactaaaaatacaaaaattagctgggcgtggtggcgggcgcctgtaatcccagctactcgggaggctgaggcaggagaatcccttgaacctggggggtggaggttgcagtgagccaagatcatgccactgcactccagccttggtgacagagtgagattctgtctcaaaaaaaaaaaaaaaaaaagaaagaaaagaaaaaaaaagaaatagagctccttgttggctgattcagcagttcctcaatggaccttg

SEQ ID NO: 127991 - DNA, 1034 bp, Homo sapiens
tgtgtgtgtgtgtgttgaaagggctcctctacgttagggagaaaggcggctttatttgctttcttaaactgtacgaccaagaagtctccttcctccctcttcggaggaaaaaccagcagaggagtatggaaaatctgagacagttgcatatttaagaaaggctctggggaaggtgggacagctcaccagttgcttgttcagtcttatactaatgcctcagagatctcttgggggattaagctgtcccagagcacgcacatttcttttaaagtttttaatgtcaagtttttggtattaagtttgcaaaatgaaattttgttttcaatagccagcactgatcataggactttatgcaagatctctttgtttgattcttatccatgcagacgtttgtaatgggggtggggctggggtgaggggggacactaatgagaaaaccactggaggcttggctgcttccccttcacgcttttttaatggggtcagtaccaagatatttgaaactttcgcaaaatggcctgcaggctccacctctttggcctttgactctggctgacgttattttgagacaaggaatgagggcctccctgctgattcccaccgaagtatttgtggtggctgagagtggcttgtttaaaaaaaatgcagagtgcagggctgagagggagtggtagttcatgctggggcaaaagccagatgttcagtgtgatcttctgggctttgcttgctgagcttgtcatggggacactatgtgggcagcacggaggttggggtaccagatgtgcttcctgtcctcagtaaagaacttggagtatgttgttcctcaaatatcttttgatgaatgggtgctccaggagtttctactgacaggctacattttatccatatgcagaggggcagcccttctcttttgttcttgaagtattctttcgctgtgacagtgtctcatccagcagctgcaatgccacagctagggggttgtctttcagctggtgggatgaattacgcacaggcatctaccttgctgttctttg

SEQ ID NO: 127992 - DNA, 1539 bp, Homo sapiens
ggctcgtcgccgttcgccacccaaggtgagaaccggccgcggccgctggggagcccggggagagggccaggagggggcgggcgcccttgtgcggcgcgacccgctgtcatgtcgccgccgcccggggtgcgcggcgggggaggggcgagcaggagggtctgtgctggcgacggtgacatggagggcccgcgctctgcggcgtgtcgcgctcggccagcaacttccccgggcgctgtggacttgaccgcgccgccgccgccgccgctgctccgcattctcaacagccgggcggcccctgccactcgcacttttgcagacctctgtcggagtctcctgcagccggaatctcgggttctttgccggctgcagccagttaactgctacccgcccgctgcctccacaaagctttgtccaggtccatatgatcctgatcatctcgtctatactcacgttatttgagctgcaggggagaagggagggatgaagatgaagtgatggtgactttctttgatgattgattgcagatcggatgtcatttatttcttatcttgcatgtttggggctctttaccttaatgagttcccagttctcttccctctcctctgctggggacaaaggaaccaagagacgttgttttgttgtgtgtctctttcaaaggttttattttgagacggcgaagagaaataatacaaagtgatttgggttttctggtattttatagataaagctggaagttactgttctctttgtggtgtttattactgtaaaattagacttttgacaggtgttccattgctaactttgacaggtttgaaacatttaaagtaagtttgagtacagtttcgggtagaacacttggcggtttttaaattttattattgcaaatatttgagcacctcctttttaaaaatacagtgtaactggaaaagcatttttaatactttttagaggaaatagttgatttagtttgaaataaaatgctaattaagtaattatgctaggtcaaggggcgtatgaaatggatacttcaaatagattgtgggctgagactcatttatttgactgcatgttaggagcagtatccacttgtaggagacagttttccgtgggtctccgtttcttcactcttgccagcacccttgccagcgagatactgactgccctttgtttctattttttcacggatattatctaaagagcagccttggaagatagagatagtgtcttccaccagagcaaaaggcggggatacatattatccagtataataagaataacgtctccctctggagcgaaagggtaggcatgcttactgcccatcttaaaagattagggttccctaagcttagggttcctctcctgtagagaaggaactgcctgtgtagatgtcaactggctctctttacgttgtccaatgggaacctggagttctgagaactagtgcaaaaatcttttttttttttttttttttgagacggagtctcgctctgtcgcccaggctggagtgcagtggcgcgatctcggctcactgcaagctcc

SEQ ID NO: 127993 - DNA, 1027 bp, Homo sapiens
gctggatttaggattctggttaggcaatttttgcacttggaagacagccttctactgtcttctgacttacattgtagctgacaaaagtaggctaacaggcctacttttgtcttttttcatgataattcatccttttttctttgtatttaaggcttctctttgtctttgatttctgcagttttaggatggtatatttattttctttatcttttttttatagggatgggatcttattgttttgcccaggctggtctcaaactcctggcctcaagcaatcctcctgcttcagcctcccaaaatgttgggattacaggtgtgagccaccatgtccagtctagtgtgatgtatttagatgttagtttctttttattctacttgagagtcattgaacttgggaaacttgtaggctctgttacttcacttctacgaaattcttgcccattttattttctctcagtccatccttttgagactctgattaaatacttgttatataatcgatatgtatatgtctgtttctggactctattctgtttcattgtttgtatttctctcctttctcaaataccactctgattactgtagctctatccatagtaaatcttgaaatcaagtagcataagtcctccaaatttggtattttttgaattgttattgctattctctgtcttttgcattttcattaaattttaggatcagtttgttagttactacaaaatgatcccctgctgggattttaattgggattgcattgaatctttagatcagtttggagacatggaatctcaactgtgttgagtctaccaatctaataatgtttttaatgtctctatttaggtcttctttaatcttcattttgtggtttttactatacatgtcctgcatatctttggttaatattacccctatttcatgtagctttttttgggaatgctttaggattttttgcatatacaatcacatcacctgtgaatatagttttacttcttcctttccaatctggatttatttattttttattgtgtct

SEQ ID NO: 127994 - DNA, 1116 bp, Homo sapiens
tctctactaaaaatacaaaaaattagccggctgtggtggcacgttgcctgtagtcccagctacttgggaggctgaggcaggagaatcacttgaaccagggaggcagaggttgcagtgagctgagatcatgtcactacactccagcctgggagacagggcaagactccgtctcaaaaaaaaaaaccagtagcaacaacaacaaaaaaccgtcatgcagctcatgattgtatttactgtgtaatatgtagtgctttgtttttctagtactgaaaaaaaaggtacatctggggcttgggaatgaagttctggtagagatgtaaatttaggatttactaacatttggtttcaatttgttccttattaggtagaggtatatccatgactcagaatttatttgtagccttagaggtcatactttgagggagtcaatatagatgagattgtgctggtcctcatctacctgattcagaaagagccagctattgtcatctgattttagctggacggtacagggcttactgcccaggtttaccaggtaccagcctaggctagacctgttctgtgcatttactcatgtgaaattgttacaacaatcctgcctcagagttgttctaatggaagtggaatattgagcacactaactagaacacagcaagttctcaataggttaagtatcatgatgattatcatgtattactcttttatagaagatgaaaaagaggctcaaaaagattgattaggagttacagagcaatcaatgaagagggctaatctaggtcttgaacagttttaaagtccatgctatatctccatttaaatacttacattgtagagtgtgcacatgacatgtcattagtggttatgtgaccacgggccagtcgtagcacccagtttcctcatctgtaaattgggggtaacacttaatgttttataaagaatgtctagagttcttagctgtgtgaagctggaggcataatgaaaattacgtttactccatcttctctgaaatgcattgtgacatctttccagattttaagtattaattctttgccagtactgtgtgtttagatagatcttccatcttgaggcttgtcttctcattttgttcatggtaat

SEQ ID NO: 127995 - DNA, 1564 bp, Homo sapiens
gatttagatattttaaaatattttaaaatatagcttaatattttcctgcacaatgaccttcacaatcttttaaaatttatttctaagtacttaatatatttttgttgctattgtaaaaaaatttttttttcattaaatgtttgtttgttgtttgtttatacatatgaaattggcctttggattactttgtatttgttcttatgcatttcattaaaaaatatatctgggaaccttattgcagtcttccatagtttaaattatatggcatcaagtttatattagagtttttttttttttttaatactttaagttttagggtacatgtgcacaacgtgcaggtttgttacatatgtatacatgtgccatgttggtgtgctgcacccgttaactggtcatttatattagagttttaacttgtttgttatttttatttattgtttttaccaagcactacgaaagaccattcttttttgttcaaaggaatactatttgcatttgttaaaaggaaatggtgttttacactctgtggagattttaaacaaaaggagcatgtctgtgttctacttccagaaatcctaattttgcagatctagagaaaacctgagctccttgttcttttgaaaatctcccatatggttctgtacgtttctgttggaaaaccactgctagagaagttgctaaacagtaaaagcatttagcccatgatgatgtgggggaagggaggcatttcatttaaaattatgaaaaatttatttatcatttaatatttcatgtgtgatgtatagataaaattagtatatttacatagacaattgtttttaagtgacagcaggtatgaatttaaaaagaatggacattgaaaaagaacaaagtcacagtttgagatgtattggttaagtactcagtatatttgtattaaaacttagaatataattttgtttttcccagttggagtcattcgttgcccagtttgcagccaagaatgtgcagagagacacatcatagataacttttttgtgaaggacactactgaggttcccagcagtacagtagaaaagtcaaatcaggtaagtgtattacatcttgaaccttttgcctgccagctcttttttttttttttttttttttttttgagacagagtctcattcattctgttgcccaggcaggagttcacaagtggcgcaatctccgttcactgcaagctcctccccacaggttcacaccattctcctgcctcagcctcccgagtagctgggaccacaggcgtgtcaccatgcccggctagttttttgtatttttagtagagacggggtttcaccatgttagctaggatggtctcaatctcctgacctcttgatccgcccatctcagcctcccaaagtgctgggattacaggcgtgagccaccgcacctggcctctttttttttttttaattgagatggagtcttgcgttgttgcccaggctggagtacagtggtgcgatcttggctcacttccatctcctcctcctgggtttgagtgcttctctcatctcagcctcatgagtagctgggattacaggt

SEQ ID NO: 127996 - DNA, 1884 bp, Homo sapiens
ccacttccagcaaccctcaccaaagccactgaaaaatcctagcttgtcattatacagaaacacttgctccttttctaatttgttctctacattgtagccattgtgacataaaaatgcaaatctggccgtgtcactttcttaaaagcttttaatagacttatttggacaaacaccaaaattgccttgtgactctgcttaatctggcccctgtctcttgtcctagcttcttttgccagtcttcccctgaatcgcaccacttcagtcatacttaccttcgttcagttctttgaacctgcctgctcttcttgcttgggactttttgtacatgctgttctctcttcctagaagtaaaagccttcactgggtaatccctcctcatgctttccccagccttccaaccccactaaaatgagatccatttcttcatcatatgctcttataactttccatagatttcctttatggtaattctcagtttgtaattatatattgatgtgcttattctaataatgtacatctgccgcacatttaatcttcacaactactcagtaatatctgtattattaccctcatattaaagatgagtactctgtgtaacctgcccaagaccactgagctagtaagtgagggaactgggattttaacctgcactatgtacaagactgtagttatcataagggcagcgaccatgtttgcttttcctgactgttctgttctcacacctagcataatgtttgggaaatacctagttgaaatatttgggatgctgaattaaggagaaaatatacttatattcttgtctcttcacagtattttcatttcttatgtgtataatgtaacacacaaggtcagtttaaaatttcccaacaccattaggaggctaactgatttagcctggtacaattggtgtatcatgtacgcatagctcgagataggaccaccttttcattttctcaaaaatttacgtgccatggttcttttgtcaggtatgtacaagctgtgaggacaacgcagaagccaatgggttttgtgtagagtgtgttgaatggctctgcaagacgtgtatcagagctcatcagagggtaaagttcacaaaagaccacactgtcagacagaaagaggaagtatctccaggtaataaatgagatctttgcatttttttccttctatctttccccgtcttttcttccttcctgtattgacttgttttgacacatttgttttgataagtattaaatatactgttttaagtaaaagaggtttatattatcgaaatttaagtacttacaaattttggaaagtacgaatagatgtagaaccctgttttacattcatactgcctgtcctcctgcttctataaatgtcttcaattggtgtgaatatagaacaaatggagaaaaaaattgctttttcttatttttcttttatctctaagataacaacaaagagtgggcttaaatattttataactcttccttttgatattcttgttgtaaacctgcatcatgatatttgtctgatatgtggatagccagagaggcttttttatgtaattattatttccagttttatgtaattattattgtcttgtttttaatgtacagttcactcatatgttttttattttggtaaaatacatgcaacataaaatttgtcattttaactactaaatgtacaattcagtggtatttattacatttacacattgtgcaaccatcactactattttcaaaacttttttatcaccccaatcagcatctttgtaccctttaagtaataactccaattttctggccgggcgcggtggctcacgcctgttatcccagcactttgggaggcagaggcaggtggatcatgagatcaggagatcgagaccatcctggc

SEQ ID NO: 127997 - DNA, 1099 bp, Homo sapiens
gtgctcaagcaagcgatcctctcaactcagcttcctgaatagctgtgactacaagcgtgggccactgtgccaggcttgattttccaaattgcattttcaaaaaatctcctcccatatttgggatagaagacatccaggtggttcatactcatttaccagggctgtcttaagactttttaatgcaataaaacatatttttaactacacacttagttctttcatttactcctgaactaatgttaatttctacttggaaaatgaaaaggttatttactttttttttcctgaaatgctgacaatatgtgatatcttaatatctgtaattcttagtgaaagttatggtatagtataggtgaagctgtagtgtttatatcaatagatgtgaattcaaatgagcaatctaataattatttactattcaattatgttaattttcttctctttgtctcccattgtttctgcagaggcagttggtgtcaccagccagcgaccagtgttttgtccttttcataaaaaggagcagctgaagctgtactgtgagacatgtgacaaactgacatgtcgagactgtcagttgttagaacataaagagcataggtaccagcatctttggttatatatatagattcatatgcagctttagaggactaaaggactgctgccaaccctcatcaaatggcagtctgcaaataggttttgtttggccagcactatgctggcctgtactggggtttgtcacttttgacactattgatgttttgggctaggtaattctttattgttgaggactgatctgtgcattatatggtggtcagcatccttgacctctaccaactagttaccagtagcaaccctctaaccctccccagttgtgacaacaaaatgtggctccagacattggcaacgtcctatggagcaaaatcatcctgagttgagaacactggccaacacactgttttaaaatatatagaactagttgccagcattgtaaaatggggagattttacattttttaaatatctagatttctggcttttttgagaaaacggaagctgttctagccctgggtctgtatacttcatgtcaacatttgaggcat

SEQ ID NO: 127998 - DNA, 1011 bp, Homo sapiens
tcattatactgttgcttaaaagttttattacaaggcataacatcaagaattttgcccttctctgtctgtatttatcctgatttatcttgtggcccctagaacataactacctattatttaaaagtggtcttttaaaatgtttattttcagcaggcttgcataatgtagaaattacaaaatagttaataaatctgattatgtataattgactattttttgccaagtccaccaagtgaaagtgaactctgtaagcttataaaaactgaatgatggatgcatgtggttctcaaactttcaaaatatttatgtgtccataatctttcttgagggataatttgagaggtgagggaaacttgccttattagggatacgtttgatgttttaaaagattattatataaattctttataatcctattttatgtttttatgtctttttttattcttggactttttcctcattgtatatttttatatgaaataatttgcttatttcttcagataccaatttatagaagaagcttttcagaatcagaaagtgatcatagatacactaatcaccaaactgatggaaaaaacaaaatacataaaattcacaggaaatcagatccaaaacaggtaattttatggtattatgtaatcatttttatataatttgttaagtatattcacttttagaacattttccttaagtcacagttaagtaatacgttgttagatgactgcaataacacatgactgataagactttcccagaaacttagttggaaagcattcttttctgctgtaaaatttcaaaactaataataaactacacttagtattttaatagctcatttatctaataggtattgataacttattatcacttattttccaattttaaagaaataccaaaatttaaatgccaaatcaaccatttttttgccagtattgtaaaatattttaacacttgaataaacccttaattgttattttaaggtttgctgaaatttgagatgcctgccttatg

SEQ ID NO: 127999 - DNA, 1284 bp, Homo sapiens
gggtttaaactttttttattctgagtaattgaaaatttgtaatgaatatttattgaatgaatgaagagagataattataggcatttctaccatctagtggcaaaaggtagcaatcataaaataattaattttaaattaaacatctgcccttaatgaaatttatccctttgacttttttcttactgtttcactgagtatatggtttgatttatggtcaaagtttacatttttttttatgtaccgctgtcaattttttccactatcatttgttgaaaaaactttctgttgaattgtttttcagcacctttatagaccatatatatgtgtgggattattctgttccattgtgtttttctcattgctagtacttcactttcatgatcatgatcattgtagttttttatagtaagtcttaacatagtgtttttcaaatttcttcttttatttttataaatgatttgtgctttttttcttctacaaaataataacattgtgtgtaacaattttgatttctgaattgaggcaaaaaattaaacaatctttgttaagtgcaaattgcttacatatctttatagcctatgtgattataaaagggtacatttattagagtaactggtagtcatttttatgcatttgaccccatggcactgtttttcccttactcatcctattctaccatcatgaatatttaaatgacttttttgagattggttgcttctcaggcttatctggttcccttgatcctgtagtaatgttgatgtcaaacaattatctggaagaatttccagcaggaaataaagtctctgccagtttggtcttgagttttggagggtaactatgggagaagcttacagaagaaatgaagcttttaatttaatctcacaaagtttggtggatgctctgttattttctataagatattctggtgtggtaccgtatgtttttctttctgtaagagtgttgctggaatcaggagactggagagaccagtaggtgaaacaggaggattttattgagtgcactcatacccagcggattaatatccaaagaccaggcctagaacaaagactgggcctagaacaaaggctgggcctagaacaaagactggacttggcttttatacacacttctaaaaggggatgggctagtttgaaacaagcttacagtggcgtgaagcatagtggtgtgaaagctcaggtacagaagcagaacaaaggcagttaatcatactttgacaggttcataactcaggcttacaatgactcttgctatgcggcctagatg

SEQ ID NO: 128000 - DNA, 1662 bp, Homo sapiens
tccaaagaaacacttaataaatttttacagaggtcaaaaatagtctactaggcaaattactgtctctctgaacttaaattagatatggcagagccgttggatgttgttagtagtccatcaaacagacaactaccatttcctccttaattcaatgtagctcaagtgtattttccaaatctggaactgactagggctaggatctgggttcgctttttattgagaatgtaagtccatgttgtagtatagcaattttacttgtaaacatttctaatttgtctgagacagcagaaagtcctgttttcctcctttttccttgctaggtctaggatgaggtttttggttaggaacctttaaaataacccaagttcagtgtgctctacttttgattatccatcttctctaaggaaagcacatacatacctcctttagagaaatctatattcttttatgtagcttttgttagagtgcattggcccactcattcagtgcatctgttggctccgatgttaattctcaatagacaaataatatgatgccttttaagaaaattaccacatacaaagggtaagtgtcatctacaacacagcatgactctgttttgcacaaactacttgcaattccaactgttaaatagaatccctaaaaggtgaaatcatatgattgagtaaattatgtgatagagttactttataggtttgctggacagtacatctgttttatttgtgaatgttgaatttcatagacatttactgtactatagctaatctttccttttttgtgtattgtaacatgcatgaacagagttaaatcccagaatatgtaaaacctgatccagggccttgaggagtgaggggccacattgggatgcagttttttgccatagtgaaagtgatcctttatactaatagggaaaacagagtatttttagtttcagtaaattgagtaattagagattgtagttattctaatttgtttacctggaaatgaccatcaaagtctatgttacatgctgatactaattttgaaactattttcttgttttcagagccttgcaaaggaccatcgcatgaaacttatgcaacaacaacaggaagtggctggactctctaaacaattggagcatgtcatgcatttttctaaatgggcagtttccagtggcagcagtacagcattactttatagcaaacgactggtaagataaagtatgctatttaatatactgtaaaaatgcacagtaaaacaatggagccattgtaatgcttaaaatttattctgcttgtgcatcagtgctttttacctatttctaatatctatcaaaatattttggttttaatatttttacctggcataatttgggtgtaatttcagttttaatttatcattaattcctttttttgttctttccaagtattcactgtcttcatagcaattgaagttaatatcaaaaataaggatgatagtgaacattttctgattatctatagtgtgccaggtactaattctaagaatttccatgtaatatttaaacttttacctcattcttatgagatatacctattcaccccccttgtacacatgatgaaactaaggcatgtgattatgtaacatgtctaacatcacacaatatgaggtatagccagggtttataatatgatctcagac

SEQ ID NO: 128001 - DNA, 1102 bp, Homo sapiens
ctacttcccactttcattgtattcctacttgttactgtttagtttgggccttcatcagttcaaatcaattatttgcaacagttttccttctttcttggctgcttttaattagatcttccttgttccagtctacactaccaccagagcatagcttcttaatctttttagggcagtagtccagaatccctcttttgtttattgccttaagtctgaacccattgatctttctgtgtcttccattagttggtttaattttgtttacttggttttcttttttgaactccttttctatcagcccgtaccacctttcgttgtcttctgtagcttccactggcactagggtctcactgagatcttacccctgttactctaacacagaaagacttggcaatgtttggagatgtttttgattgtcacaccccaagctgggaagtatagagagatgccactggtatctaataattggtggaggccagggatgttgctaaacatcctgaaatgcagagacattcctccacaacaaggaattatctggcccaaaagtcaatagtgcagaggctgaaaaaccctgccggtgtaacaggctgtaacagactgctgaaaattcagcaactacttactgtttcatagaatttcatcatggttcccagtttcaatgtagtgctaagtgaacacattcaacaggacttcaatgcataattattcattcgttttatgaatgtatggtttccccctcctcaggacctgttactatgactagtgtacaccccccaatacgttcacctagtgcctccagcgttggaagccgaggaaggtaaactgactaaaccatattttctagtatataaaaatctctaattagatttcttttgccagtgttcaacatgttttgatactcaatatattttgaacaatttcctttatttttaattaaaattttaataactactatatattttaatgaattagttaagggattaacaaaagtacaaatttacctttgaagatagaagaatatttgtcaatatgttgaaaataagaaatgttggatattcatataatagcaaagaaaacataaaaatgaataggcataacacagtac

SEQ ID NO: 128002 - DNA, 1033 bp, Homo sapiens
ataaaattttatgctaatttgatctctaatgactaaatgttgattctactttaaaataaatatacagttattgaaattctatattttaagcaactgctctcctcttccctgcattatgcctgaaaattcctcctagctagtgaacccagttcttactttatcatatggaagaattgtctgagggagaaaagtttgcctttaatcccatgagaacatagtgaatctctgtaaaagctttttgacccactaccttctttaaatagtattgtgtaaatacatgattatttcattgtcttcaccaaagtattcactttgctactgactagagaaggaaatgagaaagcctaaaatcagatgccagttctaagatactaaatctggttgcctaattgtaaagcctcaggtttttaaaagtttaggtttattgaaacatctttctagatatataactatttagataggttaatatgtaaaacatttttatcataaatgaaacttgcatacaccagtttcatttgttatgcatcattaattgctgatgttaacatacttattgttgtgaagatacagtattttagaaagttgttgttatactttttatgaggtatttagcttaacattcttagattgctttttcttctctctcatacttacagctctggctcttccagcaaaccagcaggagctgactctacacacaaagtcccagtggtcatgctggagccaattcgaataaaacaagaaaacagtggaccaccggaaaattatgatttccctgttgttatagtgaagcaagaatcagatgaagaatctaggcctcaaaatgtaattatgaatgcttgcaatgctattcctatgcatggtgggtagggtgagagaatcttttaaatagctcttaggagtttttttttaatgttatatttaaaaggatttaaagacaatttgagggaatctctcagtaaattaaacaaaaagacaaagatggaaaaacaggaaagtttttaaaaatcagaggctcagatatggaggctgg

SEQ ID NO: 128003 - DNA, 1051 bp, Homo sapiens
gtatatatatatatatataggtcatgtggttgacttccactctacccaacccattctctaatttctgtagccatccccagacttagattttttctctatttattttggtattttttagtagaggttcatgtcttctaagccagttagcaataaacatatacccttctcctgaagattcctttgaagcagccaggtgctcaccagagagtggtctacagttcagaattgcattagtgataaaattttttttaaagccagttaaatatattttttttctactacaggccaattatccaagaagcatactcacctccctgctcttaaatagcagtcagagctctacttctgaggagactgtgctaagatcagatgcccctgatagtacaggagatcaacctggacttcaccaggacaattcctcaaatggaaagtctgaatggttggatccttcccagaagtcacctcttcatgttggagagacaaggaaagaggatgaccccaatgaggactggtgtgcagtttgtcaaaacggaggggaactcctctgctgtgaaaagtgccccaaagtattccatctttcttgtcatgtgcccacattgacaaattttccaaggtaagatagtacttcccttcccacattcttttactgtaaacttttgaagattattttaacagaaagcctttgaaaaaacttaaatgaaattccacttggcacaagtgtatactccaaaatcccaatgaatagtctaggttttcccatacccttccgcttattctttgtgcttctttcaaaaaactaatcattcagcctgagcaacacagggagaccctgtctgtctgtacaaaataaaaaattagccgggtatggtagtgcatgcctgtagtcccagctactcaggaggctgaggtgggaggattggttgagcctgagaggtcaaggctgcagtaagctgtgcttgcaccactgcaccccagactgggcaacagagcaagaccctctccctagtcattacaaaaagaaaaaaaaataacaggccctttaaattatcac

SEQ ID NO: 128004 - DNA, 1069 bp, Homo sapiens
atatttaactgtaaataacatttaaagctaccaagtcaacactttgttaccaaaaaaactcctttgctaaattattaagtagaacagtcaatatgaaagttgtcatgcaagaggggacgtgcccattcactgccagtactactcagtggttactgggataaacccataaagcagggaagtatatgaatagcagagcacatggttggaccttcggcatgcagaaaggtgccttaggtctggatgcatattgagaaggtccacctccagttctcctaagagacgtacgttcttcctttatagactattactaatttataatacacagactggagcaataagtgcaaatttattgttagaaaacttcaaatggttttctagtgattgtcttagttcattcaattacagggcctgttcccaaatattgggaaggagagcaaaactccgagaatcagtaatttttttgtattcatctgggttttaatttttagtctgacactttgggacctctgagattgttatttaaaataagctgtgaattcattgttttataatattttatctcagtttttatttatttttgcttagaagtgtgagcgcctacttttatttctttactgccatgaaatgagcctggcttttcaagaccctgttcctctaactgtaagtattaatgtcattttctgcatgtttacacagtggaatgcttttctggaattttatgagaatctagcttatattaccatttttcagtactttttaatatctaaaccttaaatcttaataatacatactgaatgctttgatcctatgtaggtacattttagtaagtggcccaaaacttctgttcatttctcaggtattctttcttctttcttttctcatctattttacttaccactgggatgtttagggtgatttctgttaattttctgtatttcaggagttttaggcatgtttccgaagctgttggaaaaaaaactttgaaataaagacatctctccctgctacattttccgtacttatttttctttataggtccagacttcaagtaaataagtagacgttacca

SEQ ID NO: 128005 - DNA, 2371 bp, Homo sapiens
cgcatgcctgtaaccccagctacgcgagaggctgaggtgagaggatcacttaagcccaggaggcaaagtttgcagtgagccgagattgtgtcactgcactccagcctgggtgacagagcaagaccctgtctcaaaaataataattggttaaacttttggaaaaagtcacacaaacctttaccagtgtgtgtggaaggcagtgggcacttgtaaacactgttaaatgggtttctttactaatggcaaatagcacagagaaaagcaatgagaacattctgaattttagagcacatctcatagaatatatttaggacaaggtggaatttagctatttgtattataacatctcatttttttaataggtgcctgattattacaaaataattaaaaatccaatggatttgtcaaccatcaagaaaagactacaagaagattattccatgtactcaaaacctgaagattttgtagctgattttagattgatctttcaaaactgtgctgaattcaatgaggtgaggctaggggagggaagggggcaggaaggaacagcagtgtgaaaatcattttattactaaacaccttgtcaacataggagaccaagatgtctgagttagaataaatttccaacttttcagatcagggaatgcaagagataattcagataactctgtccacatttatattcaaaggtttattagatggtgatggaaatgcaaattacagctgataactgaaagacaaaatgtttttctctgacctagacatattctttatcattcccacctgtatttcttatttttatgttgatcttgaaatattaaggatgtgggccaaatagctctaatttaaaaatttctcatctgtcagttcatctacacatcagtcagacttagaaccttttgctgctggtggtttgttctctgttactcattctaatagtactacatttaatttgttctaaaaatacctggttcatgatcctatggttatggaatcctaactgatatgtgtttggcaatatagtcctaccattaccaccttcttttagaataatccaggcttttacttttatcttttttccacacttctgaatcttttattttagctggccttctgtacagagactttgtctagtcctaaactattatttcaatgactatgcatgaacacttttcaaaacagctcattaatatatataatctcagaagtcaaaagtgtgtcctttttttactcatttttatttttactccacagcctgattcagaagtagccaatgctggtataaaacttgaaaattattttgaagaacttctaaagaacctctatccagaaaaaaggtttcccaaaccagaattcaggaatgaatcagaagataataaatttagtgatgattcagatgatgactttgtacagccccggaagaaacgcctcaaaagcattgaagaacgccagttgcttaaataatatgcagcaccactagcttgtgctggtttttagatttttttgttttcaaaaaaacatttgtcagtaatttaacatcactacaaaaagaagagtttgtgactattctcatctctgttttggacgtttactagactttgatttccttaatagcccatttctgttaacctcttatcactaagaaagaaaggaaagaaggagatgaatagaagaaagaaaatggaaagaaggaaaaaaggaggatagaaaaaggatggaagaaagaagcattgaaaacaaagacattcttcccacttcttggatttttaaaccacagtctggagtgatagctactgtagaaaggaaatagactttgtatgaactctttaagttgaaaagtaaaaaatatatgtggtttggatgtgtgctttaattcagctttagaaattaataccactacccgtgaattatatggcctgacaatatgaattaggtgtactgtactgaagaacagtactccacaaacatgggtggtaacaagagttccatcccaggaggccaaacggtgcaacagaagggtaggttagatgctattaagaaggcacttaatagtacatcatgtaagatggcaactgtattaaagaaaaatccggaaaacaaatgtttgatttttgtttttgtttttatcttgtctgtagaggtattttggtatagcaggttttcaaggccattttttatacatttctagatctagattttcaacttcttccactgagggaagtatatacatttgggtttgctgtgtgtctatgtgaggtttaattgtacaggtgatccttttacaacaagcctcattgtttgcagtatagcttttagtggaactacccaaaatataaatacagcagcgtgcactgtatttgatgtgagggtt

SEQ ID NO: 128006 - DNA, 2082 bp, Homo sapiens
accacgtaggagctaggatttactcagttccacctcactgacagcttttctaggtgccaagcaactgacttttcctgtgtaaggaagcccaagtacttgaccagtgatatatatggccatggcaaaagtataaatggatggatgtagaccatattcaacgcagaatacattttagatcggtatctggcattgtaatcattttgtcttttgaattaacatgccctgcttgtcttttctgaatggaagggtaggaaagtggaaggtactaaaaaggaaaatgtagttttagtttcttttctaagctaaagaactggctttactactgctatattttactaccacatagtagtgtagatgtagtataacttgcttaggaatgctttcaaaaaggttacctccatagtcaaaaaaagggggagtatacagctgattgttgcatttatgaaactgcatttcaatatgctatgctgttactgtgcttagacacttccttacgtttgagttccaaggagagagagtgagaagaggaactccttttgctgagctctggtccaaattaatgtgaatccccaaagtaaattgctgcatatgaacaacaggttttaggtttaaattgaagatacattcattttatatgtatttgttgtgaatgagagaaattgagtgatctgattggccattaaaattatggtgaatgggtcgggcgcagtggctcacgcctgtaatcccagcactttgggaggccgaggtgggtagatacctgaggtcaggagtttgagaccagcctgaccaacatggtgaaaccccatctctactaaaaataccaaaatcaccagggtgtggtggcccatgcctgtaatcctagctactcgggaggctgaggcaggagaatcggcttgaacccaggaggcagaggttgcagtgagctgagatcgcaccactgtagtccagcctgggtgtcagagcaagactctgtcacaaaaagaaaaattatggggaatggccgggcgcggtggctcacacctgtaatcccagcactttgggaggccgaggtgggtggatcacctgaagtcaggagctcaagaccagcctggccaacatggtgaaaccccacctcaacagaatatacaaaaaaattagctgggtgtggtggcgggtgcctgtaatctcagctactttgggatgctgaggcaggagaatagcttgaacccaggaggtggaggttgcagtgagtcgagattgcaccattgcactccagcctgggcaacaagagcaaaactctgtctcaaaaaaaaaaaaaaatggtgaccatgcgttcaaccatataatttcttactgaaattgagctcctccttttgaataaccatgtacatatttttaaaagtattttatagccctatgtaaattaatagttgatgtctttttataaatgtttattgcatattcatcttgaatgtgaatttactgttgtaattcacatactggtgtcatgtttctgagtgagaataatgctagtcagtcagatcacagatttttctccatgaaggttttacttattgagagggacatctgaggcagtagtcttcgtctttaatttttgggggcagattggtgctttggttttaataaaaactaactttgatggatttttactgtcaatattttaccacaaggattttttaatagaaaaattactgaatgttacttcagcagagttctatctactttgagtctccattactactactgttgttcccctagctgtaacattgatccatataggggcaagctactagtccataaatagctgtaataggaaaacagttttttaaaattctaacacgtgtatttcaccagccttaaaagatttaaaaaaaaatctgacaggaaggaaagcgggtggtaagtatcttggattattctgcctcataccagccactcccaaagtaggaggaccaaagatgccatgaagacttctagttgtctggaagttatttggggaaggggggaaagacacagagtggggacctttggaagtcattttaaaaatttagctatgttaattccacttgtaaagtttga

SEQ ID NO: 128007 - DNA, 1050 bp, Homo sapiens
acctcagcctcctgagtagctgggactataggtgcacgccaccaggtgtggctaattttgtatttttagtagagatggggtttcagcatgttggccaggctggtctcgaactcctgacctcaggtgatccgcccgcctcagcctcccaaagtgctgggattacaggtgtgagccacggcgcctggccattctatcatattcttaattgcaattagtgacgatatagtattggaatgattaaggatatttcaagataccaaagaaaacagaaggtcaaagggacttggggcaagtcagggctggatgcggggtggccttgggactcatgtcggtagagctgtgtcggggtccctcctgctcacagagtgaatggcccttcctttcatggtgtgtcttcacgtcctacagggccttctctctgcatcccaatccctgtgccttaaggaatgtcttcccttctggctgcctaggttcatagccggtgtgatcaacagggagaggatggcttcctttgagcggttactgtggcgaatctgccgaggaaacgtgtacttgaagttcagtgagatggacgcccctctggaggatcctgtgacggtgggaaccttgggctgcaaaaactttctctgagacttcccatagccctcagcagaagcgcttcgttctcccaaaacatgggggatctttagtttgatgagactaatatctatttcctttttttctcctttttttccttcccttttactttgttcctttttaaaaatatatatttgaaaggtcagttcaaggactgattcttgtcaacacctcataactggtttattcttcccagagacatagctatacttttctctagaacttagttatactagtactatcctaggcggcagctgtgtcttaaagaactgagaactgattgaggtcagcttctcaagcttcaatgtgcacgcgagcatagaggtcacccggggatcttgttaaaatgcaaattccaggccaggcatggtggcttatgcctgtaatctcagcgctttgggagcccaaggtggg

SEQ ID NO: 128008 - DNA, 1027 bp, Homo sapiens
ggctgaggcaggagaattgcttgaacccagaaggcagaagttgcagtgagctgagatcatgccattgcactccagcctgggcaacagagtgagactctgtctcaaaaagaaaaaaaaaaaaaaggaaggggtattagggaataatacatagaggttaagagtatggcttcagagtcctgcagacttgcgtttgagttcttctgccatcttgtgatcttgggcaaattacagcctcagtttcttcatgtaaaatgggaataaaagtcgcacctgtcgctttgtgaggaaggcataagctaacgtgtaaaagcacgcagcacagtgcatggcacgtagtaggcctcatcagtgtcagctaccgtgctgtgattgttctgttaatattaatggtagagaagcctgggcagggctggtggtgcatgccgtcgtccttgctgtcccttccccaccagacgtggacttctgcccacaagcagcccggtgctgccgcacaggagtggacgagtacggctggatcgcggcagctgttggctggagcctctggttcctcaccctcatcctgctctgtgtggacaaactgatgaagctgactccagatgagcccaaggacttgcaagcgtgagacccaggctcggtgcacaaaatggtgatcgccaccaatttgtggctaatggggaaggggagtaaggctaacatggtttctattatttaagtcattttcacctttaagcttcagttacttttacaagggaaagaagaaagagcgggagaaccaaataaggcaagccagtgctgcccttgcatgtcactcccaagggcccctgggctgtgcccaggtaactcctctctcaagatagtccctctgtaatgtatcctgttttaacctttcttctaggcaccaagggaggtgcacaagaaactataagacttagtctcatcatcaacattttcagaagcaagtgcataaccttctcaccaaaaccaggttatctgcttctgtccctggcttgagtcctgggcttaactg

SEQ ID NO: 128009 - DNA, 1113 bp, Homo sapiens
tgaaagagaaggagtgcaggagagtaagtctctcaaggacgttcaacaaaggaccagcagcatcttatcaggcgatcctcagaggctccaaggagcattggagagaatgcccctttctgggcttgatgtcttggttttggtttaataccaaatttctcttggtcttggtttaatacccgactcctcccaaattgaacgattatctttgtatgtcactcaaaaataccaggtttcctgaatatgttattaagaatttcagatatccaagcagaattttattatggacaccttgtaatgaattcaaatcgtgtgacagcaaacgggataaatggccccttctcacccagttccgctcagggccatacaggcttgcacatagagtgtgctaaaaatggtaacctcctttgagcattgcagaaagagggttctgtttcaaattgggctgaccgtaaaagcaattttgatgtctttcaaactaccataaagggattttaactgtatttttattcttagaaacaatacacctttaaacagatgtcaagaccaaagatgatgtataataaacagccggtggttatggtgtggtgtgagcaggcccccggatcaccagccctctgctggtggtcataaagcacacacagtttgtacttgcttcctctcgacgcctgccacaacagttttgccagtcaccaaactcagaaaaaactagctgtgtgagcagcaccgtaccctagcggtcttcagacattaagttcacgtcatccactgaaaggaagggtccttgcgttgacagcgtgtggctttggagtccgtttatggaagcactctacaatgaacagttgaattttatgtctattcttttttcctattttaaaagttctagtggtaacacaaactgtaaatttgagtcagaatgtttggagaaatgttgtttttttttttttcagagactactttgtcactcactgaccatgtctggttccttctctgaacttcattctccccataagccaaacaagaacagacctcccccgccacctcccaggcaccgtagttgtgagaatcagatgtgatcatgtgtgcagatgtcctgtgaggagggagcataaagca

SEQ ID NO: 128010 - DNA, 1113 bp, Homo sapiens
aaaaaaaaatccctcccaaagtggggcaaaaagctttatatttatttgattatccaaaatacagatcaaagtttagatctacattcttcattgtatttgctgtttcttaattgggcacacacaactcctggtcatgtcccagttcagcaccgatcgctaaggccgatcctgtagaatgcggctttcaagaggtcctaactgatcctttcttccactttgctgttgatttgttcacaaattatgtctgaatgagaaatcttctgtaagcagaagttatttaataattcccagcaccacgaaattgttatacatacatccctaccagtcacattccctgtgttcagagcctggaaatgaaattgagttcagttcagcctctctgtaatgaatcaagaaatgtaaaagagctttgagaccccaagggaaaggagagagttgcttctcatttctgattttattgtgctgttactctgtcgagtggctattaaaattgtcttatgctctttgggctaagaggggatcatctcgcttaagatgtactcctgatgtaaacatttcccccactttccaaataatggtaaagaaaacagtggcaagggctgttctgttttctggtacctgagtgaaactcagaagaaaagcaggcttagctaagagattttcactattaacctgtttttattagatcagcgaagacagtcatgcatcgcttaatgatggggatgcattctgagaaatgtgtcattaggctgttttgttgctgtgccaacatcctagattgtacttacacaacctacatggtatagcctactacacacctgggctgtgtggcatggcctattcctcttaggctacaaacctgtacagcatgttactgtactgaacacaatggtaagtatttgtgtatctaaacatagctaaacatagaaaaggtatggtaaaaatacaattttataatcttatgggactaccatcaatatgtagaccgtcattgaccaaaacatcctgatgtgtgcatgactgtacttttcattaaataacagataaggggctatagaatttggggctctgactgatcaaaacctgtgtatctgtgtcaagttttaagacccc

SEQ ID NO: 128011 - DNA, 1052 bp, Homo sapiens
tgtcctggaatcctgtaggttttcctgaactttacaggtgctttgctttgcagtgaatcttgattcccctgctaattttaggtatttgaacctccctacatggcatgcgtactaagcaaaattcagatgtattaatttttagtttaaaatctgaacgaatatagaaattatacatgtttgataacattcaaaaggaaattatttttaaatttctattaggtgaaattatgtaaaaacatataatggaaaatgttaagatctattagaaggattacctttttaactatagaaaattatgaagcatgtatttgtctgaaaattgccagttattttcaaaaaaagaaaatagtacctaggagaaatttacagcacctcacgatcaagaagtatttttattgtagaagatacctcatataaattaagtgggccaacctgaaaagatcagtgggaggaggaaaaaggtccagtttttaaattattttaaaattgcaaattaacaccataatgcaccatttcaatcatgaaattatttttataataatgtggcatggtaaagttagcatccagtttcttcatctatatgtactgggaatattcgtacttacctccttggttgtttagctgataaaagaagatgacagaagtgctcaaaatagtgcctagcatagcataaactttcaataaatattagctgccatgaccattgtcactattattttcagtggtggcataaattattaaatttttggaaggcagtttggcggtaggacttacagagcctttgatttggtaattccagttctggaaatccaggctcactctcctaaaatccaaaatattgggggaaaatgacgtgccaagatatttatcacggcattatttgcataatagcaaagaattgttagtttccccagatactcagtagtaagggcatccttgagtaaatcctgcagctacttaagatgaagaggtcataaaaagccagaaaagggggatttgagatttaccagttgcctcctatgtgtttgatgcttcatctgttttatgtcttt

SEQ ID NO: 128012 - DNA, 1050 bp, Homo sapiens
taatctttcacaagtgcctgtcttctcctggaactctgggtataaacagaacctggcatgcagtccatgttctagcgatgcttgttggattggagttgtggaattgccagcacagtcttgggtcagaagttgtgctcctctcatcagccttggattccgggttaacaatcttgtttgtgtgtgtgtatgtttcagctgcagatccctagtgtgaagggcttcgattttgctaagcagcatctgggtcagcacaataaagacgacatattgattattcatgagccagcgccactgccaggacctctgaaggaccacaccacgccctcggaaaatggagacgtgccaagccccaagtcaaagatcccttccaagaatgttcgtcacagaggaaggttattattgggctttctgtattattctttgttgcagagcatgcttctgttatcaggctgtgagtttctgatgtcacaggggctgatggtgagcgcagccctgcatgtgcagcccagcagactgatgacttgcccaaagtcacacaggagcccaagagtgtttccgagccactctcacgggctgccaaagaaggctgtgtgatttctttccccacacggttgaagatcatgaatcactatctgtgatggtttaggggtccccatcagacttgattagagattgaccagctcatgtgtatatatcctgaggggagcatgctaggcctcatggagataatatcagaaataacatagaaggagtgcacagcacatggtacacgctcagcctgtgtggactgctgtgtccatgcctgggatgccagcagctgctgtgacttcattgctttgcctgcaggtgaccttcatcacatcctcctgcgtttgctttgtttttctctggctgcttatgtatgtcacctttgtcaggatatcacacaagactcttcaccgcctcctccctgcctcgctccccattccccctctcaaagtatagcacatggagaattgcctattagttttccaggctacctggaagccccttctcaccctctgaccctgt

SEQ ID NO: 128013 - DNA, 1029 bp, Homo sapiens
tttttgagatggagtcttactctttcacctgggctggagtgcagtggcgcgatctcagtttactgaaatctccaactcctaggttgaagtgattctcctgcctcaccctcccgagtagctgggattacaggtgtgcaccaccataccatgtctggctgaattttttttttttttttttttttttttttaggggagatggggtttcaccatgttggccaggctggtctcgaactcctgacctcaggtgatctgcccgattcagcctcccgaaatgctgggattacagatgtgagccaccgtgcccagccaacaaatagcatgtttgatgacataatatcttaccacagctctagaagctgaggcctggcatccctagttgcaggctcaggggtctgtcatgggtttggtgtggggtgatgcttgtatccctggagaggaatcctgcatccactggtttgagtggggcacgtttttgaagagccctttctccttcggttttgtgccccattacttcttttgactacttctttctagaaattctttgttccctttgcttctactacatggaactttccaaattcttctgtttctttgaaatcacattctattttcttccttgtttcctttttctcttcttagccccaaactattagatgttctccaacactttatccacagaatctgtatttatgttgaaaaactcagctcccctacctgtctcctttatgtgggtggttcttgaagtcacatctgagcctgcaagttcccccaggctatggttcctcacctccagctacaccaagctgacatcctttggggcctcaaattaagcgtgtttgaaatgaaacctgtcattttgtctcgagccatcattcctatatgactcgcctctttcccttaacgtcactttcactcttcacgtgaaattcacgtcctcaatggcttctttctcttcctttgcctctcttgtctatttggcttctaggtctttctgcctgatccctagagctgttcattccttcccatgtt

SEQ ID NO: 128014 - DNA, 1035 bp, Homo sapiens
gtacaactccattggtcagttgctttattttctgttcaccctatttggaagcccacttacccaccttgatcattaaaaacgaacaatacataccttgaacattttaacttaaaatatatgaatggacatttatttgccaatccttcaacatatcccaagtcttgttttgttttgagtgttggtctactgagaggaattgtgtttggtctttcttacaataaacaacacccatgacgtgtcagtttcaggttccagtttgggtttctttagagaagagcaaagctacctgaatgcaaagttctctcgatttttaatacctccccccactccctatcttagagaagagcaaagctacctgaatgcaaagttctctcgatttttttaatacctccccccactccctatctcctaattttgcagacttttgagttaattcactcacacctaatttgacagcagattttttaagtaacccctctttcctatgtctttccaaagcattcaacttaagtgtttatagaaatagcaattttcttttccaacgtatgtttcaacagtttccatagtattcgagggtcacatcaggtttcagagcaaagacattgacttttggtcaacattgagctcacctggtgtgagcaaaaacatgccaggcctagaggagcactcactagtacagcataagtatcagtcagcgtgtttaccaagggagtggaacgtggtagtcagtccactgttactaacagtctgctggattaacatgcactttccgtgggtctcccagatttggaggactcatcctgctttaaaagcttgataaaaacaagcaaaagtcaaaaaacaaagaataaaagattgccctatttatttttaaactttattttggttgtcttgggtatgaaaaattctgcatattacaaacctagacctgtcgaatggaaaaaaaatatgcattactttaaaatttattttacttttgtaaaagcaaagaaagagtatttgtcttttcatatgaattaacaaaaaaatgcaaag

SEQ ID NO: 128015 - DNA, 1091 bp, Homo sapiens
gttgccaatggcaaatgtagagaccagcaatttaaatggcacatgtaaaataaggagctcggagccctcgctgatccttttctcaggacagaagctcagagttttgctggagtctaaaggggtaatcacattgttgcatattattagagaaatagagtgaaatgaaaaggtacgatatgtcaagtgtgctagattttgaaataagggcataaaaaactgtcttttaacaccagaaagagagaagttttgggatgaatcaaagtattatttgacccacaagattatgaatttatgaggtttattgtccatagacctgtggtgggtgggggtgattttgtcctccagggtgcatctggcagtgtctggggatgtttttggttgtaacttgggtggtgcaggatgggggtacctggtgggtagagggcagggatactactaaccatctacagtgcaccccatgtcaagggattgtcagtagagctgaggttgagaagccctgccctagcagaatgaggaggaaataccaataggctgaagaaaggattgggtagaaccattaatagtttcagagaaccagggatgtacctaatcctacagttaatgttgggaggatgatgctctcttatgacgtggtcagcacatcagagattgtggggatgattttagaccacctggactcgccagccctggttctgtgcagcctccctgccccttggccccagaaaagatgtagagcgagatgaagcaacctgttactccacacaaaggaactccccactgtccctcttcccatcaacagagagcaccatggtgattctgggcccctgaatggcttacggagcttattatgaggattggaataaatcctgagtgacacagccaggattcagcaacctgagagagggcatctagaaacatgagcttctgcaatgtgaatggtttctgctatctttcaggtggtaaatgtgtcgaggctggagggagatgacaatccggtacagctcatctactttgtggaggatcaagatggagaaagactcagtgcagtcaagtcttcggacctgattaacaaaatggacctccagagagca

SEQ ID NO: 128016 - DNA, 1019 bp, Homo sapiens
gggtggcttggcacctgggaagctttttttttttttttttttgtcttaggggagtgggtcagatatttagaggtatggcattgcagttgaaggcctttctaacctagtgcacaaaagtctgaacagtacttacgtactcaccagctgtccagtgtgcatgcagcacaggaactagctgggcacgagagagcatgtggggtagtgatagttgccattcacggggttcctgcatcttgcaagttctccttgccgaacacacagcatcccacgtcaaggtcctatcgctttgcatggtgccatccgcggtcttttccagataatttctatagcaattaagtaacttgcccatggttgtatctcaaagaaaacttaaaccagttctggttgaaaagcacatgctccttcctcccagaccacactggcaagtgattgtctgttgagatcatcttgtctgaaatagataactaaagatgggcaggcttccttttttcaagttagtttgtgagtccaagtctcaaggcaagacaatgaactcacaccaattccagaagtgttgagataagtgcagacaaaatgtttgatcttgcgtaggcgccctttgcgccaaagctcctgcagtgctgagttcctgggacttctggccgccagtctgggtaacactgagagcttggagctcttgtgggctgcatttcctggactctccccattcatgatcactttttctccttttgatgttttctgtctaggaattggcattttatggcaatcttgcattaatttcaaatacatatgtgcgcgcgcgcgcgcgcgcacacacacacacacacacacacacacacacacacacacacacacacacacacacacacactgtttttttactgctgacttgttttgggtgccacgtatgttttcatttaaatgtagttctcctgggcgtcatggagaagcaactccagaatgaagtgtttcaagccgagatggaacgcaagctggcccagctgctcagcgaggtttcc

SEQ ID NO: 128017 - DNA, 2122 bp, Homo sapiens
gtagctggcacagctttccccttgagctgtggggatctctttctacgtcagctccatctcctggtgggaaaattcgtcggagcgctgggtctggggcagaatatgtcagcgtgggcttctctctgggtgcagtgtgtggtcagagacaagcagacagggaacaccctccttccagcatctagataaagaggttcttcctaggggatggggcactttagtgtgtgtctcagggcagagctagctgcgttttcattcattttctttccttcttcggtgtgcacaggagttatcttagcctctgcccaccttcttggttagggcccagacccaccatagtcctcttaggcaggagtttgttttcctcaggaggcagtcttgttctgggtgagggcctggctgctgctagcacctctgttggcctgggtgtggcagttaggaaggacggaggaggaaggcaatacactcagctctttggcacagccttgtaattaattatactgattaccactgtgtagcctgctcttggtctcattcctgctgatctctgccacagagcccctcctggtcctcttggagagcgtggcccttggctctgctgcagcccatgcttgtgtatgttttggattctggctttctctgttctggtttatatcaatccaatcccatcctttcttcatcccccagaggtttgacggaatctctagttttcttccattctcagtgctgttgtggatttattcccctgtgttcagcttattgttatttcagtggcatttggggtgggaggagctgtacatgtgctcagttcatcacttaatgtaagaaacattttccataaactgagcagttaaactcttacaaaagggaaccaggttagaaagccagttacgtttcctttaaaaactttacctcctttaaaaaaatcggtgagaggacctgtgagagagaaatcatggttaagctttcagcagaatgttttattatagaagcttattctgactttattctttcagatcttgaatatcaccatcagttcctcaagggtgactcctcggcggggcccggtgaatatcatctttgcggttaaaagcacacagggatttttgaatgggtcggaagtgagcgagctgctcagaaacttgagtgtggtggagttcagtttctatctgggatacccagtgctgcagatcgcagagcgtgagtacagccctcttggacatgctggggaggtgatggcgggcatttttggtggaagacctcttcttaaaatttttttagttttttaaaagacttgattttttaaaaattatttttccataaggcgttggggtacaggtggtatttggttgcacgagtaagttatttagtggtgatttttgagatcctggtgcacccatcacccgagcagtatacactgctccacatttgtagtcttttatccctcctcccgccactcttccccccaagtctccaaagtccattgtatcattcttatgcctttgtgtcctcatagcttagctcccacatatcagtgagaacatacgatgtttggttttccattcctgaattatttcacttagaataatagtaaaagacttgagtttttttagtgaagtttttggattcacagcagatatgatcggagagttcacagatttcccatatacctcctgcttccgcacattcataacctccattatcagcatcccccagcacagtggcccatttgttacagtgatcaacctgcattggttgatcctgcatcattggttgaacctgcatcatcatccatagcccatagtttacattaaggttcaccctgggtgtcgtgcattctgtgggtttgaacaaatgtgtaatgacatgcaaatggcatggattctccattttagtatcatacagagtattttcacctggaccacttttttcaaatgaaatatctgatttgagtgccagaatataaatctgataaaactggattcaggccagatgggtctgcagagccctgctcacccaccgtgcctgactttattatttggagagtaaaggggtgctatcaaaaagtacacgaattctggaaaaggcataatttagggaggacgaatctgtggttgtcagagct

SEQ ID NO: 128018 - DNA, 1650 bp, Homo sapiens
acggcattactataccgttgccctccttgggggaggtctcacagcctccagaggaggtttgggccacaagtgcagacagatacactgatgtgaccactgtgttgagtcaaagcctagaagaaaccatctctccaagaacataccccactgtgactgcatcgcacgcagcccttgcattcagcaggacacattctccattgctttcaactcctcttgcatttgcgtcctctgcttcaccaactgatgtttcatctaacccctttctccctagcgactccagcaaaacatccgaattgcatagcaattcagccctccccggtcctgtggacaacactcatatcctgagcccggtgtcctcattcagaccatacacttggtgtgcggcctgcactgtgccttcacctcagcaagttctggccacgagcctcatggagaaagacgtgggatcaggggatggtgccgagactctgtgcatgaccgtgctggaagaaagcagcatctctctaatgagtagcgtcgtagcagacttctctgaatttgaggaagatcctcaagtatttaatacgcttttcccctccagacctatcgtcccactttcttctagatccatggaaatctcagagacgagtgttggcatttctgccgaggtggatatgagtagtgttacaaccacacaggttccccctgcccacggccgcctctctgtgccggcgtcacttgatcctactgctggctccttgtctgttgctgaaacccaagtgacgccatccagcgtgaccactgcatttttctcggtcatcaccagcattctccttgactcatctttctctgtcatagcaaacaaaaacacaccgtcgcttgccgtcagagacccgagtgtttttacgccttatagtctggttccttcagtggagtcttcacttttctctgaccaagaacgttccagtttttctgagcataaacccagaggtgctttggattttgcatccagctttttctcaacacccccgctggaactcagcggctccatctcttcgccttcggaagcacctgcgtctctgtctctgatgccgagtgacttgtcccccttcacatctcagtctttttctcccttggttgagacatttacattgtttgactctagtgatctgcagtcatctcagctgtctcttcccagttccacaaatcttgagttttcgcagctccagccaagttccgagctgcctttaaacaccatcatgttgctacctagccgttctgaggtgtcaccatggtcaagcttcccttctgattctctcgagtttgttgaagcgtctacggtttcactgacggattcagaagctcattttacctcagctttcattgaaactacctcctatcttgagtcttcactcatttcccatgaatccgcagtcactgcactggtgccccccggctctgagtcttttgacattttgactgccgggattcaagcaacatcaccattgaccactgtccacacaacgcccattttaactgagtcttctttgttctcaactctgacacctcctgacgaccaaatcagtgctctagacggtcacgtgtctgtcctggcctctttctccaaagccattcccactggtacggtgttgatcactgacgcgtacctgc

SEQ ID NO: 128019 - DNA, 1049 bp, Homo sapiens
gggttaggtttcaacatatgaattttagggggacacaaatattcagactatagcagtatgattcctaaaggtggcccctcctgactgcggcagagcacccgtaagtgaacatatccctggagggcttggaagtcaaactccccccaccttccttgatggtgtcatttgaccccaatgatcatctttctgcagattatcaccaatctctatcattggcccagatttctctctcaaaccctagagtcacatttccatccaccccgagttggctcctcaccgtccatgtgagtctcaaacgacaggctcctcttggtgaccccgcaccattcgtatgagccatttccacatctgtgaatctccttcctgcttcaggccactgtgctcgccaccccctctgcctggagcagccttcctgtctctctctctcggctcctcatcctttcctgaggttccttgctgtccatcacagcatcttgcttatttccttaccagtcttctctgttcatcattattgtctgtctcctcttctcagccataaagttgtgagcaggggacctttctatcttggctaacacttcacaccctgcacttagctcacatgaccggtaggtgtttgttggactcatgaatgaatgaatggacatgttagtctttgggctggacatgggaggcacactgataagacacagcctcttccttcaagtagctcacagtctggggtagggtggtggggcaggtgagtaatgagtaaatcaagaatgcaacctaagtgtcaagagagaagcacatgcagggttctggggaagatggaaaagggggttctggggtgtgatagttacgggaaggaggaggggcatggtggtcagagagcacgtcgaatagctggggcatgggctggttgtaggggagggtaatactaatggcacaggcgggaacggggagctgaaggctcttgtatctcagctgagggctttggctttctgaaggcttttaagagccactggaggattttgagaatggggtgacatagtttgattgtttctttcctt

SEQ ID NO: 128020 - DNA, 1048 bp, Homo sapiens
caaggaatctcagaaaagtttggttttgccttcagatgttagcaagtgtaattatgaggttagttattgcacgttttcttcattcttttaaaacttggtattgtatatgttttgtaagattcttcatatcaaaacaggagtctgtgtgtataatttcaaaacaaagtatatagtggaggtgtgcttgggaatttttttattaatggagtgtggacccaggcagtgtgagactaccccctgggctggctgcttggtgaggtcaggtgcatacaaaccccagctccacatgttactaacattcagcgttttcgggtttttcagcctctgtagcttcagtttcctcatttgtaaaggggtggttggggaaattaagtgatgtactgacggaaggtgcttctcccagaatttggcatatagtaggcattcagtacgtagaagccatcatggatgctagtaagttaacttgttttccatcatattttattttattaacgtttcatcttgggtcagctggtcaacatgggactgcagattacccaagaaactcagctgctcaactggatgaacagtggttctatactaatggacttaaaatggaagggagctagattttacttattatcctgcttggtgagaacgtggaagtagataaaatcccagtgaatgctctactgtggtttttctgcacccgttggcagtgggggctgctgggagaccaggggttgtttacctgctcccatcagcctctctccctgggccatgcagtaaagctgcagtgagtctcagagggttctcagttgggcagtctcacctgcagaggcgctgggcaatgcctgcgagcatttgttgttgtcatcatagtttggggaaaggcattacagacggggtggagtcagggattccaaaaaactgggggtctctagatgcctccattgctcaggctggagtccagtggcgtgatctcggctcactgcaacttctgcctccagagttcaagtgatcctcccacctcagcttcctgagtagctgagactacaggcgcacacca

SEQ ID NO: 128021 - DNA, 1066 bp, Homo sapiens
tgggagggtgaggcaggagaattgcttgaacccgggaggcagaggttgcaatgaaatgagatcgcgccactgcactccagcctgggtgacagagcaagactccatctcaaaataaaataagataaaataagataaggtaaaataaaataagcattttttgttacatgtttttgcttggttttgtttgggttgggagtgaaagggtgcagaggactgcattttcaatgctcactcctgcccgtttgggaacagctgctgcagtgcttgtcaggaagtgcctcacttaattctgaaaacagaacccagccagggagttgttacaagtcactagggacgtgggagccacaggttttctatcagtgccctgaatgatagaggcagctaattaccgtcattataattacactaggttgattttcccagataggaagacactgttctaactgatctaatttgttttcaagttgtgaccacccacctttcatctggagctcacaatgatgtgatttctttttcttgttgttaggcagcaggatttgttaaaaggtgagttaaaaaacctgggtgtgtgcaaatgcaaatctgcctgtaactttgtgactatggacaagttaccttgtcctgggtttcctcctcggtgtaagaaagggttaatgagattagcgctaatctcattaaccctctagctccttgtagctcatttctccctgtagctcctacatatcaagtcaacatcttggatgtcttggaatgcacttataagcagcatctgtcctttttctgttaggttgttttgtcatttctccttgcctggtagatgttctaggcccatgacctgctgaaggcagctcactctcaccattgcagatggctcttctttttaaaaactccctttattcttccctcttgcatccacacactcaagacccatactttgctttctcttattctttctctttgtctctttcttttttccatctcctttgttagcttcaggcaattacttctcattagtgaaattctaatcttgtggtccccacactctgagcatcatcactgcctctta

SEQ ID NO: 128022 - DNA, 1007 bp, Homo sapiens
acttgaccactttgaggcggaaaaggaaaggtggaaggagcagctaggggtggagagctgctgcacacagaacaaaaaccagaaagccgtgaacgctgctccgaatcctcctttctcgtgggagcagggccaaagggctactcagtggctgggaggaattggaacacatttgaaggtgtcccttggacctgtgagaattataaccagtgccctagaggggatggtacaatagaagcacagggaggacttcagggatcatggaacaggtccactctgcttaccaaagaggaaactaaggcagagaagtgccttgctcaaggtcacagtcatcactttccctgcctcccacccccgctcttggcccatagacatatccacacctgaagcctctgcagagatttcccatagctgggtggaaccagggttggggtgacagaatgagtctcttttaggcagtatacagctagtgcaaacaccttactctaacctaggacctcccgtctcagtcctgctcctgcgagttccagccctgtgtgtccagaggagaagagatcattgtcaagggtctcttggctttagtcaacaaagagagcccatctgatactcgtggattcatctgtcataagacacagcagataaatggtttccatctcctgagtgctttttgtgtgccagatgttgaattttatatacacgatccaatcacgttgtgagttaggcatagttatccccattttacagatgaggaaactaaggctttgagtttaggttggtttggcttcagactctatgacatgcttcctttctgtgcctgatggcttccccatatgaatgtggccatctgggtgtactgcagaggttgtggagaatataagtgcttctggtaactttaaaataaatagtgaagctgtttgcactgcccatccctaaccttctcttctttggaagtcctttcctgcttcccctctacccccaatacaaatattcaacctggagacatgaaatta

SEQ ID NO: 128023 - DNA, 1028 bp, Homo sapiens
ctgtgagtcacaagcagccagtgcccacagcagcgggagtatggttagcaccactacactatcatcaggctttcccccaaagattttaacagccactggtgatcagaagatgtcatttagtcttcagtttagctagagaagctatagtcttttggcttaaaagatagagtgaaaactaatattggccgggtgtggtggctcacacctgtaatcccagcacttttgagaggctgaggtgggcagatcacctgaggtgaggagttggagaccagcctggccaacatggtgaaaccccgtctcttctaaaaatacaaaaattagctggctgtggtggtgaacgcctgtattctcagctactcgggaggctgaggcaggagaattgcttgaacgcgggagatggaggttgcagtgagccaagatggtgccactgtactccagcctgggtgacagagcgagactccatctccccgctgccaaaaaaaaaagaaaaactaatatttcaggtgttccctcatttctgtaccaggtctgtttgctctacaacaaaggggaagccctgtatggctactgcaacctcaaggataaatgcaacaagtttcatgtgtgcaaatcctttgtgaaaggagaatgcaaacttcagacctgcaaacggtcccatcagcttatccatgctgcatctttgaagctgctacaggaccaaggactgaatattccaagtgttgttaattttcagataatctccacctacaagcatatgaagctgcacaagatgcttgaaaatacaggtaggaatatccaagaaggacagagaagtatcagcgatatggttttgcgatgcttcactgtgaagaagtaagaacagtgacatgaaagtgagtctgggggcaaagcagttcctatgttaatttcatctttgttcttgggaaagtttagaacaggcaacattgtattgtatagaacggtgatcctaaccaaaggagagaagggatggagtttatctttagcactgtcactgctagctactagaa

SEQ ID NO: 128024 - DNA, 1871 bp, Homo sapiens
ccctcacatgaacctgttcctctctcaggatctgtatgtaagtgaaaagcatcaccatctacccattggctcaagcagaaatctggaagtcatctttgactccttcctctccctcctgataaacatctaagcagtttctaagtctagttttacctcttaaatatctctgttcccttctaagttgtttgctgtgttttcttcagagcaagaaggttatattttttaaaatttacttagtaatgcacattcaaaacacacatcaagtcttcaggataaagttcaaaaccgctgtcatggccccatgtgatctctccctcccctacccctctatcatttagtttcttctgcgcaagccactctggcttcctttcagttttgtggttcccatttttagctagttcagtggttttcaatgggcatttctgcctttttttttctaaacgacaaatagaaatacatcttctttattatcctccaaatccaattcagaggtaatatgctccacctacacacaattttagaaataaattaaaaattaaataaaactaatatgaacataaagaggaaataaaaggtacctaacttgggcacagctgtaactgaagacctaatgaagtagtcagatgcttacaactatttataatgcatcaatttgaacttagaaggtaggagatcagatcatatgtgggaaaatgtaaaagcagggatatcagtgggcattagaataaaaactagggatacaataacttctttgcatatgacaatacttatttgtatataagagaaagaacgaaataacctttattgaaataaagatactatgcaagaaaatgtacagttgtcgaagtggagaaaatgaggatatattcttgcagacgagctataggtcatacatgaatgtctagtgagacattcaaaattcgtatagggtgcagagtaatttcttattgtgaggaactgtccaatgtattgcaagatgttctgcatacttggctctcacatactaaatgctagtagcgcccccacccccacgcccagtcacggtgacaaccacaaaccctatcagatctattcacctttttcagagcagatattttgtaacattctctttgctgacctgaaatgactcatagataatacaatctacttacacacatgaatttcttaaaaaaatcaatttaatgccctaactctcttattaaggagaaatagaaaagaagaaatttataatgaaaagaagatgaatttcattatgtaaacgctcaggcatgactacgctgtttgaaacagacagatgtttactcttccttgtaatgagtaggtttggatttaagagccgattagaggctacttcctgtaaacaagtacaggaaaatgaaactagacgggtgggggacactagaatgaaaaccagtgttagggtaaagacaaaacagactatgtacataatctgtatatgggaaaagaaagagcgaaattaccttacttaaggataataggacaagacaaattacagattgtctcagagaaaacaaatgagttactctctcggacaagctgtaggtcctacctaaatgtccagcaggacattagacagtcgtacagggtacagaataattcttcgttgtgtggcactaacccacacactgcaggacatcgttctccctggctgcatccactcagtgctgggagtagtccccagttattatgaaaccaccaataacccactgaccacagtgagaaccactgattttttccactgacctactgaatatctagcatccttagattggctcaactgttactttcctaaggagtccttctacagaataggtcagatcttggcctcccaaaccccttatttttaaaat

SEQ ID NO: 128025 - DNA, 1027 bp, Homo sapiens
aaagcttccatgaaaaatttcaagattgaaaagataaagaagatcgagaactcagagctcctggataaatttacatggttggtggccacgttatcgtgtttctttacataaaaccggaaaggattagttaatatccgtcctttgagatttatattcactgatttattttagtagttaacagttcctttaggcgctagtctttttttttttttttcattctatcaactctggcttctctctctcagccttactgctttacaattcaatgatttcatgtgtctatcttttaaaagttttcataaatttattattgtacagctgctgccttaaagttagtagctccgttgtgaaagctgatggagtgaaatttttagatgattagactttagctgggattaatgttatcaactggagtgggaaggggatgtctccgtgttaagtctcacatctcttatattaggaagaaatcgcagatgaaggaagaaggaaaactcctattttatgcgacaagccgtgcctatgtggaatctatctgttcgaataattttgacagtttcctacatgaaactcatgaaaacaaatacggaaaaggttagtgccgggatagagaagcgtaactagtagagtcataactcgggctttatatgtgcttctattaggaggtatatgtaattattttgtattaaccagagtgtccaggctctagtggtcctggagagacagtaagctcacggtaatatcaaatgcccaaatgagagtgaatcagttgacttggagcttgattgctggaccttagtccctgtcttctgttttctttctgggagtgaccaaagtcttcatacgtgcttgtaaactactccatctgttggtcttgttgtctaccattactactcacttctggcttggctcttcctgaacccatgtccatgcctgcgaagctatatgaggcttcagttgtcacagattggttttaattaaagagcgggagaagaggcctctccccatctcaggccacactgggtcacct

SEQ ID NO: 128026 - DNA, 1029 bp, Homo sapiens
ccttttattttttttccaattagaaagacaaacggaaaaattcaaacgtcgactcttcatacctggagtctctctatcaatcctgtccgaggggagttgtgccatttcaggcgggctcacggaactatgagctgagtttccaaggtgggtttctgtgtttggcagtgttgtgtgtcattgaaatccgcctgcagtgtacacgtgggagtgggagcagagtgggtatgcattgctatggccagggtcaaggtcaagatttagcaaggcggtggagtgcaagctagtggccatcagaagacctgtgttctagagctctggctgtgacgaacacttgctctgccaccctaggaggggcacctggcctatctaggcccacttctctcaactgcaaaatcaggggctcaaactaagtagtcttgggggtacttccagctctgccatgctgtttctgattctgggtgggcagctgcccagggagaggcaatatttcaggtgctggtgactacggtagaggccttgggcttttgggcaccttcagagttttagaaacttgctgtttcttttagggtttatcatctaggtcagtagttccatcatcacattgattaaagtactttgccttccaccgtgtttattggagctactatagaaaggtcttctggtgagctgccgccaatctacctgctgtgtttagttagatatcagggcaggaactgccctccttctgaaggtaccatcccattgggcaccccctgcacatgatcaagtgcttgccctttcgggacttgcaggtgctttggaagaggtaaaggagcctttctgaggtccctgaattcgcagatggtacctgcagttggatcctgtaccgcttagtgggccttagatgacgtagcttttacaaggaccattataccaagtatttggaaaaacagtctggcagtacatgtcaagtgacattaaaatatgctaatatgtttgtcttttcattcccttaggaacctttcttaggaaataattcactagaagaag

SEQ ID NO: 128027 - DNA, 1802 bp, Homo sapiens
acatgtactccaattgcagtcatacattaaagtatatattaatttttatttttatttatttatttatttttgagatggagtttcactcttatcacccatgctggagtgcaatggcgttatcttggctcactgcaacctccatctcctgggttcaagcgatcttcctgcctcagcctcccgagtagctgggattacaggcatgcaccaccaccacacccagctaatttttgtatttttagtagacatggggtttcaacatgttggacaggctagtcgtgaactcctgacctcaggttatccgcccacctcggcctcccaaagtgttgagattacagacgtgagccactgcgcccggccatatattaattatttttaaggaaccgcttgagacatgtcagctgcacttccctctttcctcaccatgagaggggagggtggaaccttgagatagctttctatgtataaacacataaaatgtacagagactactgctttgagctggaaaagagggtgagagtgagaacttaaaggactgtatggatgatggcatggttaattagaccagggaatgtgttaattcactcaagcagtgaaaccacatctggtacagatagtcactactattcattcagagtctggatttagatggacttaaaggactggaactagaagatcctaggctgacccatagtgggggcatagtaatagggagggaagtttaggtgagcagagcctctgtccttctgtctcagtgtcccttcctccctttaactcataggattaaagagagagagaaaacagaccttaagcaggtaatggaatcagggtgatgagaaacagaaaatgaaagcaagagattaaaatgaagccaaaaataatgcatgggctgggtgcggtggctcactcctgtaatcccagcactttgggaggccgaggtggggtggatcacctgaagtcaggagttcgagaccagcccggccaacatggtgaaaccctgtctctactaaaaatacaaaaaattagctgggtgtggtggcgcgtgcttgtaatcccagctactcaggagtctgaggcaggagaatcgcttgaacctgcaggcagaggttgcagtgagccgagattgcaccactgcactccagtctgggtgacaaaagtgagattccaaaaaaaaaaagataatgcagggacaaaggaatggcagcgtaaggttctacatatttaggttggtgtaaaattacttttgggttggtggtaattacttttaatggcaaaaactgattacttttgcacggaactaataattacgagtcagtgggctatacatttggctctgagctgcctaactgccaaagcaaacaaaatacttgggagaggcactactctgttatgttagtgaggcctgagaaaaacacctcctatagtgggccacatggcgggaaccctgtgtgctgtggtgaggtcctcaaccacaaacagccctaccatgaattcagcagcatattggtttccaaactgtcttagcagcagatacattttatcaaaccatctttcaaagactctaaacgagccaactagagtagagcagggctgccctggtggaataggatatgggctcagagctgtctcctggacccctccttgttgctcttctctctcctgtggtggcccatgtagcatctctgtggaacagagttctgctgaaactcccgtgtgtgtgaaaacacctatgatattaaactttgcacagattctttgtatgctcaagccaaggatgatgtcaaataagcgattctgtcaggcgc

SEQ ID NO: 128028 - DNA, 1077 bp, Homo sapiens
gaaatcatatattgtgtagcctctggaaaatttcatcgtgtattcctgagagaatgaaagtgaaaaaagcaaataatgtttaatgttattatgaaaatcactttaaccttgccaattttctgcaagggtctccacattttgataacgatttaaataataataaataattttaaaaatggaccaaatgcgaatttctaacttactttataacattgagccaatcaggagttttgtgggcacagttttattttgggatattttctgagggaagaatacattatgtaacaccattaattatgtggtgcaggcgagtcactttcctctctgcgtttccgtttttcttttatgtgtaggacctggagccatggaaagaaaacttgaagatctattttagccctgaaagtttaattctgtgctctcattagggaagacgagattgtagaaaacaggggtcaatgaagcattatgttaacttaatacttttctctctcagctgttctgtaggaagttatacaatcaattttcgggtaatgagttgtgattcctttcccatccgacgcctctccactccttcttctgtcaccaagccagccaattctgtcttcaccaccaaatggatttggtattggaagaatgaatctggcacatggattcagtatggagaagaggtgagcactgttcctccttgtagggggctcttgtttaaacttgtcaacttaaaaagaacactgttggctgggcacggtggctcatgcctgtaagcccagcactttgggaggctgaggcaggtggatcacctgagatcaggagttcgagaccagcctggccaacatggtgaaaccccatctctattaaaaatacaaaaattagccaggcgtggtggcaggcgcctataatccccgctactctggaggctgaggcaggagaatctcttgaacccgggaggtggaggttgtagtgagctgagatttcgccactgcattccagcctgggggatggattgagactctgtctccaaaataaataaataaataaaataaaaagaacactattaataaaatgtttgaagcctacatg

SEQ ID NO: 128029 - DNA, 1145 bp, Homo sapiens
gctcagtgtaagtcactgaaggacaaaggggcctctgtgtcttgagtctgcagcagagtggctatggctggtggtttttccttggatgttccccagttcttaaagggtagagagttagagggttttggttatggggtggtctggtgaggagattgactagtgaagacagggaagggccaaccagtagaaccacagggaataaactgccacatttattgacaataggaatatttcaactatgatttaagaaataaacatagctttcacaggactctgaggtccacatttttgttttatggaggggctgtctagatgctcatgggcaaaacataaatcataggaattttcttgaacatggcccccatttcagatattctttcccattgtgagaccaagtgctttgatttttggtttaaacattaagatcagcatacatgcatccttttttgtttcatagattctttatctgatgtcacaagtaccacatcttctagggtggatgatcatgactcagaggaaatttgtcttgaccatctgtgtaagggttgtccgcttaatggtgagtaacctaaggacttttctgtaagcttccaccttttggccattgtaaataacactgctatgaacatgggtgtgcaaatgccttctgaaaaccctgctttcaattcttttggatatatacccagaagtggagttgggggatcatatagtacttctatgtttaatttttttttttgaggaactattattcatagtggctataccatttttctttcccaccagcaatgcacaagcgttcaaatttctccacatcctcaccaacacttgttctttttgtgtgtgtttgtttgccttttttgtttgtttgttttgagacggagtctcactctgtcacccaggatggagtgcagtggtgtaatctcagctcactgcaacctctgccccctgggttcaagtgattctcctgcctcagcctcccaggtagctggggttacaggcgtgtgccaccccgtccggctaatttttgtatttttagtagagacggagtttttgcatgttggccaggctggtcttgaactcctgacctcaagtgatccacccgcctcggccttccaaagtgctgggattacaggcatgagccactg

SEQ ID NO: 128030 - DNA, 1565 bp, Homo sapiens
tgctgggttccttcatgatatagggctcactttgggtcctgtttgtagctaaccagcttacattgattcttccaagggttatcaaattgatcagtatcttttggttagtctgtggacctcttctgccccaagtaaatcaccaactgaatgtgactcatcaaagactgcagaatatgcatgtatttttccccctttggtatatctctgcttgcttcagagatttttgcacacgtgagcttgccttaatgaatgtttggcaaatacaagaaggtgttttgactctggctgttgtttctcccttctgtagatatgcaaaagttataagggagagggtcggcagcagatttgtaaccagcagccaccgtgttcaagactccacatctgtgaccacttcacccgagggaactgtcgttttcccaactgcctccggtcccataacctgatggacagaaaggtgctggccatcatgagggagcacgggctgaaccccgacgtggtccagaacatccaggacatctgcaacagcaagcacatgcagaagaatcccccagggcccagaggtaaaggccttttctttttcaattgtgtgaactctttttttttttttttttttgagacagagtctctctctgtcacccaagctggagtacagtggcgtgatctcagctcactgcaacctctgcctcccaggttcaagtgattctcctgcctcagcctcccgagtagctgggattacaggtgtgcaccaccacacccagctaatttttgtataaattagagacggggtttcgccatgttggccaggctggccttgaactccttacctaaggtaatctccctgcctcagcctttcaaagtgctgggattacaagcatgagccactgcacccggccaattgtgtgaactttcaaatcagcagaaatcacaaggaaagaaaaactgccataatcactctaccttgccgtgtaaaactcttcattttcccttccaaacttcatgcatatgtatacaccatttttacataattataatggtagtatacatgcagtgtttgcaattcaatttttatgcttagcactattgcccccccccccaggtttaaaaaagtgtatatcatttttctaaaaactaattaacaaagcttttttttaaggaaaagaaacaaacataaaattgtttagatttatcagctgttaacattttgtcccaattgctttagcactttctttctctctatgtatacatgcagctactcacacacacgtagaacattttggtgtttaaagcatttgatatatgtaaatatcatgacatttcacacctgaatatatcagcatgtatctcctcagaacaaggccattctcttacataatcacaagacaattaatacagaaaatttattattgatgcaaaactatgtataatttaatttatggtcctcagtgccatttctttaaaaaaaaaccaatattttaaaatttctaaaaaaagccacaataactcccattcccttctttccccagcccctggcaactaacattctgctttctgtttgtatgaatttg

SEQ ID NO: 128031 - DNA, 2401 bp, Homo sapiens
ttaaagtatatttaaaatgttaacaaagggccaggtgtggtagctcatacctgtaatcccagcactttaggaggctgaggcggatggatcacctgaggtcaggagttcaagaccagcctggctaacatggtgaaaccccgtctctactaaaaatacaaaaaattagccgggtgtggtggtgcgtgcctgtgtttccagctactcgggaggctgaggcaggaggattgctcgaacgcaggaggtggaggttgcagtgagccgaggttgcaccactgcactccagcctgggtgacaagagcaaaactctgcctcagaaaaaaaaagtaaaaaaaataaataaatatagtgtattctttaagcagaaccaacctgtgtctgttgtcagagaatatgggcacgggtctttgcagactgaaagttttatggctgatttctgtttctttgcatctgtgtagtagaaatactgaccattgtcgtgttttcttccaggaatttatgcaaatattctcatgaggttctctcagaagagaacttcaaagtcctgaaaaatcacgaactctctggactgaacaaagaggaattagcagtgctcctcctccaaagtgatcctttttttatgcccgaggtaagttgtgattcctcagtttaaggagggagaatattactggcagtattgtgtcacagatattttggagtaggagcagagaaaattcaaaattaatgccagggttctgcaggtggtagtcgaggctgttattgagtgaactaagagatcccagaaatttctctcctatttgaggttttataagaatttgagtctggaatacctcttccactgggctgcaagggaaccctgtgtgagtaagtatgagctgaagatctgatagtagtcagactacttgatgctttaaatcaaggtggcttcttggaggagatggactttggaatgaggttgggaagttggcggggaagatgagggtatgggctaagctgttgtaacagagaccccctcaaaatacagtgattcaaataaaatgtaattttgtttctctatctcttgataatctaggtcaggggtcagcaatctataacccagaggccaaatctggcctgccacccttttttttttttttttttttttttttttgagatggagtctcgctgtgttgcgcaggctggagtgcagtggcacgatcttagctcactgcaacctctgcctcccaggtttaagcaattctcctgcctcagcctcccaagtagcagggattacaggtgcctgccaccatgcccggctaatttttatattttagtagagacagggtttcaccatgttggccagcctggcctcgaactcccgacctcaagtgatctgcccaccttggcctcccaaagttctgggattacaggtgtgagccaccatacccggcctgtttttataaacaaagttttgttggaacacaaccacacctattcgtttatggctgctttcaccctgcaagggtgagttgagtagttgcagcagaaacagaatggcctacaaagcctaaaatatttactatctgatcctttatggaaaagatttgccaactcttggtctttcctgcatatggacaggggggtagcctgagttgttgggcagctagactcaatgatgtcatcaaggggctcaggtcagtaggtcagctctgttatcttcaaaatgtggcttccgtctctgtgtacaatgagtctgtactcactgtcaccattttctagccagtggaaatgtagagaggaagtaaatggaaggcaagcagtttccttttttaaaagatgtgacatggacattgtatatggcacatctgctcaatcacattgaccagagattattacatgtcacacttagctgaaagggagtctgggaaatgtagtttctgtctgggtaaccatgtgtctacctaaaacttgggagcttctattactagaagaaagacggggacaatggtggataattaacagtttcatccactcaggaatatagacttaaggatcagagaatactgtttaagcctggtatctggctggataaaatccatgaatagagaagttagcctcacagttaaagagaggcatagaaacataatgggtgagtggaagggatggagaaaatgtaagtaaagttgaaattcagttgcactttttttttcttttttcttttttttttttttttttttttttgagacaggatcttgctctgtcacccgggctgtagtgcaatgacatgatcagggctcactgcagccttgacctcctgggctgaagttatcctcctgcctaagccccccaagtatctgggactacaggcatgcaccaccatagctggctaacttttttttaaattttagtagggacagggtctcac

SEQ ID NO: 128032 - DNA, 1074 bp, Homo sapiens
ccacaccctttatgtgatttatgtccacgatctctgcttgcaccctgcttaaatagttgggggaacagtggcttaaataattcaggatgccgatttaaatttttttggtttgaaaaagtttcagatctgtttttgttcatttttccggcttgggtttttgcttgtgttttgggatgcgtgttcattcctggatcttcctcttatctgtcacctttgatttctcattttatcagtcatcagtttcccaaagtaggattatcgtgactactaaattaaataacataggtaaagttcctgtcacttagtaaatgcataataaatgttaatttctgtaattaacccaagtagaaggtaagtgtaaactgccccaccttcgtggctgatcaatatcctgaaattagggcaaagataaagcccctaagaagccgctggggagaagtctagggaatgtgggaaaacgaagcagaatttgccagggaaggggctgcaggtcagaccaagacgagacagagatgttgcaggttgagactgggttcagggtgagaatcacagaatctagaggaataagaagtttgcctgaggatggagatgaaaaatgagaaggaaaaccaggcccccaggtgggcagcaccacggaccccagccagtgcagcatgggctagctttgacttttctttcagacatgagcacctttggaaaagcctggacacctgaggttccaggcagagggctccccattaggctatctggcttcctttagttatttagaggaagtgctgacttcagggaccctggaagtgccacactcctcagctaggacaggacaggaacaattctgcatctctctgtgacctgcagaggtgccgtaggcttggctctaagttcaggacgtctgggctggagctaaagtggaagcaaagattcttaattccttctgactaacaagttgctatgtaatgcccaaccttgtttttactaaccctgtctttagactctccctttcctttaatcacctagccttgtttccacctgaattggctctcccttagctaagagagccagacagactccatc

SEQ ID NO: 128033 - DNA, 1054 bp, Homo sapiens
aagttatcacctcctactgcaactcgccctctttgtttgaggtttatctgctccaagtgtgggtagcattctgcaaacgcttgttttgtcctgggaaattcataataattagtaggagagctctttttgtactggcgagaggggagttcccacagcttctaaccaaccttctgtaggacctgttgtcctttttggggaggtggccctgagctgcctatactccaagtatgttcgtaaaaccagattgttagacatgcaaattcttggcctccaaccctagatttactgattcagacactccagggtgggggcccaggaatctaatggacctcctgtctaggtgatgctgatgcatcctaaaagattgagaatcaccctgggatgtctgggatggggcctgagaatttgcatttctgaaaacctcccaagtgatgctgatgatgttggcctagggaccaaattttcagcatcgctagcttagcaaaccccaagaggccacgggagactttcatactatttcctggctgaagcccactagccaatattaggcacctggagctgggacagagtgatcagaagaaagtcggaaggaaggttctgccacctgaaacctacacatgacccccttcaagctctgatcgtggcccatgctgctgagcttgtctgtacaatactaattttcactcgcgtccgtgtgaagagaccaccaaacaggctttgtgtgagcaacaaggctgtttatttcacctggatgcaggcgggctgagtccggaaagagagtcagcgaagggagatgagggtggggccgttttataggatttgggtaggtagtggaaaattatagtcaaagggggttgttctctggcgggcaggggccggggacacaaggtgctcagtgggggagcttttgagccaggatgagccaggagaaggaatttcacaaggtaatgtcatcagttaaggcagaaacaggccattttcacttcttttgtgattcttcagttacttcaggccatctggatgtatacgtgcaggtcacaggggatatgatggc

SEQ ID NO: 128034 - DNA, 1032 bp, Homo sapiens
cgtggctgcagccttaggttcaccattttctgcagtgagctggggctctctttgtgcctgctgtgttctgggtaatacagttgtggttaaaggaagctcatttttttcggctccaccctctgtgtctccccacatccttcgttaccctgctcatgtgatctcgtctggtctattctgtttctcctccatctcactaggggctctagaggcagtaaaccatccctaccctctaataacacggcaatttaatcttgaatatcagaagtacaaatatggggagtaggagcctcgtggctttaaaataatatcgcgttagggttggttttgactgatgacattttattctttagctcaatgttctctagattttatctttcacacatcctggttccttttttacctggcttatatcatggtgagtgatttcctgttttctatacaaatcaacgatctttttgtttttgccaaccctattaggtgttagggagcagaggggatgaaggagagaagggaaggagtacttcgatataattactgtccaaaaaaaaaaaaaaaagactcgggttactgtctctttttggtctgactgttgagttcagagctagtcctgtgtttaccgatttgtgaagtgcaagagctccgaggtgaacatccagttcaggaatctaactcagaatcaaatctgacaagcgcatccagtgattctcagctcagactgcacgtgggaatcacccgggctcccaccgcagtaagatgaagccagtctccagggtgtggcccagggttaggttattttcaacactgcccagttgatcattatgtgtagccaggaatgagaatcactgtgcaggctagttgtttagactgcacccgtggtgagagagagcgcttattgcctgggctaaaataacattttgttctgtggctggaagagaaaagtgaaaaggtcgtttgtttttaggcttttggcctgagctccttaaagagagacaattctgctcctttcaaggatgtctttgctgtttttttttt

SEQ ID NO: 128035 - DNA, 1017 bp, Homo sapiens
tattcatgatgttgtgcaactgttaccactattggaattccagaacattttcatcaccccaaagagaaaccccacaaccatcaggaaccagtcctcattctcccctttcctcagcccctggcgatctctaacctactttttgtttgttttccaattctggacatttcctgtaaatgggatctaataatatgtggccttttgtgtctgcttctttcactaaggaaaaatgatttgcattttactcttgcatgttctgtgttgtttgtgtgggcgtattcatctaggagaaatcttcctgaagttccttctgtaactaattctgcactgtccatggagtcatgttattgtcagactggtggccttagagacatgctgttttctgcaacatcgtgacacaaaagggtgcaccctgtaagaatcatttgggaatttttgttctcttttcacaaacactacatctcaaatttttaatttgatcaaatttgactctcggtgtctgcaattttctttagaaattaagctaacaaacattatgacattgtaatattgtgaaccatgataaaatcttaaatagtgacaaatgaagcatgtgataacacaatattttctactttttacataatgcagagatggcaaaattacacatttaaaataagtagatatatttttccatccattaaatggttctaatttgcttactgcttctgcctgtatttacttccaaaccaggtatctgcgagcttttcctgcggctactttggaacagaagaagccatagtaacatagaggtgaaaaaggggtaaaaggtttcaggagcacctaggatttcaggcccagtgagaaatcacttcaaccaaattgcagcaggggagctggtctcaggttgggaggagagaggggagacttatttcatgatcttttctctatttcccatacagggaagagatagtattttattattttttatgtattattttgtatttacttatttatttattaaaatagagacgggggtct

SEQ ID NO: 128036 - DNA, 1027 bp, Homo sapiens
tgccattttgcctgggctgctctcaaactcctaggcttaagcaatcttcccagcctcccaaagtgcaggattacaggcatgagccaccgctcccggccttgtttgactttttttttttttttttttttttttgtgacagagtctcgctctgttgccaggctggagtgcagtggcgtgatctcagctcgctgcaacctccgcctccccggttcaagcgattctcctgcctcagcctcccgcgtagctgggactacaggcgcctgccaccacgcctggctaattttttttcatttttgtattttagtagagacgggatttcactatgttgcccagtctggtctccaactcctgagctcaggcaatccgcccacctcagcctcccaaagtgctgggattacaggcgtgagccaccgcgcccggccttgacttcttaactagctacttacattgtccagtaactatatgaagttattaattcaaaaatttattttgcctgcatgatttctgttaactgtttcaagcaggctgcctaagggtctttaccttgctttgcggtttttgccgatgtgggtgtttcctctgggttctttcctgtttgtatgtctttccttttcggttaattcacattttgggtgggggtgggtagatgggaagaggactagttgactgtttcgcaagttgaatagaatactgaaaaacgcaagcatcagagaatatttattctgaacccataaaagttataactcacctcctgggataaataagtgttcacatttttcagttttgctcctcttttaaaatatactaaacaatcataacagacctaaggttatttttttctcatccccagtctcatttccctttcctaagaagcagcttcaatcatgattttggtgtgtatcttgtccttccatgattttataatttcctcttgtatatgtttgcatccatatacaaaatgtagtattttatgtgttttagaatttttattcaatgctgtgttttggagatctattcatattgctac

SEQ ID NO: 128037 - DNA, 1623 bp, Homo sapiens
gtaaaaaaaattacaattttaatatcatctattgtccagttggtattcaaatttccctgattgtcttataaatccaacttttattttcagggaaaaggatacatagacataatccttttaaaaaaagatttttttaaaattttttgagatagggtcacccaaggctggagtgcagtgacccgatctcagctcactgcaaactctgcctcccaggttcaagcaattctactgcctcagactcccaagtagctgggattataggtgtgtgccaccatgcttggctaattttttgtatttttagtagagatggggtttcgcgatgttggccaggccggtctcgaactcctgagctcaagcgatctgccggcctaggcctcccaaagtgctgggattacaggcctgagccactgcctcacctggcctataattgttttcatatgttacatatctaacatttaaatactttgtttcaatttgttgtaggcaatatgcttagaaattttagttttatgaagtttattatggtatatttttccctggtttgaaacagcaaaactgttttaaactcgttaattgggttgttaacctccacttttataagaatatatataatatagggattatttggtctatctaaatttggatggaccctccagagaagtcaataaagtttattttttttagtagagtgataaaatcttatttcctaacatttattggcagagccatatttttaatttcattttatatcacttttgaatttgggaattacaaacttttaatctattaatgtataaagtgttgtaataaggacctctgggagaattttttttttgtcctcgggtcctagaaaacatgtttttttcctccctacttatgttttaaaaatattctcctcttagcgagtaataaaaccttgtcttccaaaacttgccacttgtgagtttaagaactttctttgtagattaccagttaatggggtctgttaactaattgatacccatcttgacattactattcagttcactaaactggtctctgtttacagggggacgatttgcattgtgctgggtgtataaaattttgtctgtggtactattatttatagataggatttatcctgtctattctgtagttcctgtcttttcttttgcaatgtttttagtgatacattttagttgacaacagggcttgcttcaatgttggataattgttttggtgaatcggtttggatatttctatttgctttgctgaaatatatgcccacacatggagttctaatcccacttctgatgcaaaaataatcactatttatcgaacaaataactatgtgccaaccactatgataagcactttggagatgatatccaggttagtctttaggatagctcctaaggtagtattttaagtcccatccttattgtaggaaactcgggcatggagcctttcagaaatctactgaaagtaacataactagaagctggcaggattggtatttgaacctagatctgcatgacttccttttttttttctttagaaatgagatcttgctttgtcacccagactgaagtgcagtggcacggtcatagctcactgccacttcgaattcctaggctcagatga

SEQ ID NO: 128038 - DNA, 1114 bp, Homo sapiens
tagtgcctggaggagaccaggctcaacctccacccctttccccgcccgcccgcacgaatcagaagaataaagtgctctggagccagccagggcctagagaagcggtaggcaggtttgggaaggaaggaaagagcctcccgtctttggtatcttgagtctttccctccctactacctccttccctagacgtggcggagccagtaacccagccgccctgggcccccggtccgtctccgccggagcgagccgcaggtctctctgcttgtccctcccttcccggtcacccccatgcccctcatcaccgcttttctgatgcctggcgcgtagcaggggtggcccttttccaggttcctgaagttgtagcagccgcgggccttccctccgggtggtctctctacggtggcgcgcgcagttgaccgcctgccttgggacaactctcttaaatccctttgaagcagtgtggctcacgtctcgggccactgcttctgttgtttccgtttgccttttttttttttcgtctaaatgcagatgcgctgcaaggtttgggttaagactcttgagtgattttcttcccagtttctccctaagagagcttgctccctcgaggacagctgcacatctaaaaagatggcttccaggtccacattcgctgcccaggcctttcccttgatcccaagcccttcctctcccgcgtgtgtcctgtccatggagtcaaactcatcttttcccccaggcagggttttaatcctcctcacaatctgtcatcaccaagtcctttttgtgaagtctctttcccttcttggcggattctgccttcccatctaatttctgaatgaactgaatgaacgccttgttgaattaatgaatggccagtctttcctcccaccctttctgtcactatgtgctctgctcaattacttttctcgatacagtactttttacacttggcccattcttaaacactttgacttgtgtcccagggtttaaaatggttgtcagcaaactttttaggctggagtgcagtggctccacctcggttcactgcaacctccacctcccaggttcaagcgattctcctgcctcagcctcccgagtagctgggattacaggcatg

SEQ ID NO: 128039 - DNA, 1027 bp, Homo sapiens
ctaggtcggtctcagtcccatcccgatgctagccccgggaagctcctggagcgcctctggtttccgggtgcgaatagtaaactgctcgggaaaccccagaaccctccctttgaggaagggtgcagacggcgtctccgtttccacggaaacaggccgagccatgtcgtcacttccgccgacctgtctggactccagactgttgggaggaaaagaggaaaactgagcaacagccacgacagtggacgcgagcgtctcctctgtgcgcatgcgcccgctcagcggcctgcttctatttatgtgggggatccaacatggcggccgcggcgaccctggcgatggcggtgaagcccatcagaacgtagtagcggggaaggggacacggtccgcactcaccgtggcgccggcggagacggctgagggtggtggagggaagaaaagcgacagagagcaagaggaagggcgggcaggcacgcagcgcgccgtagaagcgagcgccggctcgagcaaaagcggagggccagaacagtggggatggcggagccgcgcagagtagcgttcattagcttgtcaccggtgcggcggcgcgaggccgagtacccggggcccgagcgtgagcccgagtacccccgcgagcccccccggctggagccgcagccgtaccgcgagccggcccgggcggagccgccggccccgcgggagcctgccccccgctcggacgcgcagcccccgtcgcgggagaagccgctcccccagcgcgaggtcagccgcgccgagccgcccatgtcgctgcagcgggagcccccgcggcccgagccgccgccgccgttcccgccgctgcccttgcagccgcccccgccgcgggagtcggcttcccgggctgagcagccgccgcggccgccgagggagacggtgcgcctggagctggtgcttaaggaccccaccgacgagagctgcgtggagttcagttacccggagctgctgctgtgcggagaacaacgggtacagaagattcttccctcctgcccca

SEQ ID NO: 128040 - DNA, 1147 bp, Homo sapiens
ccccagtctgaagcagagattgtgtaacccctctcgtatcatcctcatcctcatcactgtttgttttgctgggcgccgtggctgctgaggtgtgcttgcgtgcctgtgatatttttcttaatcgaagggaatttaagaataattaaaggttttcagagactaaggatcccactttaggaatggagaagtgggttagttaatctggttactaatttttctctcgtgttggtattggaaaacctttttagctttccttttttgtggagttcgttcatattgtaattgaatgggaaggtgtctcctgttttatttgacacctacccgtcatattatttaagtgtactatcattagtttatagaaggatattgtattcagcctttgtaattttcggaggatgatgaaaaaaatgtcagctttgaattttttaaaataattgaaaatatataggtatgcttttgatgtaagaggtgaacaatggagaaaggataggggttatgttcgtaattgtaatttttattgttgtgggttggtggatcttcagaagtaagttagaaaaggaaatgatagattaacagtaaggaaagagaacagttttctctgttgcttagcaattatacccgttattaggttttgctttagcttgagtctaatggactccagaagtcccttgttttgttttcatcttcaactacctttatggtcaaaatgactgactgcttagtcacaaagtatcatgttgaacaatttcactaggttttgtttacttcatggccagctaatgttttgatcattatttagaaatgttatgtggtcaaatcattacaaaatgttttcaaccaaaatgaattgtttaaaggtagagatcattttggtcacttccacctaacattttgctcgtcagactcacttgaatgccccttctttataaatctgaggtcacttttttcccaaaagaatattaaaaatattggattggagcatttttcaaacattgtatttgagctgctaatctaagttggtttgcagtttttgtaattttcataaattacaggagaaaagcattatctttggataaaaatacatagcaataacgacatttactggttcttactgtgtgctagacacagttctaagcactgcacatgg

SEQ ID NO: 128041 - DNA, 1717 bp, Homo sapiens
atcctcactttacaaatgtatgtaattttattagtacttctttccatagtgatacaatttgttagtaaaacaaaatttcttaaaattaactcatatagtttagaggattctgccaaaatgacgtaaaatgtaagtcgcagtagaaatacaaagacctttattatgtctctgtttatgctgtaatattcacacgatggcaaattaataatgtgtatcatttaattataaaaagaaaaaggtttgacaccctagctttgttaacttgataacaccagaactactactttcatgcaataggagaaagaggaaaaattccatttaatttttctgtatacttattaacagtataggtgtctattggcccaattatctcgtatatcaaccttctatttttttcatatacctctgaacaaaacaaaatccattgtatataatcacctttgcaacaaagatttgccacattttcctgtgattgctgccagtgtatatccttattatgcaagaaagcatagaaaacatatgtttaagtaaaattgtcatggtttcatgaaaggaaatcctagaagagagaccatcaaaaagcaaaatgcgaacattagaattggtctggaaagttggtggttcccaaaattagaagaattagaaaaggaagggctccacatttttgaaatagccatctatcactaaataagattttagctccagatgctgaaattggtagatgtggggctattaaaaaaaaacaaacaacaaaaggtgtgttacatatggataccattcatgtgggtgcatttaaatcagttcccttcttaaatactaaatgaacagtaaaaccctgatttactggaacataatcagaaatttttctatgctctatttgtattaatgaggaaagcacaattaaataatttatgttgggaaaataggaaaaacaaaaccacaggttagctaaacctttaaccttattgtctctaggcagtacagtgctgtgattgagatggtttaggatgatgactggcattggaatcatctctatcctgaaagattaatttggtcaccatttctggctaaagggtaatagtgcattttagaaataaattttggcaatgattgatacacaagaaaaggtttaactcttagtaaaccagaaaaatcagttaaccagaacacccatttgtgaacatgcttaattgaacatttactgtaaaaagaaaaataagtgattaagtgtgttaatgtaactatactatttgagaattccatggtatttcattgtttgcgtatttttgatgaaatttgtgaaagacctcctgaaaatggtgttgatgagttaagatcaaaggacaaaattattgcatcagttttgcatgtgggtagttgataattttcagattttttttcacctgaaaaaacaaaaaagcttaatcttgattgggggagggtgtttattcttaactgtgaaagaaaagtgagtccattttcttaaatttgtttttgtaggctgtcaagagaaaataagagctgtacttttgatacctacataaaatacataaaatattttagaatggcatataaggtgattcttattaaaaatatagatccatgtgtttatatttatacatataaaatgagtcataccatagtaagtatttgggcttcacagtgcaagagggagcagtttgtaataggcatggcgattgcttactgtccttaacct

SEQ ID NO: 128042 - DNA, 1095 bp, Homo sapiens
ttcctggggattttttttctttgttattttggatgaggtgaccatgtgatcattttgcaggtgaagacaatttggattgttgagttcttactcatcaaaacactgtgaaatgtatatgagtccattataactgtaaattttttttgctatgaaccaacttttttttttttagttttaatacttctgacttacttgttagtattaggaaaagttgtctcgtattggttaaatttaagatatagtctctgagtaataatataattaattatataacatgttatatattctcactagtttatttcctttcagatcacatttattgaaatagaattgaagtggttgttacataatgataaataaacaaacaataataatatttgtaatactaatggatacttctctttcttttcccattcaccttgaatcagaagaagctcattcacacagaagacccatttaatgatgaacatcaggagaggcaagaggtggaaatgttggctaagaagtttgaaatgaaatatgtgagtataataaactgatcacttaggtaattttatcctattgacctgtttgctttctgtggctggttgggagggcctataaatatccgttgcctgccttactttgttctcaccaatggaaaccaaatgaatggttagacagtcaaataaagattccaacaggcttgtgatagttaaagtagccatcattcatttttatttttatttatttattttggaaacagggtctcgctctggtgcccaggttggagtgccgtggtgcagtgttggctcactgcaacctccgcctcccaggttcaagcctttctcatgcctcagcctcccaagtagctgtgactacaggggcaacaccacacccagctaattttttgtatttttggtagagacggggtttcaccatgttggccaggctggtcgtgaactcctgacctcaagtgatccatcctgccaagtagccatcatttattatagtctttctagagtctgggcggtttgctttacatatattatctccaatctttgtaacaaaaccacaagctaagtaatattgaccatattttacagatgaggaaac

SEQ ID NO: 128043 - DNA, 1995 bp, Homo sapiens
ccagcactttaggaggccaaggcgagcagatcacctgaggtcaggggttcgagaccagcctggccaacatggtgaaaccctgcctctactaaaaatacaaaaattagctgggtgtggtagtgcgcacctgcagtcccagctactcgggaggctgaggcaggagaatcacttgaacctgggaggcagaggttgcagtaacctgagatcataccactgcactccagcctgagcggcaacagagtgagactccgtctcaaaaaaaatttgagggaagagaggctaattaagacattcattatgtttaggtgaaaaacaaaggccagcattctagtattgacagttagaatggaaaggaagctgtagatatggttaatcatggcaacaaagatttatggggagagacacttggaagcagaaattatgagagacttttgaaatagcattattgaggtataatttaaataaatataattcatccgttttaagcgtacagtttgatggattttaacagatgcgtgcaatcctgtaaccactactacaatcatgatacggaacaattgcatcaccccagaaaattccctttacagacagatctgtccctccaaacttagcctctggcatcctctgatctggttcctgtgactctaggcttttctgatgtttgtttgttggccttttctagggtttcctgtaaatggaatctcatgtcttctgcgtctgggtactttgacttagcatagtacttttgaaattcctccatgtattgcctgtgtcccttcttattgccgagcagtaatccactgtattcctactgtggattatgttccaccgttgtttatccgtccaccagatgatgaccgttgggttgtttccagtttttggctgccatgagtcaagttgctataaacgtgagagtgcaagtctgtgtgtgaatacacattttcatttctcttgggtgcatgtaacagtggggttgttaggtccaatggtaactgtatgcttaataagaaactacctgattcgctgagagagagctttaaaggaaaaaaaaaaaacaaaaaactaccaaaccattttccaaagtagccacatcattttgcattcctgctagtgatgaatcagagaacaattgctccatgtccatgttagcatttgatgtcatcactcttaattttagccaataatggttttaaggcagaaaaaatagtaaggatgaacaaaattggaatgtcaagtgggagaagctaatttagagacaaatgacagtggaaacactaatttcagttttgctttattagagtttaaggtgttttcaactaaaaaaatgaccctataggttctataacttctcatatagaatttttaaaagaatggcctgttggagttaggcagtcatgagtttgaagattggctcacctattttctgtgtgaccttagataagttacttgtcctttcctagccttcgttttccccatttgtcaaatgtgaaataatagatgattgtacttagtataggatctgatgcaaagttagcattcagtgaatggtagcttggtatttaaatatatattttatgccccagtaacttgtgaatttcttgcaaatctgagcattttttttctttctagctgttttattccccaactgtgttaattccccatactagtagtcagagtgattttgttaaacactgatcttgtcagttacttccttgtgctgatgccttccacttgtccttgtctgggtatgaatatcttaggaagaaaccttgatgaggtcctctgttgaaaaggtctcctttcaacctttttcctttctaccatttataattactgtagtcatttgtttaatctttctcttcccctctctgtacttaactgcttgtgtataactataaaatccatgaaggctggcacatggtaagtgctcagtaagtttgtttaatagatcatcttgttttaagttacttgaagacaaggacatttcatacttaa

SEQ ID NO: 128044 - DNA, 1058 bp, Homo sapiens
agtatgatgtatccctgttgacgttgactgtagtcacctagagaggtagtgttggccaggttttctactatgaagttactctgtccctcccctttttatactctttggaacaagtcactaagtgcaatttgcattcaaggtgtgggaggacttaaacctcctggagagggggactatctgcaaaaattatttgaattcttctaacaggtctttttaaactttatggaaacagcatgagtaccaaatcagtctaatgtatctgttctttgcagggtgggaaaccccgtaaacaccggaaggatcggctacaagatttaattgatataggctttggctatgatgagacagatccatttattgataactcagaggctgtgagtaatgtatctttaatatagcagcaaattcattgtttgtatgggatagtagaagtcaagggtaaagtaacttaaatagtgcagtgaatgtttttatttgtgctttttaaagccatgttcactacttaaagatttctttacccttttttttttttttaaagaatactgcagactgagaattttgtaattttgggtttgtctgtggtgaattgttattacattgttaaaatagaccaagttttatcaaacttttttctgtaaaaggccacatagtattttagactttgtgaaccctgtggtttctgtcacaactacacaagtttgccattgtagcatgagagcagccatagataatacctaaagaattagcatggctgcgttacaatgaaactttatctatggtctgtgaaatttaaatttcatataatttttcgtgtgttgtgaaatattaatttcttttgattttttttccaataatttttaaaatgtaaaatccatttctagcttgcaagctgtttgaaaacaagccggtgggctggatttggccagtgcatctcatggtttgctgactctgtacaatgtctttattttcatatgctctgctcctttccagttcctgaaagaatctcttgggattctctagtagttgctcattttcagaagtctaattatagcgttgac

SEQ ID NO: 128045 - DNA, 1104 bp, Homo sapiens
taaaaatacaaaaaattagccgggcgtggtggcgggcgcctgtagtcccagctactcgggaggctgaggcaggagaatggcttgaacccgggaggcggagcttgcagtgagccgagatcgcgccactgtactccagcctgggcaacagagtgagactccgtctcaaaaaaaacaaaaaaaaaattctgctgtcccgacataaacttatttaccatactaggcagtctggtctgtagaagtaacatattgccagtgccctttggagtaaaatggccttcgtcttacaaaaaaggttgtcaaccaataaatcagggcatggaatgttttccggagtcttgacctcgatttgtaacttggtgcagaagtctagattgtaatcttaattcagtttctaatttgctgtgtagccaggagcaagtcttttagcaccacccggttttctctgctatgacttgcttaccccacagaattactgagccttaaataaggtaatgaatgtaaactagctgaagaaacatgaagcaagtgcaaagcatcagtagaagtgttatgtgtacattttgaattctaaataacccaagaagtaacttagccatatataaatgggcatcacatgtactcacacttacataaatagcttttttaaattaataaactttcttttcttagagcagttttagagtcacagcaaaactgagcagaaagtacagagtttccatgaacaccttgcccgcatgcacacactgccttcccccgctcagcatgctgtaccacagtaggacatttgttagagttgatgagcccagacattgtgacacatcattgtcaccgaagtccatagttcacattagggttcattcttggggttgtacactttgtgggtttggacaaatgaataatgacacgtatctaccatggtagtatcacacagaagtgtagttttgcttcccttaaaatcttctgtgctctgcctattcattcctccttccctcctaatcactggcacctactggtcttaactgtcttcagagttctaccttttccagaatgtcttatagagaaaatcatatagtatgtaacttttataaatagcatttttaatat

SEQ ID NO: 128046 - DNA, 1042 bp, Homo sapiens
aaccttttaggttctgtagtgcacatagaagcatttaagccataggatttagaaaagatttctaggaggaagtaatagctaaactgagctgtttccccattttcttcactgtaatggccatttacctatttgcctttcgtgggtgacattccagattatactgaagaaggtgctattgtaatagtataagttaataagaaattaagaaaactgctctgtcacctgtcaaattattattttaattctgtgcctgcttatttatgtgacactttaacgtttaaaatcacacatagcctaactgatcatttttgtcttcacagagttgtggctctaaattcacacaagtctgaaaaaaagaagaaacgttataaagattctctttctctagctgccatgattagaaaattccagaaagagaaggatgcattaaagaaggagtctaaccccaaagtcccagtgaccttgtcaaccccttctctgaataaacccccatgtgctgctgcagcactggggaatgacgtcccggacttaaatctgagcagcggtgatccagaccttcccatttttgttagcacaaatgaacatgagctgtttcaggaagctgaaaatgccctagagatgctagatgattttgacttcgacagattactggatgctgcttctgatggtagccccctatctgagtcggggggtgaaaatggaaccaccacccagccaacctacacttctcaggttatgcccaaagtggtacctacactcccagagggtctacctgtacttcttgaaaaacgtatcgaagaccttcgtgtagtaagtgtaataattctcttgctttttatttgctgcacaaacataagaattaatgcttttgttcgtttgtttttattttccacataacactggtataattgcttttgttttttaaagataaaaataataaactacaatctgaacatttttataactttttatttgccatgtttccttttagacctttcttttttctttctttctttcttttttttttttttttagtagagac

SEQ ID NO: 128047 - DNA, 1005 bp, Homo sapiens
actgtttctctccggggagagtcaaaagaccatccttgggacatagcatctcagataagcagagtatcagcattccattaacaggctttcctgtttattcctctcatgtctatcttaaaacgaatcttcccattttttggagcccatctgctttttatttcacagagggtatgcctccagtttcacaagtactagtgttctgagttgaattttttttttcccttttagtcactttcttattccctcagcctctttttccgctttcctaaacaaacatgtcttattttctgtattgagttgcccttctaagagaatatggaacatgattatttagagtaggaactcccatgaagctatccagttgtattggtgatgccttgccattgcttccttatactagggaaaaaagagatcaatttgttggaatagggaaccccccctttttttcctgattgaatttgacccggatcaataaatatacaacatgctgatgatttccttgcctactacctagagcagacgttgctcataaatgtttttttcttttttctcttttgagacagggtgtcactctgttgcccagcctggagcagtgatgtgctcatggctcactggccttgacctgccgggcaattgccagtgggccgaggggtagtataatatctctttgaggaaaggagcttttggttaattacaaatttattgtgctttacccaaaaccatagagtttgcccctgtaacccaaaaaatatttccagcttgttcatggttattgaagttctactcttaaactagattgatagaatacttttatagcattactatttattggtatggggctgggcgcagtggctcacacctgtaatcccacactttgggatcaaaggccaaggcgggtggatcatctgaggtcaggagttcgagaccagcctgaccaacatggtgaaaccccatctctactaaaaatacaaaaaacttagctgggcatggtggcgggtgcctgta

SEQ ID NO: 128048 - DNA, 3037 bp, Homo sapiens
ctactcgggtggctgaggcacgataatcacttgaacccagaaggcggaggttgcagtgagccaagatggtgccactgcactccagcctgtgtgacagcgagactctgtctccaaaaaaaaaaaaaaaattgtttcagtaaagaaaagtcttataatatttctgcacctatgatggtgataaaagtatgttttaagtagttacatatatacttgtaagatgcttgtaagatgaaagtaataaattggttgattaaaactgtcagatgcaaacctactttcttttttgccctgaaaacgcacatgaataagagtttttgggttcctttcactttggccttgaccttgcatttttacttgcagcctaagtcaaaattactaaccataactgagagaacaggataccaacgtccggttggtagtcacccaaaccaaacacgtgtcttcgtgttccagagcagtgtctattcttagggtactggtttcccatcacaatggaaattaaccagtagtagtctatacaagtagaatacaatgattttgttttccgttttctgtatgaaagtgttcacggggcattttgaagagtgtaatggaacactattaataattatgctgggcgacagggaaaaactggaactcttcttggctaactggaatatgtcattctaattttgtatccagtgtgtcttaggaaaagtcagtgctgtagaagaaatgtccatatttagatatgctaatatttcaaatctataattggtatctaaaacataaattttatcttttgaggacctgcttacaagatttcgtaaatatgtctgataaaaacttctagtatgtttttctttttaggatgatcgtttaagagaacctctgcaaaaactgaaactggctgttagcaatgtcatgcctgaacagctatttaaataccaggaggactgccaggctcgtagtcaagctaagtgtgccaagtatgtatctcttctatttggactggcttttgcatttgagaagtgtatgtacgttatgtatgtatgtatgtatgtatgtatgtatgtatgtatgtatgtattttgagacggaatctcagtctgttgcccaggctggagtggaatggtacgatttcggctcagtacaacctccgcctcccgggttcaagccattctcctgcctcagcctcacaagtagctgggattacagacacgtgccaccacaccaggctaatttttgtatttttagtagagacagggtttcaccatgttgaccaggctggtctcaaactcctgacctcaggtgatccagctgcctcagcctcccaaagtgctgggattacaggcgtgggccactgcacctggacgtgcatttgagaagtacttttagctgttctgatgttaagtggacctcattctcaagtagaaatccacatatactgctgacttgatataattgagtattttgtaaatggcactcagttgctttgcagtcagagacaaaaggtgtctgttgattgattgtatggaggtgatcaagcaagagctgacactggtgagagatttcacaaccccagcttgactgactgtggttgaacacaagtgttttctgacctaaaaggtgaatgttggtgcctttacattataatctgaagtccttatttaccaaactactttataactcctttcaaatttgaagtattatgtggaaaggtagattccgtctttaccctctcttttaacattccattaagcaattcagcaagtatttatggagcatattatataggcagtgttgggttaaaagtttgttttgtaaagtgtttttcatttttagattgcagacagatgaagaacgagaaaaaaatggatctgaagaggatgatgatgagaaaccaggaaaacgtgtcataggaccaagaaagaaattccactgggatgacactatcaggtaagatttaattagttttcacttttaatatataatgcagaagtaagattcctcattaaaaaaaaatctataataaatataaaactagattggaagcaaccaaagattagtgtgtaggaaaaaattattcaagagaagattaattgggctctaatatcctcagagtattattgcttttattttcatatacactgtaatactttttacaaactaatctaataatggtgtaagtcatactggtttcagaaggtgaagtactttcaacatatttcttctttagccatctttctcaatagtatttctataccccaagtagagaaccatccctttcaatctttggtgctttgattaaagatatcaaaggaaattgtttcatattgcaggtttgactgtggtgcaatgaatgatatatgttagaaattgtttgttattttctgaatttttcacataatctgtattattgctgccaaatgtatgttcttctaaaaaaagtttcaaatttaattttcaatctgtttagaactttgttatgtaaccttgttgagatcaaattgggatgctatgagttagaaccaaataaaagccagtctgctgaagattatcttaagtcttttatggagacagaagtgaagcccctgtggcctaagggctggatgcaggcaaggtaagaaatgtgacttactggattttattttattttattattattgctgttattaaagatatacatacacatacacatatgtgacattgattttgctaagaacctaatatattcagcatgctgtctagtcatctcagatgatccttgctttgaaaaccttaagcacttaaatgacaaaacagtcgcgcacacagagatagatgtaaaggtgatattttacttaacattttttttaacacccaaatttgctagtagagaaaaagagaagagggaagactcccaaatggttatgaagtttgggagaggagctttataggggtaacatgaagatgaggaacctaatatgggattagagcataggaaaagagacacagccttagattctattcaaaatagtcagtgtagaggccaggcacagtggcttatgcctgtaat

SEQ ID NO: 128049 - DNA, 1047 bp, Homo sapiens
aagtaaaaattaataaacttggctagttcaacccatgattttaattaaattgctccatcttctatcaacagaaaagatctgttggccaggtgtggtagctcacccctataatctcagcactttaggaggccaagggccacagtgagaggattgcttgaggccagggattcaagaccagcctgggcagcatagtgagacccctgactctgcaaaaagttttaaaaattagctgggcatggtggcacacacctgtaattccagcttctttgaaagctgagttgggaggaccatttgagcccaggaggcctaggttatagtgagctatgaataaaactctccataaaatagattattgagtatactgtaccattataacttttacttggtaaataagcagtaatagtctactgaaaattaaattactttaaaaaataaaacaattatgttactatctgctataaagaaaataataattgtgttctttaaatttttccagaatgctttttaaggaaagccggagtgttcataatcatcttacttctgctccgtgagtaaatgcagactccagattgcttcatttattcacattatgtgctttagtgaacaaaagtatcatttattaaatgctagttggaataggacttaaaaagatcattttgaccattgactatttagacttcagaacacatttatctattgaaataattgtcagggtactctctaaacacctactaaatccacactgtgacacataatggcctgggattctggtagtagggaagcatgaaggctcagggattttcctttgttcctgggccttctacctgccagtctttttctccacctcttaatgtccatctgcatttgtaatctacagccctctgtgtcctgagtttaccaggacagatccatatgcacacccaccctcgctgcactgcagagtgttttattccacaaaattaacctattcttgaggtcttctgttcaaaaccgtgtatttccttagtgatgtgattactagagaaagatcttttatcccctccacat

SEQ ID NO: 128050 - DNA, 1744 bp, Homo sapiens
ttttagccaagtgaaataggcaaggtgaagtattttagcttgtcaacaatttaattattcaacaaacatttgaatactttgacttactatggaacttgttcttttttttcatcttcaaactttttcttagttttccaaaagtttcaagattccatagtaatttttcttgccctttttctccctgtcattttgacattttttatttgaatttttacattacaaaaatttttctttaaaagctcagggttttttttgttttggttaagttaaatctcattcacaccttcttggcatggtttaatttgagcctgcggttccttgaagctctttttttgggggggctattttatggtttatttacatttaattttttaaaaattgtattatctacatttcatgttttactagttgtttggcctttcaattaatctgaattggggaaaatgttgctacatacttcgtataaactgagcacttaaatacggttccttcaaagagctttccaaatagcagaaggaattatttaccacataattacaaagctatataactttctaatgagcaatataactgctactgaaatagccttttaaaatctttttatcttagggcaaagaaaaaggtgattcctgcacctaaacccaaagtaaaggtaagtactgaaacaaaatatttaattagttatagttggtgaatgttgaaatacattcctaagatgaaaaagatgtatggtatttagcagaggtcagtaggcactataagatagatgttttcaacttcataataatcttagtacttttgtatttgggagaatagattcctgtgtagcagtggggaatatgcatacaccaattgtgaagcttaactttattaatacttggaaatgctaggtaaaatacaacaaatattctttcatagcataggtgagattgaaaaatatgtaagaaaaattcataagaccagaaacaaaaaaggagctgacagtgttaatctgtcgcttacactttggttgcccttggaggcatttggcactttctacccatcactttatggtttctttttacgtttcttctcagagcatagcagttagggttttcttgggcttgtacaggttaaaacttgggatgaaatctgtgtaaagctggaccttcaaacaataacatctttagtaaaagaaaggactagaaagaaatccagcaaccagcagagacattaagtggctgtcttggactgggttctggtttgggggaagaatgtccttgctgaaaaattttcttggcttaggagtttcagttacactacctctacaatctgagaaaacgccaagctgaaaaagtagcttggttactggattagtagtgacccggggccactggcaaaagcaaattctctttggtataacgtgccctcttcagaggcctcaaaggcattcctcctataaaccatggcagacctgagcttgcagtctgaaatacagaatacatgagagaataagttactatgagtgagattcagtaggaacaataaacagcagttagatccctaagacggacaagtagtgcacttatggaatttagtacataaaataatttgactgaaaaatttttaatatttagagaaatagaaaagggaataaaaaatatcctatcaaaatagacaaagtagatttgaaagagaatcaaaatataacctctagaagtaaaaactataatcatttgaaattaaaattttaatgaaagctcat

SEQ ID NO: 128051 - DNA, 1424 bp, Homo sapiens
ctgccagtataaatctgcacagtattctattagagtggatttaatggttttataaataaaaattaatcaaaaagttattttaaaacagcagttttatactagtaatacttccaatattgggatacatttcctaccctttattgtgtactttttataatggaattttcactaatcatgtaagtggatggcatatcaaaacaaatgtgtttcatctgcattactcattcttcttagcagacatttgtgaccttaatgcagttacacttgtacttccaattggtagtgaggtttttaatcaggggttttagagtaaaagcttagaaaaaatactaaggaagttagagtgtaacagtattcttaacagcttgcttatgtaataccttaggaggtgatggtaaagacccttcctctccattctttccccactatgcttaaggtaagtgctatggttgtatcaatcagtatgtaatataacactctaggtttgtttgggtttgtttaagaaactaattgaagagactttgatacgacttttatgtaataggcttttgcttctcagtcttaaaaataaaatgagtcaaatacttttatctttaaaaataaatagttgcttttaaattattttgctctttgaatattataaactgtgctctagttctttttcttaaatattaagaaggttgattatttgagaaacagactctaacaactcttaggtattcagagttgtaattcttaatacccttgttttcttagcatagagccctgctcacagcggacacttagtggatatatattgaataaatgacaaatgagtaatttacaaataaattacagattcaccataataaatagcataatttatttatgcttggattgaatcgtctgccactttgacgtaccagtttttctatgtactggctgtagggtagctgcaggacagggcatacaaagaggcagaaatgcatggaagcagaaagtgaaggtcagcctcctagcaaaccatcccagacgagaaggggagagtcttaatataaaggcagaatttattctgagtgcaggggaataaaaagagaataatctgaacagatggatttggagcaggatttgaagatctaatgcaggtgggggaggctcatcagtaatgtaactagtatatgaatgttccttccacttggtgttaagtatgacagctatgtgcaatatatcagatactttgtcttgtgaggacagctcagtcaggagctctgtcatctcaaaaattatttttgttttgatagtctctgaagatttccagtagaaaaacaattgtaattgtcatgagaatcttttagttatttaaaattaactttgtaattttttattcaccatttctatttttttccatatgatgctttacattaggagtgtagtccaaaaaagga

SEQ ID NO: 128052 - DNA, 1250 bp, Homo sapiens
actctcctgttcctcctcacttattaagacttcagataagccacttatgtaccgccttcccttatctaccccctcacctggaaatggttctcaagggtcccaccccctggtttctaggacagtacctagcaccactacctccagtaactatttagccaaggctatggtgtcacagatctccacgcagggtttcaaatctcccttctcgatggctgcctccccaaaacttgccgcatctcccaagcctgccacatctcctaaacccctgccctcgcctaagccttctgcctcacccaagccctctctgtcagctaagccttcagtatcaactaaacttatttctaaatccaacccaactcccaagcctactgtatccccaagtagttccagtccaaatgcactagttgcccagggtagccactccagcactaacagcccagtccataaacagcccagtggaatgaacatcagcagacagtctcccaccttgaatttattgccctctagtcgcacttcaggccttccacctacaaaaaatcttcaggccccctcaaagctaacaaactcatcatccactggaactgttgggaagaacagcttgagtggaattgcaatgaatgtacctgccagcagaggtagcaaccttaactcaagcggagctaataggactagtctgtctgggggaacaggaagtggaacacagggtgctaccaaaccattgtctactccacatagaccatccactgcctcagggtcttcagtggtaacagccagtgtgcaggtatgtatgttctgtacgtccatgtgataaactataagattgtataatgtcgtctttcttgtgggtaactttaataagctttttatgatatgtggattgttctcaattggcttattacagcctgcagccatggaatgttcctgatgctgacatcacagtgacaggcacacttgtagttgaggtgtttgttgggatatggattttttttttttaagtaacaaaggtgcaccagcattcagctgtctgacagaacgatgtcttcattacaagcaaccatcactaaatcaactttaaaattatttgacaaaacaaaactaaaatggcttatttcaaactttctctcttatcaaagtccagaacaaagtagtaacttaggaatttaacgaacattcgcttagctcttcccttccctttttctcctgccaattttcttatttttcaatcaaatttatacattcatgttattttt

SEQ ID NO: 128053 - DNA, 1050 bp, Homo sapiens
ggactgatatggtctgatttgcatttcaaaagtttactctgggcgttgtggggaataggggaccagtgcactcaccaaagtagagtatgtggtttaaaaaaaaatttaattgcggccggtcgtggtggctcatgcctgtaaacccaggactttgggaggccgaggtgagcggatcacgaggtcaggagattgaggtcatcctggccaacatggtgaaaccccatctctactaaaaatacaaaaattagctgggtatggtggcacgtgcctgtaatctcagctacttgagaggctgaggcaggaggatcacttgaatcctggagttggaggttgcagtgagccgagattgcaccactgcagtccagcctggcaacagagggagacgccatctcaaaaaaaaaaaaaaaaaaaattaatgcccactacgggaagagcaaggattcccttcaatgttttttcccctgggaataaaatgtagaggtcacggaaagtatttttgattatggggcataatctggaactatttacctgcttcatgctgacttcttgtgcatgatcccagatgataccaacattggagtaccccactgctgaaaggtctccatcttttaggatagagagatttgcaaatacccatgtcacatttagattatctgatgcttccatttatatttataaacaaattaaagtggatatagaagttacttgaaagtgtaaaatgttagacagttatggcatagtatcacttttttgctatacttgagttatttaattttggaaattgccctccctaatttacattttgcttttttttttttttttgagacagggtctcactctgttgcccaggctggagtgcagtggtgcaatcttggctcactgcagcttccgcctctagggttcaagcagctctcctgcctcagcctccaagtacctgggattacaggcagacgccaccatgcccagctaatttttgtatttttagtagagacggtgtttcaccatgttggccaggctggtcttgaacccctggcctcaggtgattcaccc

SEQ ID NO: 128054 - DNA, 1113 bp, Homo sapiens
tcgaattcctgatctcatgatccgcccaccttggcctcccaaagtgctgggattacaggcatgagccaccgtgccttgccaactctggttaatttttaagttgatgcaggatcttttctttcccagttgcattaagatactattatttctaacttggtaattttttcctaaatgtacccattttatatattgtggttggcacagtacaggaaaagacaggcaaataagaaaaactgtcaggttcaaacatggagtggtgaagatttgtacttaagtgtaagagcaaattttggtaaaaaagaaagaatgggtttgttgactataatgttatcattttataatgcctgaaaactaaggtttcaggcctaagggactggaaagaatggaattccctgatgaaagcagttgacagaagatgggggaacccattggagaagatgatttcagctttggatatgtcaagttggtgctagatattcaagtggaattattctcttaactctcagatatgcaggatggaaattgagatgagaggccagaactatggatataaatttcagttgtaaaatttgttatttttattaacaaataaaggagaacaggggagggaggcagttaaagaaccaggaagaaggctgcttgcggatattcttcatttgtttgttgagcagtggtgtagcctcttaagtgtataaatatatgtaatgttatgtggcatgtgtgtgtggaaagattgtctgcatttttcttatacattaacttaagaagtaccccaccagaagcaaaaggacaaagatttttaaaataatcagtccttaattaataatgctcattgatacatgtaataaaactggaaagagctaacattcattagttatttttaaaatagtcaacaaattccattttcctgatcaaatttagatttagatggacacggtggctcacgcatgtaatcccagcactttgggaggctgaggcaggcggatcacttgagcacaggagtttgagaccatcctggccaacatggtgaaaccccgtctctactaaaaatacaaaaattagctgggcgtggtggtgcacacctgtagtcccagctactcaggaggctgaggc

SEQ ID NO: 128055 - DNA, 1033 bp, Homo sapiens
ggtgaggctcatggcgaggaagaacaccttggcctcgtctctctaagctgatgtgatgacagtaaaggataccaagaaggaccctgaaagcagcagtctgcagcagccgctgcaggaaagatgatgagacaaatagtaaagtgagtattttcagagaccgagctgaaattgcatggaattacttactcatggttcaggtgtttgggctaggaggcaaaagtggaggagtgcgagtggaaggttgggaattagtagattgagagagtgcgtgggtgttcatgtaagtgccactaaaataacagcgtctaaggaacctaccgtggtaatgaagagcctgtctcacaacgtttctgtcagagcagatgtaaggcacagtcttgcatctgtgaggatattatagaaaataaatcaatttgggttgctttatttcttatgtattttgacccctggtttctgcacagtccacagcaggagcatcattattggctaatgcctcacctctgactctcatgacatcacctttgtctgtaacaaatcaaaatgtgactccttttgggatgctgggtggccttgttccagtgaccatgcccttccagtttcccttggagatatttggctttggaacggacacagctggagtgacaaccacctcgggatctacctcagccgctttccaccatagcctaactcagagtaagtggggctcttctatttggttgggctgtctagcttgacagaacaggaaacctcacaaatttattctaattaagagtagtccagttggagttaatgaagattatagtttttttttttttttttaagaaatgcagtttatatatagtaagtcaaattattggacactggggttttatatacagtttttaagctatctataccacatttccatcttaatgaaatttttaagaggaagtcagttgtgttgggttatgtgcatacacatacattaacataagtaaattttcaaaaacgtgctctagttttagaaggccttcgaagtcaggtgctgtgcctg

SEQ ID NO: 128056 - DNA, 1069 bp, Homo sapiens
gggcagaagatttgcttgaacccaggaggtggaggttgcggtgagccgagatcacgccactgcactccagcctgtgcaacagagtaagactccgtctcaaaaaaaaaattaatatgatccaagctgtatgcattatgtccttgtaggcagccagatcgctctgaaatctgacattaggcagtcagattaggcaatgtgcataacacactgggctccagcttctcgttttccccagcagtctacctccatagacactgatattattctgaagcccattttcaggatcttttgagcagaaataactgcttagctgccctcttaactttggaagttgactaggcctcacttttttttttttttttggccactgcattaaaaatgacctttgaaccagtttaccattaaccacagtgcagagatgggaactgaggggcaatcttgaggcaacagattgccattaatcctctgaaagacctaagtggtgagctgtctcagtcttaaccttgagaatgagtataaaaccacagttgtgtaaaatgggtaacacagagtcgtggcacaaatgtcagcaatcccgatcttcctgaactctgactagtttaaatatctaaagagaatttccctgtgactaaagcatgtccccccctgggtgtagacagctgcttggtataatgaatccagctgagggtagtgtactcatgggcagattggcatgaatgtggccacctgcaaggaattaaacaagcaggattcttgtggctcaaaaagaccccagtgttcgctcttacacgaactatcaaatttatctgtgcagcactgctattccgaggggagaaaggaaatatgactgtcagtattttccaaataactaaagttaaaaagtttaaaatttttcaaccaggcatggtagctcatgcctgtaatcccagcattttgggaggccaaggcaggcggatggcttgagtccaggagttcgagaccaacctggtcaacatggtgaaacactatctctacaaaaaatacagaaaattttctggacatggtgctgtgcacctgtagtcccagctac

SEQ ID NO: 128057 - DNA, 3288 bp, Homo sapiens
gaaagatgtagtgggtccctcggaggtaggaattgtgtcttctggttcctttataaccctctcacagcatttgacacaattggctgggacgtaaatgataaatacttgttgaaatcatatttaaaaaacactgaaaaccacagtcatttgagagaagaggatcattgttgttgagtttttatctccatgatgttttatcaacctctataatgctatatggcatgcaagatattaaaagtgatatcttttcagagatgtcatccacaaaagataaaagttaattgttgtttttgctttgtttttgttagctggtttttgtaacatatggacccataccaatttaacgtctctttttctcagatggaggccaaagtaaaggggacactaaattaccacggaaatctcagtgactgcccagcaagcaaaggagacgaaatgtttagttgactgatggaatctacctgatgggaaagtacttatgtggtcatagggctgctgtttctgtcgatgtttacattctctcgtcccaagcactgtggtgaggaggaaaaagaaaagaaaacattacttgagcaaagccaggtgcaggaggaagaaatgcttttgtgcaaagttagtgacctttggtctcttctaaagaatgacagagttaccgtattaacagacttgaaagagactcagttgtcaaacccacagaaatacaaatttgatttttcccgggggaggaagaaggaagtgaagagaatttgggtaaactccatccatcctgggggttggatctgaacacttacagacataattggtaataaaaggcattaaaaactggaattaggccagtttgtcaggaataatgatcatgtctatttgaatggactgtgtagcagatttgccacaaaaagaaataataatgattctatctccgatagacagtagctgcatagcacaccctcgaaaatcctgaacaaacttgaatctcctccagtgtgtagcaacttccctcaatcagtggactaaagatccttcaggaaagttattttagcacagtgatatatattattaaatcatctagatttttaaaaatcaggaagttgagcctgttgctcttaagagatgaaacctagatgtcccctttttgtaaaagggtcaatttcatcttccgttcagaagcaggtacttaactcttttcttcaggtgatttgtgcatctagtattgactggttaattcttatttccattcttgatgttaaaatgtgactgtgttcacatttttctcctgagaaatggggatctttacagggttattgctttgctgcttttagcccttgcagcaacataaactctaagtttccccagttcatctaacttcacaacttctccttctgttcttttagctagtggtccttcaggtgattattagctattggtataaacaggtagaagtgtacactatgtttcttcattggtcattcaaatggcatgaatatagtttttgaatttttaagatggtattttaaagggaggaatcacattaggatcacaatcacgacatatttttactccctgtatccagtgtagtgaaattgtttggagcatttgagatcctaaagcttcactatttactcagtgtattggtatgtgagtaaatctgcagaaaataagactccttagttattatagcttccttatgcaaatagcatattcaacaaaggatgttaagggaaaaatttatggttctccttggatacatttgatttgatgggtttttttgccgcattattctagttttttaagcttctgaatattttcatactatatcagagaatggtgtaaactctaaatggtataagcttcatccatttataatgacactaacctaaaaaaaatagactggtagtgacaagatttattgcatatgtgtttattatacattaccctataccattagatttactcaattaagagtattaaccaggcccttttttcttttatacacaaaagtcccagataccctacaggactgtgaataaataaccacagatcggttcagatctgtatgcctatattttgacttcaaagtcacattggcttgcttcatagcgaaaaagttaataaataactgaaaactttagttccaagaacttgttacagtaaagggaaaggattatttcaaaggaatcactgatataatttcttgactctaagaatttagtttatcaataaaacaaatatggatgtagtatgaaccccagtagatattttggaaggatactgggaggatgttgcagagaggtttgacttgaattcagtatgtttgatgaagatttgcttggtttcaattaaggaagcttgcccaatttttttaattttttcaaatgtagtggacctcttgcttttacgaaatatgaataaaaaggtctttgcttcatactaggggaagtgatgggattttcctttgggaaggtagcctttgttttacttctcataccacaagagaagtcgaagtgcgtattaatttctcttcctgaatacttgtatatatgtttgtctgtatgtatatatacatacacacatacattcatataaatgactagtttgagtcaaaaaatcatttgaatttcttaaaaccatcaattctgaatcatgccatatgaagatccctggtgactgtcatcattagaaaagaacaagataatcagttcttttccctgtaacattttatactaaccagtaaaaatatctgaaggcccttggctccaagaatacaatgtggagattcttctgtgttctctttagtcttgattccttgaggactactgtcagatccctaccttaaacccccacctgcactgacgacttacattcatttcagtcaggaccccccttttatgttgtatgaatcagtcaaacatcgttgtatttctgtatagataaagtatgatcagagagtttctacatgtaaatagtaatctatttctttcctagatcataacattgaaaaaggtgcccatactttatggtcacctgtctttaccgtttttattactaaaaacaaacatataaattggttattttttagcacagagacttgtgactcatactgtatttttgcacttaaaaatcaaattatgttattttttaaaatggtgagtcattggaaaggatatctatagagcaacgtgtatttctgaagagcattagcaacatccaaatgcaaaaataatcagcacacatgattatatcccactccttgggattcttgattcaggaagattaagctgtttgttttca

SEQ ID NO: 128058 - DNA, 1072 bp, Homo sapiens
caattataattcttgtatgcttttgaggtcagagggtaaatgaaatcgtgattttaaaacagcctgaagaaaaaggttttgggaaaggaaatgaggctaatctgtagtcataaaattctgatactttgcggaaattagaagatggtgatagtgcattcttttgtgcccaccccccctctgatggatgttgttagcccaaattacatttttcatatcatggacattgaatagggtttattgaatcaggaaggtaaggggaagaaccgggcacatatgtgttggaatactgtgggtttgacacctggttgaaaacaacttattggacatgatttttaacccaggatatttttttcccaaagcagatctaaattgtttactacccagggttggaaagggcaggcacctctaatctagtctttgtcctctggttgccctctcccacacccctttccacctatacttggttcaagacattttctgaaacgaaaattctgctgttgttcaaactgccattggttatgagaactctgcgtcctttgggatcatctcttagaactccagtgatctatcatatttgctgctacatttgtaaaatgaactttgcctgtattggttgactttaatttacagttctttatttctaggatgttttgtcctctagtttgactcatgtatagaattaggatactttattttaggagtgtaccgtaaaagcacactggtccctttgttgtttttattatttaggtttggaatttgtttgctttttttttgtttgttttttgttttgtttctgtttttgtttttttttaaagttggaaatagaagaatgagaaaaatctataatcaggccaaacttgagaactttcctgtgcttcagcactgtaattctgctgacctaatgttctcaaaagaggcacttttactttctattgtgcatgtatgattgttgttttttgcttttgagggggcttttgtgtttgtaataatgaagcagaagaaaagtgcagtagtagataaatgatcacaacatgttatgcaattttattttataaaattttaaggggaaaag

SEQ ID NO: 128059 - DNA, 5709 bp, Homo sapiens
atatatgtgtaagatacatacattacatatatataaaactaggagctgctgtaccattgcatcctttccaaacactcccctttccatgtttgcaaaacttctgccttgtttattccattgcttttagttgattaaagtgggtggattagaaaagtatcttttcggccgggtgcggtggctcacgcctgtaatcccagctctttgggaggctgaggcaggtggatcacgaggtcaggagatcgagaccatcctggctaatatggtgaaaccccgtctctactaaaaatacaaaaaattagccaggcgtggtggcaggcgcctgtagtcccagctacttgggaggctgaggcaggagaatgacataaacccgggaggcggaagttgcagtgagctgagatcgcgccactgcactccagcctgggcgacagagcaagactccgtctcaaaaaaagaaaataaaagtatagaaaagtatcttttcacaagaggccaccttcgccctttgaatatctgcttgtagaagttaacaataacaacacacacacacacacacacacacacgtcagttactacaagtaaaataaacttagtgaatcattgactattcttggatataacccacttttctgtgctctttaaacttggcataagtaatataggagacagcattggaataacaagagtaccttgcaagtcacattggtaaggtgcgctagactaaacatgtgacaaggctagcgttagaaccgcagtttggtgtctaagtttagaagcaggttagcaactgtcaacatgaaaaatgtatcatattttcttctggaaaatgatttttgaagaaatcatatagctgcatatctatctgttaaaaggttaataaactcagaagtagaaagacttcagatgctgaggaaaacatataatctatagcattcttgagagattttccatttgctttttatttgctagataattacatttggcttaatctgattttatggttatttagatttctcccttgagcaaaataacataattttcagtatctaagattcatcgattttttgttgaaaacaaatagatgtgacatgttaagggagaccaagttgaaccatccctcagacccagtacaaatatacctagtaagtgcccccctttcaatacattctaattgggaagaagaagagactagtggcttaaaaggagaaagcagaagctcctggtagtgttacctgatagcagaacttaccaggcagttggaattcacgagtgttattcttgaatgactatgtctagggggaatattgtttaaccttcgtgcctcagattacccattagacaattgggtataatcatattcacctacctcccagggatatcagagactttactatttcaaaaatattttgagtttttgtaaaatgtcctatataattaaaaatagtattatcatcttcctgcagaggctaaaaaatgttttccttataatgagtataaaaagcaccctatggtttttaaatttaaaaaaatcactggaattttaatttagatacatatttgttatttaaacattatctttgaggtgggataaaatgtttagtttcaggttaacaagggagagaaataacactaagtttaagtagttttttttagccttttacggtgttactgtgatttttcgtcaaggttgtggagctaaagttagataaagttatgatgcttggttattggagttgataaatgatcctggaagttttaactgtctcacttttccatcttctcagtctaatttccttttattgcttgtttgaggacggatagctaagctttttaactttctaagaatgagtatgatgtctcattcttgcaaatcagagattgtgtactaattccattaactgtaggtgtatccagctctgcactgaaggggtgagcactacacacagtcagctggatactcttgtagccattgcacctttgtaattcatgcttcttcaacccatgaaagaggtggagccatcagctgctcaggttgtaagaaaatgggagacggaaggcaggattcactttctaactgggtcggggtggggaaggtcagggtagaaggaaacatgttttccccagctcccaggaggagacgaagatcattttatcccaccttccatccctgtatattaagtagtactactacatagaattttcccgttatcgtttaaaataatagcaacaggaaaagaaaaatggatgctgcagttttagttggggctaaatgctgagcaacgattgttggagtgtgtgtgtaaatttaaattgtagcacatattcagggtcaggaaagcaaaatgttggggatgaggaaccagtgttaccaggttcaagtgagttagtagaaagcaccaggtccaagcagacaaagcatctggttaatttccagaattggctaaggtccactgaatctctaatgatagggtgtgtgtgtgtgtgtgtgtgtgtgtgtgtgtgtctgtaagtcactttttggatttttgttgctttttccagataaggccttagtagcctctaaatatcaactatgcagataaacatactccttttttttttcacatgtccctgtcttttccattctcagataacaaatgttaagacccaaagaaataaggcataagggtttttgttgaatgtgtgtttgttcttctagggaaaattaacagaagcataaaatagagatactttgtgtgttcatctatcgtaaaatgtgaactctgtattcaaaaactatctacagatgctttcactggtgcaaagctgtagttagtatcatggaatgtctttgggttgttaatgataaaatcatcccagtgttcaattctgagagttttagattatatgacacaatgttcaggtttatagagctgaatgggtgatcaaactctaattaaaaatagctttgaatattaatgttgaattcttctttcttggtttcctttagtcttcattctttattcagagctcttaatcatattgctacactagaatatgaattgtatattaggagtctggggaggaaaggttaaattgtcttttacatcctcttctcactcactctggcaacctatcctgtgtccccatagaactgagaagtaaagccctgtgcaggcctgctttagaagactttacatcccagcagaggattcaggcagggactctcaggattttaatcagactgcctttgaataatgtgatattaaattttatttttctcatagactctcaaagtaccacttgcttgaaagtagctacttgtgatctttaatttccttatattgtgatagttctacttttcagtctttcctgtgtatctccatttcatagtgcgttagtacttaaacttcggacacttttccaaactgttaaacaagtcaggaatgcttttcagaatcgcagtagtattattagggtctctgtgtctaggacttacagtcatcagtggtcatcactgggactagaggtgttcttttttttcctcttctcctttgtattaaaaaatagattttgctactgtataatgcggcatttcatgacttcctcttgttacttttcaaggttattctaaagagatggagatcttcattagaggctatttctcataatagtctgccttgcttattttcatactccccctgaaataagcctacttttgcaaacaggccatatgaatcaaattttatgtttgttcctcacaaaattttctacacattatttgttcccactttgctaataataatataatgattttattgtaaatctgtgttttaaatattttataacagagcactaatggaaacctaataaatacaaacaagataactattacccaagataacatggaaatacttctgtttttgaagttaacaacaccgtctgccctcaaagcacatttaggagtatcaaccaagaccagccagttgacatgtttttctgtgtggcaacctgcccttaaattgtcagatcttaactatcttgtgtttgctgtgcttgcagccataagctttcctccttttttgcttatccctgctgtttgtagggttagtgtgccctctgtcagaaaattgggttttctttactatacctgcaaaattaccaagggttaccccaatattgtctagaggaattaaaaagaacttattctcagttgacaaaagtattactgttatacatagttaattggaaagttggccaactttggtcacctatttttgagtcttggctatgcctttgtaattagttacatataccttctgagaccttcagataatcaatgggcctttccccattagaggtaggttcccagcctacaagtatttcctgtgatccatggcaagcctccagagaaaagattcaagctttgcactgcccttttgttgattgtcattgaaaacttactttatttcagaaagtatcaaaaataccaaattggtctttcagagagtatgtaaatctggggcttgcccttggatttcacttgttaaacaccctcaaacttaaaagaagaaaatagatctccagctggtgaaaattttgtgccccaaataatatattaatccaagtctaccaaggtaactaagtaatggatgttttctctcttttattacaagcaagaaagttcatttgcagttgtaaaaatgattaccgaactccagacctatttgctataactgattggaaataatgattctgatttttagtctgggtaaacacatacttcggtgtgaattttgataagggaaagacttgtttggtagcccaaggaaaaacaggatgtatttatacagtgaatgttcactctgcagaggaacttccctccagttacatcttcctcatacattagccacctccacacttgacatagatgccaacatgtttcaaaaccaatcttgaaggagcctaaagagttgatggtcctctaggtgaaagacaagaattactgtattgcatttgcttatagggaggtgtgtttttgctaacttgaagggatatactgtatttcaaataagtgtgtgacttaatattttgggatttttttttcctcctttaaaaactggacctgaacacaagctttgagttgatgtttgtaataatctcaggacctgaaagattgtagcatttagtgtgtcttaaaaattatgtactgtaccagccatggatttttgtaaatatacctgtctcccttttttgtattttagtaaaaaaaaaaaaaaataaatttaaataaaagggggtggtgatgacatgtgaatgggtgcgggtatgtgtgcgtgtgtgtttgtataaggctcttttgagatgaactggtgcttgtttaatttccagctcaaatcggagcaggaatatggacaaactgctgctactgaaccctgcactgagccgaggtatttccatttggttaactaaacgctagctaccaggaaatgacgcagaagtcacgttcttcttcccactgccatcttgcctttgcattctcagttctacgtgccctttgaactttaatggtaaaacatttcacactttggatggtttgcttgtctctagtttttagaaagctcttatcactccttcctaagaaaaaagaagggcaggtaaatttttttaaccaaaaaaaaatcacacatttcataaaaccctgatgaattttggatatgtgagagggcataa

SEQ ID NO: 128060 - DNA, 1063 bp, Homo sapiens
ttcatctgagtggtcttacagatatttggtttagatgtagcgtcatggagtgattccacgtcaccaagatccagctctgtctccactctgccattccaagggcctggctccgcagggagtccgtgacagcctcagtctctctttctatagtcaaatgcctgctgtagtttcaaactacatgcgagtatgtgctgtggataatttcttactttgtactcaaatgcaaagtaatgcgtcaatcatatgccttgattcatagcacattgtcatcagtcagctggagaactcattccctcacttcattatccatgaagtttctcctcttccttagtccccactctgctctgtcccacaggcaccactctaacttttttgatatgtgccccttgtttcgcaggcattcttcgaagtaagtagtgttgtgtcgtgtgtatacaattttaattcataccaatagtactgtggtagccatgtttactgttttctacttacttagatacatccacgttgctatgcgtacatttagggtgttgcttcttactgctacacggattccctagtgtgcacgcaccacattatacatacctgttcccctcacagtgggtaactaggttatcttcaattccttattaccaaaaacaaggtgatagttagtcttcccttctgtcaactgcgtgttgatctttgctcatcgtgcaattgcattttggtttcttgttgtggacattaatctcttaccagttttagatgtgtcagttacttttgtctgttacctgtcttttaactttgtctgtgacatcctttattgaacgaaatcctttttaattaatctactttttgtcttatgtttgtgttttgggcagtttacttatgaaatatttccctagccctacaccacaaagatatcctccagcattttctcctatgagctttatagttttgccttcaccttttcatttacaatccatctggcatccacctttgtatactgtgtaatgtagggatccagctttatttttctgtatttagtgaagcagttttcccaataccacctaacagatca

SEQ ID NO: 128061 - DNA, 1036 bp, Homo sapiens
attgtagttgcagtggctcatgcctgtaatcccaacactttgggaggccaaggcaggcagatcacttgcggtcagacgttcaagaccagccttgccaacatggtgaaacccgtctctactaaaaatacaaaaattagccagacatggtagcgggtgcctgtaatcccagctactcaggaggctgaggcaggagaatcgcttgaaccgggaggcggaggttgcagtgagccaagatcatgccactgcactccagcttgggcgacagagtgagactccgtctcaaaaaaaaaaaaaacaaaccattctctatatattttgtataaaaagtcatattaatataaggacgaaatatataaatatgtaaaaattctatattagctataccttcacacagcccgcttcctaagtcaggctgtcatgagacacctgcagtgcatcaggtatcctggcgtgaggaaggggttactttttataatgataacttcttttactaaaatgggactctttctgtgtcagtttcaccagaggccccaaaggctgagaacaaaacattaggtgccaagtacttccacattctaaaggcaggaggagctagatcaccttcacagctcatgctgagattgtaaaactgttagctccacattgggaaggattagcttggcatccacgtcctggccgtggcggaatgtgagaggattgctttggagcaactgtctgtgtgctggacgttgcccttcttcccaggcaggagggggtgggtgccccatcttcagctcatgccaaataagggagcacttcaagaggaccatttcggaaagtgtgacatgtcttctggagtttgagggacacgtggactgggatttgactccatgttggtggctagcccctggagatggctgcctttggcatggtttgcactctcagagttcctgtaggcctgccgtggttctctagaaagggagacagccttgttccagccaaagggaacaccggagggatgggataacctcaatagaggggaggacttctggagcct

SEQ ID NO: 128062 - DNA, 1067 bp, Homo sapiens
agcctccggagtagctgggattacaggcatgcgccaccacgcccggctaattctgtatttttagtagagacagggtttctctgtgttggtcaggctggtttcaaacccccgacctaagatgatccgcccgcctcggcctcccaaagtactggtattacaggcgtgcgccaccacgcccggcctgcggaaatggcctcaacgcttcaaccggaagcagaaattgaccgcggcaggcgccatctaacggccgctggagcaaagctcctcctggaaattcgcaacaccggaaaaggtccggctgcttccggtaaaaacccaccagagctgacgttcagagggcgagtctcgaagatccggccaatttgcccagcgcgctgtgctccgcgacggcgcatgcccgcttttgcgcaggcgcggggactacggcgcaggcgcggagactattgcgcaggcaagcgcgtacgcagaagcgtgcgcgcgcccgttcaacgtccggagcatcggtgcagtttcgagggtaaagcctttggcgcggtgatgtggacttttgttctctaactacaactcccagcatacgtcacccctcacgtgggcgctaggtgtggtttcgtgggatagggtaaggcgaaaatgaagtgacgatgacgtaccaaagaggaaaatagttgaatatgttgtgtgagcgcgtcgtttgcagaagccccagtggcctaatggataaggcattggcctcctaagccagggattgtgggttcgagtcccatctggggtggcctgtgacttttgtccttttttcccctttctaaacaaagcgaaatatgccaactttactttttttttttttaaatgggaagtgtgtgtgtgtttttactagctggtgggctgcaattttcgagaatctgcacacacccatgtcctttgtctgagccgcaggtcccctgggatttggggagacgtcaatacgttgaattttgatatcccttttataaatcatttaaaaatgtcttctcagcgtgttccatatcaaatccacacccacaccccccgccgggcccgcttctcctgag

SEQ ID NO: 128063 - DNA, 13453 bp, Homo sapiens
ttctgtcccaagaaccggacggagagtgagggcacgagggtcgctgtcgggggctgtcgtcttccacgtacacgtcgtcgtgaggagcgcagtccggactcttcccgcaacccctccggctccctttccgcacgcctcgaggcggcggcggccaccgagacagcagcgcaccttcccccatcccttccccttatcccccagcccaaaagggcccggtctgcgccccacccccgcccgtccgcccgctacgccgccgccatgtcggcgcaggcccagatgcgcgcgatgctggaccagttgatgggcacctcccgggacggtaagtctctgccagggccctgggggtgggggaggggacggggacggcgaagggaaggggttccgagggcgcacctgggcgcgcgcgtgtggctgagtaaggggctcccagattggtaacacgaggtccccgtcccccgtcccatccaatcagggctcggcaggcgggcagggggggcggtgaccatgcggattggcgggaactgctgccaatggggtgaggcggggcctggaggcagaaaggagagtttgtgcttttaatgttgacttggctgagacgggagagcccgcgtctctgttgcgtagttggggggcccgttttgtcgctggttaggtacctgcggaaagctaaggcctccacccccgatataattccttaacccagagctttgggatcatccctcgccgccgtcctccagagtacctagagagaagcttccccctcctcttcctgggtcaggaggaaacctttattactaacccagtctcagagatgcaccctcgagccccacagaaacaaccatttttatggaaaatctgacccaaaccatggtttcttaagtgggtgtgtttggccccattttgtgagaaggaacatgttatggcctgtttttccgagagacctccattttgttagacaatttaatagaggctttgttcagtaaatattgacaaatgttgcatgtccctaacagaacgattttgaaaatttggtacccagtgaagtagaatagaggagaacaaagatcctttcaggcgtttagtttagaatctgtatagagagcccttaattgctggattatcctttgtcataaagagaatttctaaataaaatgatgaaatgctgttgcttttttggtgatgttaattagtaatgtactctcaaattcaacttaaatacattcaaatatgtaggaaaggtctagttcattactttcttaacacagcaaaatccttggtagtttttatgtgttgcttctttaggcagatagtttcttagccactaaggaaatgctttttttcttgagaagttatttaagtgtattgatttaagagaaaaggcacgtcttaaatttagtttttaagttactcttttaatttacatgagtgctttacagcaaaatatgagtaaattttaaaaattttattgcattcaaatctttcagcagtgcgtagagtggcttttcagtgttcacattttcagttttaataaaaacccatattgggaacttttatttgtagaatatatagacaaataggtgtagatggcaaacctacttgtggttgtgtagagaggaaagattgggaaggaaatgagttttgtatggaaagttaacattaacttaaaatgccactggagaaacttttaactgttatcatttctcacgtttagataagaatggttactttatcactgcagcatgtcttaacattcctccttttccaacatgagagagggtattgggaacgggtttcattggatcctagctaacagaataactaatctgtgtaataaaattaagttatttaagacgtgctttacatgatccttttaatccttgatggataccatttttgggatcttcttcatggattggatttcttagttttactgggagggtagttggatcaaggtaaaccatctcctgataagtttctgaattaggcagcccgtctagtattgcaaagctaaatttaaatatatatatttctgtgtgtgtagtcagcagaaacatggatttcttaaaatccactttgtgtatttttttatgtgtctgttactggatttttttttttaaccttcagacttagaggatttatgatcgaactcatatttacgagtccacagtattgtttagctgaaatgactggattttcactgctgtattgggttagaagtaaaaaatatactactttcaaggaaaaataattgagtggagttttttttagatatcaaaattaattctatatatgcaaaataatcagaacattcttttttttcttaccatttaatgagtttatatatatcattttatgattcaggacttttaataattaggattgttcttttttagcatacagtcaacttcaagttacccagggataggggaacatggaaacgtcccctgaataacaccatgtaatttgaaaccatttaatgggaacccttgtattggacacacaaacagcctatgggaacgctgttgggtgtctttggcactaagaggtggaaatgggtatccaggaggtgggagagagatggaaaaggtaggtaggagggtatttaaggcaactctgtccttttttttttttttttttaattccagagactataaagcagcgactctcttttttggaagtggggttcaaggtggcagtgaccccctccactcttagtgtcctgtctgtgaaggaatctgaagtggcacagagtcctggggctttgggaaaacattacctcctcaccccctcaaggtttcttccccctccccttcctgacagtttttaattagttccttttaaaattcattggagatttaagtctgttagttaaatataccttaacttgaattacataaagtagttaatcatttagattacctaaacttcactggaatccttaggagtaggaattttgttagcagggaaatggagaggtaattttggatcactgggcacttcaagaaaggacattcctgggtgagtggtggaagttgggggctttagacaatctgagggcagcatgatggtgccgggaggctgggcagggggactgccaggaggtgggagagaaatgcataagggaggtgggagggccaaagacaaactctgccttctttgcaattttgcctagggccctggtggtggcaaccgcctgtgtgccactgaaaatcgtgccgatgcctggcatactgcataaatggaagcagggtaccgcgtgagttgaaacattggtcacactatataaagtttgtatatgtgaatcagtgtaactcatacccatataactgggggtctgactgtatttggatttttctgataaggcatcatgggctaaggaaaagagcactgggctgagactcaggagacctggtttctagccccagctgtacctctaattgtaaccttgggtaagtcacttaaccttttttgcctcaagttaaatctgtaatttgttatatgggaaaccaaataatttcctatgttatactcagaaatgttgaaaaataaatatattttaagtttttttagaaaggagctataagtagatagtaattactagtttattttatcttgtttatgattcattacgttttataaatatctttctgttttagttgttagcagaggggagagggataatttgttttccctgaacatattcattctatttgaaagcagggaggagttgcacaggaaaatccaagaaacagtttgagaattgtctgtgtgacagttggaagaacccagtaccctcacacagactgtgatttttgctcagttggattaattgcaaggatgttccttagctaaagcccctttgccaacaaacacagtttggtcataagtctctagtcttgatcccaggaaagtctgggaagatgcaagcaataagaattaaataaaattgagggtgtggatttagattacatcctttttttttttttttttttttttttttgagacagggtctctgttgcccaggctggagtgcagtggcacgatctcggctcactgctacaacctccacctcctgggttcgagtgattctcctgcctcagcctcccgagtagctgggattacaggtggctgccactacgtctggctaatttttgtatttttagtagagatggggtttctccatgttggccaggatggtctcgaactcctgacctcgggtgatccaccatgcccagcctagattacattttaagcttagaaattaggtaagttatagaaggtagttctgagggttctgtatctcttaattgcttatacctttaaatgggagcagagaccaccttcgaaagattaaaataggcaggaatggcagcctgccctccaaaacaacaagtagactaggaatgttagatagaattttatagcatcattaattgtcccttatggttagggactgtttcgggcaagttaaaactttcaataattttaactattttaaatgttaatctttctaaattgtaggatatacttcctcagttaacatattaatcataatatttttgctgatcagttgtacagtagttatagtttgtgggatataaaactgaaaggatactcatcctcatacccaggaaaatactgttaagaaagccatttacttgttgctaatgtaaggttagtagtacataaccgtgtaatctgtaagatagtatgacatttctgcctttctgcaaaattactgaatcaaagtttgaagtagtgcgttctttaatggattttatttataaaatcatctttactgtaatctgtgttccttgacttttcatcaacattgaaaacattttctcttaattttttctcattaacataatgaaccatattcatttcttggtcagttgtgagccattcttttattccacttggattgttcattttaagtgaaggaggcggagcctttaatgtatacgcagacattttttaaataataacaggatatttcttagtctagagcttgtaaattctttaatataaggagttttataggattaaacagtagtttctctgcgtttcagttaactatttaactttatcagagtttcaggcatatccaaaacactgaaagcacctgcatagtgaatcaatgaaaaaagaaaagttttcctcattttgcattttgaactctgaataatatttctatctacacagcagcccagaaaacaataaaagtatcacttcatataacattgcatcgttcctggattctctacagttgtttagttctcctcaagtaagcatatgcttctgagacattcttttacttcaggtaaatataagcaaaacaaagaaaaatcattttgtctatttctgcatcagttctataaggagcaagtaaattcttttattttcgtttaggttggatgttgtcatataaggatagatggtagtgttcaacgtgttcaagatgggtagtaggaattcaatggccatgaggtgtcatggatcaaggtcaggtttagtgaatcaggtactcttcagtaacaggtggttcatacaaagcattgaagcttaaagttgctgtgagttcagcaagcaggagggttgagaagacaggcagatggtttaaaactaaaggtcaataagtgggcaagactagttaaatgaggcagatactccccaaagatggaattccagaaaggtgcttgaaaaggactgaattcttaaagcctactgctgttagtatgtagagttcttgaggaaacaagcagtttggcataacttaatctactaagaaactataagaaggtgaaggaagttggaacatcttactggaaaaagaatgagggagtgaagagggaatcttgtgaattcaaaacttgcagaaaagctattctgtttcctttttgtttaggttctcatgcactagcagctgctagaatagatattggaaggcagggccaaaataggtcagttgttcagttttgcaagattattgaggatatagagaaattaatttgtgaaaactctgaaatcatctgcagctccatgtttttgtttgaactgaataacttaggactttgagaagtcaaagccgtcagaaagtaacatgaagtccattcagctgaataaatgtcatattttgctattagcatagaaaagaatctttaaaacttctttccaaaaagcactcagtattgacccatatgttccagtatagttgtgaaccatgtacaactgatgtttgacttatttgactcaacatgaaaggaatttaaccagctgcccttgctgaatcttgtctcctgaatatggtaaatggtttttgtttttaatcttaataccttagatttctgcagaccccagttttctcttttagagttaactgataattattggatagtatctataatatacctggctgttctgttctgtactgtgctctagtattagtttaaatggtagacttttctcttaaagtaactttaatagtttaatagttaaagttacttgaaggtatgttttagatcagggactggcactatggcctcctgcttttggtaaataaagttttattggaacacatccatgccgattcatatacatgatgtctatggctgctttggcttacgacagcagagctgaatggttgcaacagagtcatatggcccgcaaaccgaaaacatttaccatttgactctaacaaaagcttgttgatcaccattctggtttagttattctaaaccaagtgtggtccttggagcagcaattcagcatcacctcagcatcacgtcgtattgttagaaatataaattcttggacccacctactgagtcagaaattctggatatgggccccagcaatccatgtttttagaaaccttccaggtgattctgatacacattaaaagtttgagaaaccctcttctagatcagtgtttcccaaatgtttgtcacacttattgcctttattattatttatttttattttttattttttggagacagagtctctgtctcccaggcgtgaaatgcagtggcctgatcttggctcactgcaacctccgcctctcgagttcaggcgattaccctagcttcccgagtggctgagatgacaggcatgcactgtcatgccctgctaatttttgtatttttagtagagatgaggttttgccatgttggccaggctggtctcaaactcctgacctcaagtgatctacctgccttggcctcccaaagtgctggtattacaggcgtgaaccaccatgcctggccttgcctttattattatttactgttttctgtttatttaatattttcctttatgtcaactcactttctaaaaattttaagttaattttaaaatgaaagtttataccaccataaaaataaatacaatgaaaacaaaatggtgtattatgtaactagactcttgtcacttagggttcctgtgctaaaaattagaagttgttaaatttattaaacaagtactgttgcaaaatgggaactttttttcttgacttaattgtgattaataatttccttactgagtggtatttaaaatgtcttgttggcaaaatcatgtaacacctaaagtcatcttttgtgcaaatctcatactttggaaattactgttccagggagtattcatgtgaaaggaaagctgtttgaactatatatatacctaagcctgtaagcagaaatgactggacagaaatacaagcctgtgagacagagagatctaggagatccctagagaggtccatcaagacctccaggatgaaattacctcatttagctcaatttctcacctctccgttagtgctttggtccacgggggtcagtgtttctgcaggatttcaccaactggttccacagtgggaatgtgaagaggtacctggctgtgggaaaagctgcttatcaaagagaggcctgatagaaatgctagggaaagtggctgtgagcctgcattatggacgggagcagagcggcagggcatgttgctaggactaagcagtcgattcacgtgagtctggacaccatgtataaatattttgaaaacttcctgttacaatttaatttactccattgtgttagagggagtgcttccctgcacatggtgttctgtatatttattggttgatgtgctttagggtatagtaattatttatagcaatagattgatacccaggttgcagagttgctttagttatatctttatttccttttcttagagattatagacataatttgcttctgtcatcttttgaccaaaaatctaatgggaatgaagaattacacttgaatgtttatttttaagtaataagttctgtgatagtgattataggtgtctgcatttaaaaaaatgttttaaaaagtacagaggtcaaacaagcatctgtatgattgaacaaatgttatttcgtatatttctgtcaaattttaaaaaatggataaagaggccgggcactgtggctcacgcctgtaatcccagcactttgggaggccaaggtgggtggatcacctgaggtcaggagttcaagaccagcctggccaacatggtgaaacctgtctctactaaaaatataaaaattagccagatgtggtggtgggtgcctgtaatcccagccacccgggaggctgaggttggagaattgtttgaacccaggagacggaggttgctgtgagcccacatggtgccaatgcactccagcctgggcgacagagtgagacaccgtctcaaaaaaaaaaaaaaagtaaaaagtgcataaagcattacaaataaagtcttttgtggtccccttcaccgtctcagtcctttccccagaggcaaccctttttgtaaatttgttgcatattcactgtgaggcagtatttctgctgtgttgtttagttttaaggctcacgtctccttcatggtgatctgtttttcattttaacttcttcctttatcattgggttgtctatcacctctgtcccttgatattttcatctttttttttcttttttatttcttttcctttggatttggggaggctctagttggcttctgtagctatcaccagctgatgagaacttgtcttttttaatagataaatcagccagttactttttctttgattattttcagctattgcttgatagccaaagatagctttcgttacttctaattttgtatatagaaagttctggatgatagaaggcaccggctatccagagtgcaattgttactatgtcagaattacagctctgcaagtaagtatcaaaatataaaatttagcaggctgtaactttttatgccatatatcttaaaataaattctatataacctattttaggacttaatgttaaagtaactattcaggcttttctgatgtctcttgtaaatttaagaagaggaataggctgatagatttcctaaagcacataccccccaaaacatgatagcattggtccctgccagctaccaagaccctttgcttgtattaatataatgagagaagataggtgcagggcatggaatagagccttggaatggagattctttagtattcctgttctcacattttcatcatcaccattctggttagcttcaaaagatcctacaaggtttttcttctactaacaaggctgttccccagtttcattcttataatcttgtgatatggattttcacagacaagtgggccagatttttaacattttaaaaacattaatctttgatcatatccagcaagaatgaacttgttctggagatttcttctacagtgggcatcacattttaaaaatgtttggcttgtcatggggattatggtggggggtgatactggtacctatttctgattataaacttatgggaccatatgaaccagaagattaagaaggatagcttttctgagctgtatagcacccttgtgtttacattttctggaggaaaggaaagctgctttgttttattaggaacgacttgatgtcacatttggaaggcagactgtcataattgttttttcccgttgccatctttggcatagtactctttcttccctttccttatgtaataaatatatgcctggaaagttttacatagatcaagacatattaaatgttttcaaagcatctgtattattatgttaagacatggtgatgagtccttttgtaaaatgaaccctatactttggatggtttaaatatacagtgggttaaactgagtgtatatattaacaggggaacatgtagcaagggagtaatgtttttttaaaaggttaattacaaaaggatttgtataggtggattttaagctgaattctaaaggaacaacaaaggtaggtgggagaagttggtagagtgggtgagaaagtttgaggaagatgtaaaaatgatcagattggctccttagtataagagttactgtgcagcagtaatcatcgcttttactttgattccacatgaagacacaagggttttttgtttgtttggtttgagacagagtcttgctctgtgagccaggctggagtgcagtggtgctatctcagctcactgcaacctccaactcccaggttcaagcgattctcccaccccagcctctgtagctgatattacagacctgtgccactacacccagctaatttttatatttttagtagtgatggggtttcaccatgttagccaggctggccttgaactcctgaccgcaggtgatctgcctgccttgcccacccaaagtgctgggattacaggcatgagccactgtgcccagtgacacaaggttttacttgtgcactgctttagatctcttcctgccctggactagactagaaattggccatggatctttatacagttcccacattattacgtgaactcagcagcttatgttggaagaaatggagggaaaaagagggaggaacgtttctctgcatttagggattcaaggggtcaggaaaacaagctttaagcttttggttgtacacctctctagctctagctttcctttcactgaggggttatggatcttatttcagagggaaggaaactgtcctgtcccaagcccactgtgacacgtgacccttaactagtatacctgtggggagggcttcagttgccaccctagagaatgtgggagggcttcccttcccctgcccccatttgtagacatgggagtgtctccattgctttgtatgctgttgcattctcctccctccttgttttccctaagctaagctctaagctaattctgtacaaaatactgattgtttttgtaaattgcttgccatgaatgcctgataatgtacagtgaaataggattctgcataccattaaatatgtcaaatattacaaactttaaggttcttttgaaattacaatactaaactcagttcacttttgcttagccttcacagttgttgatcacatagcatggtcatccactcacagcttaaaaaaatacagggagcatcggagagaatgggtaaagtaaaattttgatgtttttaaaatagcacctaaatctatgaaagttgatttggtttcttgtttgtatgggagggagagggtgggtagtactggggggagggggcggatattgggaagatagcatgcaaagtataaaatcatgtcagatactacctaggctaaggttgtaatgttactaataaaatttaagtgttaatataagtttcagaaaaggcaggaccatagaatggcagtgttgggaatgacagtgggcttattttttccctcctgatatatggaaggggattttgagaatagcagtatttgagtaaaatttagagaggaggcctctttttaaagtgacctgtctatattccctggtggaactgactgccttaggctctgatacattggtgacagacctggagatgaataatatgcatcctcatttttattgtatacttgtgactcaggtgttctcaaaggttataattcatgaaactcatgaaggtgttgaacaaaagagggaggaaagagagttgttgcttggtagagaatttggtagaaataggaattaatagaaaagttgatgtttctattaaaatgaaaaacacctcacttgctagagttctaaatcaagtttctaattctaaaaacttggctgtgtagttaagtacaaggcctgaataactattgtagaggttataggacagagagatctccatgtttttataggtgggatattttttgttgttgacagaagtaacttcgcctgatctctgttccattattttaattttttttttttactttatacactaaaaatttggattaaaaaatgaaaaatgtaagaaatcaaatgttactcaaaaagtattgttttgctcccaactctgcaattctacatgaagccatttgccaaagccagatatggtttacttactgttcccccaaaccttcttgctcttataagctttgtcaaagctattactccaggttgtagtgcttttttttctactttactttgatctaagtcctgtctttccttcaaattttggctacttattgcatgaagctttttccaatatttccattcttggtggtaattttagtctaagaattcctgaagtactacctaattgaaacacacatttgatacttggatcatgttatcttgtattataacttattactccattaatatatcctcggccgggtgcagtggctcctgcctataatcccagcatgttgggaggccgaggtgggagggtcatttgaggccaggagttggagatcagccttggcaacatagtgagaccctgtctctacaaaaaaatttaaaaaattaaaaaaattaatatgtcctatttctttagcaaaatcattggctccttgaggggagagagcttgtcttatatgcccctttgtaattccattgcctagcacagcagatgttgtcactaataggtttgattctgtgatttggatccaatgtcattgtgacaggatactttttcccccataataggttatttttatatgactttatgcccacaaaacccaaagataaaacacattaaattgaaaataatttcttgtattataaggtgatttggttcctatttgcagttctttcttctttttataaaataggtgctgttttacctagtttcttatgaaaaacatggtttgggccagatatcttgacagaaaccaaattaccagcatttttcttttaaaaattattgttggtttagctgaattgtactgccatggaataagcccaaataaatttgttaagtactgcatggttatgcagccagattgttttaaaatgtaaaccttaaagtccccaaggcagaactttaaaaatatcaataaacagtcagttgctattctctctcaaggtatttctgtatctcaaattattaagcgttttattatttcattgttttaaagatttctataatggctgctatttgatagctgtatttgttgagtttgctacg

SEQ ID NO: 128064 - DNA, 3061 bp, Homo sapiens
gaaacagattctgatcttaaaagctcaccagggaaaatatgtacaactattatgtatccataaaaattttaaaaaacacaaaaaagctcaccagggatactgcctggtttgctatattcctattaggaatttgttcatattttaactgatagctgtgtcttcagggcacaataacttaatatttgaatataagttgttaagcacaaatcagttactctgcctgatgaaatgtttgattagtaaaactccatgaatactgattttattctaaggcctgagccattagtttaacaaagcactgaaatgattctgctgttgccattaccaaaacatttagatacttttagcaggaagacttattagatacataagggatttttttgttttgttttgtttttgtttcaactttaaaattttatcattttaaaattgcttaatataattagggtacagatttaaaatgaaatttttttcttaaatggtaggaagcaaaaagcttctaattaaatagcattgacattctgatatgagtttatcatagcaccattctaacatgagcttgaggtcctcaccaaagtcttgatgaaacatactttttaaagaaataattttttaaaaccccacttggctcaaagacattgtccagagctccagctttggacttttacctgtagtcagtcatacaattatctggggttatacttgttaagtcagtatttaaaaaaatgaaacaccctgattttgttcacttttgtttttatataaaagaatctttacagtcaacatgtacttctagatgctgtattgaaattgctggcagagtttattctatacaaaatgaacaatctggccccttgttttatttgtaaaggttcaatgtatctatgcctgcctacctcaatctgcaagggagtgtcagaaaggccccgcattcgccaagccgtgagttatcgctaacttttcagatgtgttaatgaatgtggaacaaaagcagttgtgtttaaaaggaaaaaggaccatcaaaataacttttattatagtagcaggcgtaaacactaaactgaatattccaaattgtgtcaaaaataacctactagagacgagcttctagaaaacctattgttgaactgctctgaagctatcattttaactataaattactgttgttaaaattttatataccctggttgcaaattagaatgttttaaaaatatctttaaccacgttaaaacaatttgaacaaaatcttaccccatctaaaaatgatagtgtttagttgaatttaagttaagctctttagtatatgaccatatgaaggggtaaagttttaatcttttttgttatttacatgtgaaaatacagaaactaagtgattgaatcacatcctacacgaaagtttttggagtgctccaggcatatcatgtgaaatacagaggtatttatatctcttttggcaccaatagttcttgcttcagtaattcaccagtaggttttcattcatcgataatatatcagtttaaggctaaaataaaacacctacatttcttagggcttatcattctatatagaaagaggaaacatcctaatgagttttttcttttgtttttccaaagagattctaagcaaaaaaattttaactaacatctatattttgttattggagctagttacctttctttttcttagattctttaacgttttgagtagatagccatatttgataagcaggttggatgcttctgttgcttaggaggtaggtgtattgtgttatatgaagacagaatgaatttaaatatacccagtttggcagtatgaaaaagctcagactacataaaacttggaggtatggaacctttggacgcattaaagttaacgtttcattaggcaatgtgcctttgtttgactggtgtgtaagtccttcttccaggtttgtacgctcttaaacgcgttattctaccctctctaactcctcccagcagcaaaagggagacacttcagctggaacaaaatagtggaagaaatggcgtctggggttcagtggggattcgcagtgtgtatgcaatgtttgcaagattattttttatgtttttcaattactgtaaataaaaatatatcaatgcttagtgtcaagaagggaacattgtataccagtataaactctcttagtgggtctgcaagttgcttaacctctcggggcctcagttttctcatctgcaatatgaaggagttggactcgataatctttaaagtccattcctgctctaaaatcctatgcttttctgaagtactctatttaacagaatgcattgctttctcactttgactatttgaattatgtatgcagtacacttactgcaactgcatgttgtctaaaatagtttttctataggatgtatataaaaactaatccctcttgagctgatttataatgtgtgtatatagccacacataaaaagctagtaatagtagggctctcagaaaatactttccagttgtctaaccttgaatgttattaactcttctatattacaggagatacaactcgtcaacgaatcaaattcagtgatgacagagtatgcaagagtcaccttctcaactgttgtcctcatgatgtcctttctggaactgtatgtatttactaaatgtattgttagattactgatatgctgcagtaatgaactacttgataaagtcttaattctgtgtcaaaagaattgacttgtgaggggagatttgcatcctttattgtttgtttattcaggatgattacttaaatcttcagtaatgggtttcctcacaaaagtggttgatacgttttgttttataattttttccattcttcagagcagttttttaaaagcatgttttatttggaatacagaagtagttatatagcatttgtacttttagttcagaaataaaataatttatttttaaagttccttttactgttaaacagagtagacttttatctagtacggtatacatttttgttaagatttgtacacatttgtggaatcagtggggaaatatattagtaaatacttatatccacacagct

SEQ ID NO: 128065 - DNA, 1001 bp, Homo sapiens
tggtataatcgtagccagtgcagtcttgaactccagggttcaagtgatcctcctgcctcagcctcccaagtagcaaggactgcaggctcatgccaccattcccagctaattttaaaatttctgtagagagagactctcgccatgctgtccaggctcttctcaaactcctggcctcaagggatcctcacacctgggcctctcaaacatgctgggatatggaggtgaacaactgtacccagctgtaagatgactcttgaaattaaagaaagtagtaaaaaccagttattcccaaacaaagtaggaggtctggaagtcattgaagcagattgtttttcatagtctagtactggttaatatatttcagtgtcatattgatttctttgtacaatgagtctcaataaatgctttttccctaaggatcaggaattattctcttagtatttcctggaccctccagatgttttttagagataagtagttttatcaactgtattttaacacttctaaggaaacaagtgtgttctccgcaactatttgttgaaaaagggaatatggagttataaatacatcatttggaggatgtaattcattgaacacaatagtaagaaatgaaaacttgaaaacaataatttttttttttgagaccagagtcttgatgtgtctcccaggctggagtgcaatggcacaatcttggctcactgcagcctccacctcccaagttccagtgattctcatgcctcagccttccaagtagctgggattacaggcacccaccaccacgcctggctaatttttgtatttttagtagagatggggtttcaccatgttggctaagctggtcttaactcctggcctcacgtaatccacctgccttgacctctcaaagtgctgggattacaggcctgagccactgtgcccagcctaaaaatattctttatacaggcgattaaccacaaacatcaagcacatttacaaagaattacaaaatctctgtcactgga

SEQ ID NO: 128066 - DNA, 1181 bp, Homo sapiens
tgagccaccatgcctggccaccagtctggtttttgaggactccatctttatttgaaaaataggatgttcttcaaagcacattgacatctcaacaatttgatgtatatattcttttagtttggtttaaaattaacttgatcttttttgtgttgtggagctaaatgaactatgttgtgatatagaagctagcttttttcagattctgaaaagcttttccatatccatttattcttaaatacaagtgatccctgttcccatctgttggtagacaaaattggtgccatttttttcttctgacaccacgttttatatttgtctatgaaattttgtaatttggaagcccctacataaaaaagcatctgtatgacttaatatgtattctgacaagaactgtggttgttgaagcattttttaaaaaacttttttttgttttaatattatgtcttttttcccttccagagaatggatcttggagaatgtctgaaagtccatgacctggctttaagagcggattatgaaattgcatccaaagaacaagattttttctttgaacttgatgtatgtgattttgctttaatggtttgttgttatcttttgctgtaaaacattgtgaatgtggattaagatctcttaataggaaaaactcttagcagtttatcctctggttatatgaagggtaagactcaagtaagatcatgtactttcttgacaactcttttaaaaatatgaggtgagactgtattttaagaaaatgtgtaacagtcgtatgattcatatattcttttggaaattaagcatattcttcccaacaaaatagtaatgattaaggaaatatcaagcaaatgtaagcaactaatttatagtgtatataaggacctatctttagtaatatactgagtttttacattcatatttatttttgaatctacttatatatatatatacatgtatatatagttggccccccatatctgtcgttgaatctgtagaaggaaccaactgggattgtaaatatttagcagaagaaatggattgttgcatccgtactgaacatgtacagacattttgttcttgttattattccccaaacattacagtataactgtttacatagcatttacattgtattaggtattataagtaatctggagacattttaaagtatatgggaggatgtgtac

SEQ ID NO: 128067 - DNA, 1030 bp, Homo sapiens
ctcaaactcctaacttcaggtgatctacctgcttcggcctcccaaagtgctggaattataggcgtgacccaccacgcccagcttcttttttttttttttttaatgacagggtctcgctgtgtcacccagactggagtgcagtggcatcatcagggctcactgcagcctcagcctctttgggcccaagtgttccttccgcctcagcctcccgagaagctgagactacaggtgtgccccacccacctggctaaatttggattttaagtagaggcagagtttcgccaagttggccaggctggcctcaagtgatctgtctgccttagcctcctaaagtgctcaattactgacgtgagccaccgtgccccaccatggtagcattttaaaaagcaaagtgtgatttttgtatgaagatatttctgaataaaattgactttctgacagtaattgtctttaattaaactttgtaggccatggatcatctgcagtcattcattgcagattgtgatcgtagaacagaagtggccaagaaaagattagcagaaactcaagaagagattagtgctgaagtagcagcaaaggtaagaattttaatcatttcattagtacaaagtattatttcgactccttttgtttaagtttttattttgaaataattagatttgcaagagattgcaaagacatatacaaggaattctgtatactttcttgtctgccccagtgtaaacatcttatacaatatagtgcaatatcaaataaattgacattggtctaatccttatattttattcagattttgccagttatgcatgcatttatttgtgtatgcatgtctgtatgtatagctctgtgcagtttttttgtttttctttttgtttgagacagagttttgctgtgttgcccaggctggaatgcagtggtgtaatcttggcttgctgcaatctctgccttctgggctcaagtctcgtgcctcagccttctgagtaactgggattacaggtgtgcgtcaccaggcccagctaattttttttat

SEQ ID NO: 128068 - DNA, 1062 bp, Homo sapiens
taagggatcccatcccagaaagaagagtatatgcaaagtaacagaggtagaaaacaacagggtaagtttggggaaactataaattatgttgtgaggtgggggagtagcaagagatggtttagaaaagtacaaagggccagatcatggaagaaatcgtattttacactaggaatacaccacctcgccagaggatagaaagttatattgggcccagtagtagccctgacttcattgaggtaaggcaggcaggctcagaacatcctgatgtctcagtagttcatttgggatacgctcagaaagcattctttaaccacatactgccttagataacaagttttttctcagcagttctgaaatactttgaaatttaaaattcattctcttgtttattcatgatcttcttttttatttctttttaggcagaacgtgttcatgagttaaatgaagaaattggtaaattgttagccaaggtggaacaactaggagctgaagggaatgtggaggaatcccagaaagtaatggatgaagtagagaaagcacgggcaaagaaaagagaagcagaggtaaattcttaatagtagtagacgaattctgcttaatttggtaagactacaaataaaaagtagtagatgaaacttcagtatctatacttctctaagaacatgtatttgaatggaaattattgaacagttgttaaagagaagttgaactaaaagacaaaaacaaaacaaaactcggaaaaagctggttgtggtggtgcgtgcctttggtcccagctattttgcaggctaaggtggatcgcttgagtccagttcaagtccagccttcttctttttgtttttttgagatggagttttgctcttcttgctcaggcaggagtgcaatggcatgatctcagctcaccgcaacctctgcctcccgggttcaagcgattctcctgcctcagcctcccaagtagctgggattacaggcccatgccaccacacctggctaatatttatatttttagtagagacagggtttctccatgttggtcaggctggtcttgaacacccaacctca

SEQ ID NO: 128069 - DNA, 13256 bp, Homo sapiens
aagaaccagtcttctgattttattgtttttttcttgttttctatttcattgatttctgttcatgtttattatttccttatactccagtggagagaggcgctaaggatagaggatggggataaagggaacctataattttcataacaaaatagccatgcttttgtggtttttttttttttttttttttgagctggagtctcgccccagtgagccaccgtgcccagccacttttgtgtattttttagaaaacacttttggtataagcatagtatattttatttaattgtatgacttttagtgagatttatatggtcattgtttttctcacttttgtttaggaagtttatcggaattctatgccagcttccagttttcagcagcagaaacttcgagtctgtgaagtctgctctgcctatttaggacttcatgataatgacagacgactggctgatcattttgggggtaaactgcacctgggatttattgaaataagagagaagcttgaagaattaaaggtacattggtaaaatattcctcactttatcctcttgttcttttgatctgtatcagttgcctttttgtacaatattcttgactatgattcagtaatatagtatctaatgattaatactaaacagtgtaggattatagatggaaattcaagttggtttaatggatgctgcctgagaaacagacttaatattatcctgttattttgggagttaccattttatattagatatgacaccgagttagggatctttcaaactagttactaaaagagtcccataaaacttcattgttattgttcttttcaataaggtcaataagaatgtaataatataatatttataagaagtttgagaaaatgaacccaatattaatttgaaatattttgcaattctttattaaatagcaagcttgcagaatctctagttttattttatgctcctgcttccacttcagaaaggacttatgaaaaaatttatatttttttaaaaggacaatcactattacttaaataatataggcttttgtggggaagacaacacagtttttactcttgttgtttagaggggataaacacaaaaaagcatggtgatatttctgaagtggtaaagatgagtgttggtggatataatctatttaccttttaatatgctgatagctttttaagaattgtggcactgtagtgttttttcatgaattgaggtctggctgacagataggaaacatgggatagtcattttctttgtaactgttattgtcaactggaattaactcaaggtccatagcatttaaaataatatagaatcagaaaatgcctagggacatctccatattctcaggtaacagtgggctcttttcagtattctgagtagctagggtgatctcaagtaattttttaaaaatttcgaaaagagtcactatagcaaatagttactaggctccaagttaaaactccagtggttcctacttgggagtctttgcagatagacctagcaacagaactcaagcattttactcatatctttaaaaagcagcagcatcaggatggtaattggaagtgacctaaatatttccatattagaaatcacagggcatgggaacttgtgatttataatggttgatgtttttttaaaaaatacaaaataatactagaaaacatttagaggaggaaaatcttgtagaagtgacttggaaatgtcattaagaaatcatgaaaggctaggcgcagtggctcacgcctgtaatcctagcactttgggaggccaaggcgggcggatcacaaggtcaggagttcgagaccagtctggccaatatggtgaaatcctgtctctactaaaaatataaaaattagctgggtgtggtggcatgtgcctgtagtcccagctactctggagactgaggcaggagaatcacttgaacccgggaggtggaggttgcagtgagctgagattgtgccactgcactccaacctgggcgacagagcgagactctgtctcaaaaaaaaaaaaaaaaagtcatggagctgggtatggtggcttatgcctgtaatcccagcactttgggatgccaaggtggccagatcacttgaggccaggagttggagaccagcctgggcaacatggtgaaaccccatctccactaaaaaatattaatagaaaaattagctgggtgtggtgatgcacgcctgtaatcccagctcctcaggtggctgaggctggcaggtggaggttgcagtgagccgagatggtgctactgcactccagtctgggcaacagagtaagactgtctctaaaaaaaaaataataagatcataggccagtctcagtggctcgcacctgttaattccaacactttgggaggctgaggtgggaggatcactggagcccaggagttgtagacccatctgggcaacatagcgagattctgtctctattttaaaataatttgttttcacttaaaaaaaaaaacaaaaaaaaaaaccaagtagaaatcatggagaaaggtgaaattttacacattttccacaaaatggggaaagattatggaaagaagacttgtaggcctaatgattatttctggcagtacttcaaattgaattattaaacagattttgacagcagttgtactgtattagaaaccagataatataaagtttaggataaagctgtttaagaatggactcagtaaatattctcctcatttattactgtttttaagagagtcgtagctgagaagcaggagaaaagaaaccaggaacggctgaaacgaagagaagagagagagagagaagaaagggagaagctgaggaggtatggagtaatgggccaagtaattgaagttgaatctctgtggttctaaaaagagatataattgattttaaattttagatggtgataaatctgttatgggacgtgggaaacttctgcttactttaaaaaatattactgtgcgaattatataaatgtttaattatacaagtatcgtaactcttggccatttaacggaatgtgatttcctttaaaatgtgtggaagagtgaataaagaatgcttcgtatcttgtaagatttataacaaaatccagccgggcatggtggctcacgcctgtaattccagcactttgggaggccgaggcgggtggatcacgaggtcaggagatcgagaccatcctggctaacacggtgaaaccccgactctactaaaaatacaaaaaattagctgggcgaggtggcgggcgcctgtagtcccagctgcgcgggaggctgaggcaggagaatggcgtgaacctgggggggcagagcctgcagtgagctgagatcgggccactgcactccagcctgggcgacagcgagactctgtctcaaaaaaaaaaaaagatttataacaaaatccttttctagccctttgatttttcatattgggctagatttgcaccaggttagcatagaattattattttttttttatgatgtattttgttaacaaaaggtttaagggtggttgtttcattgaagggttttttttacattgaactttggttagttcctcaattctaggagccataaactattaaaaagtctaaaaatatctaaatgtatataattcctcttacattggtattcattaattgataaaatcttagaattctagtatttggaatgtctaaacattcttctgagtcacttttaccattggcagctaaaatcacatagcatcatggtggcaacatttttttgtaactcatctttttaacttcagcagctttaggatggacagttatatcacaaatgatttgcctgtagtcctaatttatagtgttccttgaatcatactacatttaaatgtcttaaatttaaataccttctctttagagttagcagatgtgcttaagctaattaaaaccctttgtagtattaggttatgctcacttccttcgatctttgagcatattatatactcagtatatttcaagaagtttaaacagacttcgtttgtgtcacatggcttataaccaggtaatctttttgcaccataaagacagtgaaacaaaactacatgtctatatggtccctttttaggagaagtgatgtcagtcctctattgagagagagagatttcttcatttactgtaaagtttacctcagagcttttatctacttgttcttttgtgtatagtaagtccttatgggaatattgcccagtattctaatatataagtggaattttcagtaatattgggaatctcattttaagattcaattgaggtgacagtaacatggaacagaatttctttgcaggactacattttcacatttgtagatgatgaaaaagtatatcacatcttactcctttgtttgccaaatggcaagtttcttttgacagtgattatataatgcaaatttcagaaacattaaaaaaaagtcgttgaatctgtgagcttaaagaaatatggaagtatggaagatgaggaaattagaaactagtataaaattatataagatgggataaaagaaaaaaatcataatcatttactgggtgcttattgtatgccagacactgtagtaaggaatttatccatattcatctaatctttataaaccccacccccactccaccccagtaaaatttatattagtatccctcttttgctagtgacagagtaagctgagagaggatatgtaacttacttaggtcacacagacagtgaatggtagaaccagaaataaaactcaaatctggctgatctcaaagtcatgctttcaacaatgctatatatcatccaaaaaaaaataataatccctgtggtgtcctactagccataatattcactttacatttcattgagcgttacctgtgtgctaggaaatgtgacaagtgccttaagtagagtatctcatttcatttgaagaaacacattgtaagattgaactaggtgttctagagattatagtatgaggttgtagctccaagagtatgtagatctcagaccatagaaatttcactcttttcccagaagggaaaaaagaaatgacagatataaaagaattttttccaagctggtaagtggtttctggaaaattagcaagttgtgatatgtaggttgagcatcccaaatccaaaaaatgaaatccagtgagcttcaaaatctgaaacttcttgagtgctggcagcatttaaaggagatgcttattagggcatttcagattttggtttctggatttagggatgctgaaccagtaaattataatgcagacacttcaaattttgaaaaaaatcggccacctgtaatcccagcacttcggaaggccaaggtggttggatcatttgcatccaggagttcaagaccaccctaggcaacaaaaaatgtaaaaattaaaaaaaaaaaaaacaaaaacaaaaaacagaaaaaatccgaaacacttatgatccttagcgtttcggagaaggagtactcaacctgtactgtgttttaatctcctaggaacatattctttaagagccaggtattcttgagttaagcaaaccctgcaaggtgaagaaatctgtcgagtttgtggtgtcttttggaaaattttgtgtgcgtaggtacacgccttgtatttataaaattaatgtaaacattagaaatcaggaagaatataatgtaacactgcactgttttcttatttatagccacttttctaaaaatacatattttttttttttaggtcccgatcacacagcaagaatccaaaaaggtaggtgtattacataagacaggtataagtagtgaagttgtctttttcaaaggtagtttttatagattgattaaatggtcctttaaaaattttcttttttggctgggcacggtgatgcatgcttgtaatcccagctactcaagaggctgaggcagaattgcttgaagccgggaggcagaggttgcagtgagccaagatagcaccactgcactccagcctgggcaacagaataggactctgtctttaaaaaaaaaaaaaaaaaaaaaaagaaaattttttttgaaatcatttagatgctcagagtagatacgtaaaaggattaattttttaaaaatcaatttgggtggtacatttaggaaacatgttctaagaggttgtagctgttgaaaacattagtaggttaatagttggataaaattttgattgatccactgtgggttaagcaaaaccaaaatgtttagtataccctccagtcttgactttatgtgagtttattacccattcctttatacagtgatcacagaaggctttcagagaggcatttgcagccttaaaagagcaagacaatactttgttttgactttcagcgttaatatttggggtttgaaacctttctttgtagtttttgctagttgctgatacatttttttgtctgagaaaggcagggaaatgtgttgtacttcatcattctttctcagttcttcacttgcccttctcattccagtcgttgagctttcttcatggatccattcccacctagaatgccctttctcagtcttttccaaattctaccattcctcttgttcagatcacatcttcttttagaaactttctgagttctcagctctagagactatttcccaagaagttttccctaaaaagtagagaatttgttgttatgaaagaaaaacctggctgagcgcagtgcctcacgcttataccatcacagctctttgggaggccgaggcagccagatcacctgaagtcaggagttcgagaccagcctggccaacatggcgaaactccatctctactaaaaacacaaaaattagccgggtgtggtggcaggtgcctgtaatcccagctacttgagaggctgaggcaggagaatcacttgaacccaggaggtggaggttacagtaagccgagattgtgccactgcattccagcttgggtgacagagtaagactgtctcaaaaaaagaaaaacaaaaaccttacagttctgttagcaacatctatcaatgatatttctgcctaaaacactaaaaaaactaaagaacattaataagtggggccagttgtgtcagctaatttatattattggtgaatttctctgatctagcatgataagtagaaacattaaactgtgatactgttattgtttactgtttgattaatataagctggtccctttgttgaaaacataaagtattgcacatagaacatctttagatatttgggccagaaatttaatttctattcctctagtcctgttacctagataatatgtttgccttgtaactgggctccttagttctctgtgcttgcccaccccccttcttcacctcattctatttttcacacgtcagccaggatgagcctttaaataaatgaaatacatcacatcagccctctgattctccaaaggtttttcatctcattcatatgagaagttaacatctttaccaaagcttttacatagggtgacggtgtggcctggggtgtccaatcttttggcttacctgggccacacatcagatacactaatgataactgatgagctggaaaaaaaattgcaaagaaatctcataatattttaagaaagtttacaaatttgtgttgggctgtattcaaagccatcctgggcagcatgcggcttggaggccgcaggttggacaagcttggcatagcccaaactgccctgggatagttctggtttatgtcttttatcccagaatatgtattaatagcttctcattacattcagtaacttattcagagccttctagtttgaatgataaagtacctggtcatcctgcctgtaagaccctgatattacttccttttgctcacttcattccagccacactggtcttttccttcaacatgctgagctttttcccacctcagggactttgcatctgtgttccctcagcctgaagcactcctctctgagatgactgattcacttgttccctttcttctttcagctttgcttcagtgccaacctatcagaaaagccttccctgcttattccgtataaatatttccactcttttctctttttccactctacgtaataacatcttttaatttttttttgagacggagtcttgctctgttgcccaggctggagtgcagtggcaaaatgccagctcactgcaacctccgcctcccaggttcaagtgattcttctaccttaggctccctagtagctaggattataggcacgtgccaccatgccctgctaagtttttttttttttttttttttttttttttgtatttttagtagagtaggggtttcaccatgttggccaggctggtcttgaactcctgacctcaagtgatccgcctgcctcagccttccaaagtgttgggattacaggcatgagtcaccatgtccagcaatagatcttttttttttttcttaaccacctgacatatctttatttactgcctacaaacctgtatagatccctttctatagtataagcactaagtttagtgcaggaactttgttttacttgctactcaacctcccctagtatagaacagtgcaaaaatacctagtgaatattttttggatgaaaaaattacctagaatttttaaaaagatgaataaagttatacattggaagaaatggcattcataataactcaaaatgagtggttaaacgaagtatgatttgataaaacttacactgagagttttatattttttccctctgcttccttttggaattactcttttcagctgtggaaataacgctttttttttttttttttttttgagacagggtctcactctgtcctgagtagctgggaccacaggcgtgtgccaccatgtccagctaatttttaaaaatttattgtagatacggggtctccctatgttgctcaggctggtcttgaactcctcccgtttaaggattaagcagtcctcccattgtggcctccccaagtgctgggattacagacacaagctattgtgcccagccagaaatactctttttaagtgtggctaaagctacgtccatgtcatgtacctttctttgactataatgttgacataagctgaatgccttttagcatcgttcataacaatcagttgaagataaactgtatttgtaaactatctcatatgtataatatgattttgaacttgctgtatcaaattatgagcaaacctcacattcttaaagtgacttaaatttaagagttttattgaggtataaaatatatatatatatatatatatatatatatatatatatatatatatatatgatttactctgaagtcagtgattttttagcagatttaaagctgtgcaactatcaccataatccagttgagaacatttccatcattcttaaagtgactcttctaacaaagttgcattcctttgtttccccttgttttctgtcaaacgtttatgtcctctccatgccatttccaccctcaccatgcacccccacccaccccacaagttagtttgtgacctggtggaggctataaaagtgtcttaccttgtgggtttttttcttttcaaaaaatgtctttattttgccagcaccttgatcgtatattttctggtttttcagaatgtttttcgttctctatttctgtgtattcattagaaatacattttttttgcaatctgagtcaagttctcaaaaatgattttcgcaagtgttctttctcccaaactgtttgctccttgaatagagaactgtcttactgtgtttgttttgtcttgctctctattgcccaggctggaatgcagtggtgtgaacacagctccctgtagccttgacttcctgggcttgggtgatcatccttccttagcctcccaaagtgctgggattaaaggcgtgagctactacccctggcccttactctgttttgattacactgtgactagacatgcatattgtgggcattaaaaacttacttctatggttatctcacctttctaattcagacaaagagtaatttgtcctgacgtattcttcctcatctcttctcttcccttctgtccaggtctgtcaggtacatatttaatttctagaggatacaaaaatgttcaagatatttaagtgcaattaaattcataacaaatctagataatatagcccctggcatatagtagtggttcaaaagttgctttcacttgaaaaactatttctgataataaatttatacattactgattgctctctgagaattatcaatcagtgtcttgtttttgagacagaatttcactcttttgcccaggctggactgcagcgatgtgatcaccaggtcattgcagcagccttgacctccctggctcaagagattctctcacctcagcttcctgagtagctgggactacaggcatgtgcctctgtgtccagctaatttttgtatgttttatagagacagagtttcgccatgttgcctaggctggtcttgaaatcctgagctcaagcgatcctcctgcctcagactcccaaagtgttgggattacaggtgtgagccacggcgcctggctgagaattattaatgttttattttgaattctagtatgtagttattaacacaccagcaattcagtgtagatttagctgacttggaatataattgacattaagactactgaaaaaaagtttctctttaaagaaaaggctttaataaatgagaaatatagtaattacaaaggtagaaacaaaatcaaatcttgtctggtagatccaggtccagagagcatcgcagacatcgatctcgctccatgtcacgtgaacgcaagaggagaactcgatccaaatctcgggagaaacgccatcgccacaggtcccgctccagcagccgtagccgcagccgtagccaccagagaagtcggcacagttctagagataggagcagagaacgatccaagaggaggtattgatgtgtcaatcagaggatatggagctaccttaatgttttagagttgtttatgtttacttatgttacttatgtttagagttcagattattggtttgaaacttttgcatctggtaatatgtacacatttatgtgtgggtgtacaacatttttctgtgattatatgggtagttttgaaagaatatacttatgagccagagcaagaaattggaaccaatatgtgtagaggttattgcttttctctgcttagtgtgtcttggaaaaaagttctttacaggtaaataattttaaataccaatacccttagtatggatcagcaaattaggggctctgagaagtcctttcattacaagagttgtttagctttgatttattgttttctaaacttatttgagctgggatgctttttcagagcagacacattctagtatattcttgttttatctgcactatagatatgtattgttacataccttcagcttggcaaggcagactaataaggaggttccaagacttcccttggtttaatgagaacattcaaaaggtgcaggcatagggtaaggtatgtttgaggacttgaatatctattaaggatagacaaaggattataatgtggtagaagagtttagcattcatagtctgtatagatcaaactgtcaaaacttctcaggtcacatgatggcccttaaaccaggtaatttctgtgtaacgtaagccatgtttaaaattgcttttttcttgacaactattcagaagtatatgtatgataaacattttttgagtgcctagtacctactagtcttacatattctgtggattactccacataaaatctataataaaatccacagaaagctgttaaaatctttcctatttttttttgactcaactttccattccctgaaatcactcacaagctgagtttgttaataggctctcaatattttatttcttatattctggccttgtttttagtatttcttaaggtgattttaataataattaattgtatatgttttactgtactagacttagtaaaacataagaaagacgtataacatagttgaacaactttaagttgctctaagaagtttcctatgtgaggctgggtgccatggctcacgcttataatcccagcactttgggagaccgagatgggcgtatcacttgagatcaggagttcaagaccagcctggccaaccaaccccatctctactaaaatacaaacattagccgggcatggtggcacatgcctgtaatcccagctactcaggaggctgaggaaggagaattgcttgaacacaaaggtggaggttgcagtgagccaagatcgcaccactgcactccagcctgggtgacagagcgagactccagctctcaaaacaaaaaaaaacaaacaaaaaaaaaaacaaaaagtctcctatgtgagttagaacaaaggattgacatctttgacaataattagactggcataagactaccacatgttataaagtgctaaactgcatatcatagaataaatgatccgagagtttagatgaggcaaataacagagtaatcaaaaatggcttcaggtagtcggtaaaatttgaacaggtagaatcagctaggaaaaagatattccatatagagtgaatatcctaggcaaatgcagagaatgaggagggagtttgtaaaggacagagtgatttgtaggcctcttatctcacactcttgaaactgattttgggggtctaccctcagtgcagtgttcagaaataagcattttttaaaagttacctgtcttatctgcacaatgaattttcagaattatcctgctaggtgatggaaggtttagacattttcctgtgtcaaatctgcccaactgtcattgttgttgctgaactcctaaatgtctttattggtgatgggtatgggaaggatgggcgtgaagtcccctaatctgagattgtgttattttagtccctgatgcttcctgcgttgatgaagttgtataggaatttttccaccatacatgatacatgatcatatctaagatgtcagcatgttcataaagaggattatttttgtaaaactattaaaagttttgcttttctcgagcactttctcatctttgaattcaaattattctcttttaaagcatcattctttgttttatactaaaaattaccagataattgctgttaaaacctacttggtatttcatacaacatcaagttattgctacatatttgggtttaatttttcaaggtaaaagttcttattgaaagccttttatgttttgctgttctcctttccctactgtgaaatacttgtctctgatacaagtagattctttgtgacctcttcctggcaatag

SEQ ID NO: 128070 - DNA, 2244 bp, Homo sapiens
ccggtagcctgtacaaccagcaagctatggatggtttttacattctaaaaagaaaagaactgccacaaagattgcatggacctgcagtaccccagatagtcaccatctggcccctattctaagccatttaaaatttagataatacatttctttcactttttaaagctgttatctatgtattattttttatattaaaataccttttatgaattggagaaactctgtgttgtctctgagatgagagtagcctgtaagaaattattttagccttctgaccctctgctatttgtttttcacccatcttcttgttttaatgcccttatcaactatggtagtgctctgtaatttgtcagaaaactgactcctctgtcatgggtatattcgtctatatatcttcagctatcaagagcttaatatttatcctattctttaatttgggtttttgggtttcccaacatattttgctcctcaaattaatatttttcagatcctcaaaagaaagattcagagaccaagacttagcatcatgtgacagagacaggagttcaagagacagatcacctcgtgacagagatcggaaagataagaagcggtcctatgagagtgctaatggcagatcagaagacaggaggagctctgaagagcgcgaagcaggggagatctaactagctgtgtacatttcttcagtccttaagcttcctacggagttacgtactattgtttagttcacagctgttcagggtgacagtgagcagatccagacaccagatccagctaggctagatgtacagtatctaacttgatctgaactgaacctgttttccttgatgatgcctaaaactacatccatagtttctggtgaacctgtaatacagttctgaaagtacagttttatataataagatgctgatctctttattctttcaagtaagagtgctagtgaacaaattgtgttacttgccttgggattttttgaacgtttgtaaaatgctgtcttcctagtccaaacagctgcagctttgggcatttttctttttaattattcttcctctgactttgtatcccttaatacctacactctccaattgtaagagaaagggggcagggaagcaatatagcttccattctaaggctgtattcccgttatgaattactagctgattacagttcagagcattgatcctggaatgtgtgctggagaaatttaaaatactggggttttttgtttaatggtgcctatttagagttggaagttgaacagctgttgcattacatacttttgcttttttattgaaattttgaaatcaaacgtcttgatttttctgttctgttgaattgctatgttcaggatgttctagggggtgggggcagggactcttttcgtaataagcacttgttttattttgtgtgtgtggagtataaaggctacacccttattgtaaaaaaataataataataaaatgaaagaaacaatcaccaccaccattattaaactgtaacttgtctagtaaattgtcactagaactatttgctgtgggcatttcctctattctgttacgtcattaacagtgccttactgtgcaaggcaccaaaggacataaatacgtacttgcaaagattccagatgagctgttcatgtgggccccttgctgactatattccagccacttcagggttgtttgtaatgaccgttatagagaagggctcgacctgcagaagaaactggggtgtttttattctcattcaacaaacccaaataaaaacagtatatgtaaccaacataatgagacttaagtttctgccttgaagagttgtatatccgttagtaacttaaactgtaattggcaggtatcacttgtgattctggaaattctgaggaacacagattccttaagtaatgaaattagtatctgtgggtatcattaactaaggtcacctttcaagaactgttaatgtcctttgtccccaagtttgacagatttgatgtcagaggcatgtgggcctctgtgaaggtgctgagagaatgggaaactaaggccattctaagtgataccagattacgttaaaaaccctcatcaagttcccaatttaccaagctatgcctcattaactgagggttttctgctgtatttggttccacacatgcaatttatatggcatttaatctgagagacccatctgcctcagtggcccatttcccttttatttttggttgctaagaaatgttttgtatctcctttgttc

SEQ ID NO: 128071 - DNA, 1796 bp, Homo sapiens
caccaggctaatttttgtatttttagtagagacagggtttcaaccatgttggccaggctggtctcgaactcctgacctcaagtgatcccccgcctcggcctcccaaagtgctgggagcacttcagtgtgagccaccgcgcccagcatcacgcccagcatcacgtgcgttttttaacctcacaggcgattccagccagcacctgtccctggggagccctgagcctgtggtacttggccctgaggctgggaggagctgaaaggctcctgatgtcccagacacaggatgtttgctgtgaggagcttggaagttaaaatagagtatgttctcagactgccaggttaatttgcagttggaataagaagcaagccgtgagaatcactaaagtgtttctaagatttttattgcttgtcaagtacatcctttagggctccgcgtctaaatatttaagattccagctttgctcttatcagagctcaaatgtggccacagttctcccaccctttgcctggtcataattcagaaccaacttatcaccatggtttgttctcattctccttctcttactcccaaccagtgacacccgggcttctgcttacagctggaggcactggccacctaccttccttccttggctgggagcatcaacagccaagcccctttacacggcagtcatcttgatgagttgctggggccaaagcctgccctccctccctctgtaagcagtatggattccttgtggccttctgagccttctccttgctactcaagagtttccaaatcaaaagacttgcagcctgttcctgttttttaaaagtatttataaaagctgaatgtcaattttctacttagagttataaatagaagcagatgctctggtttgttgatcagcacgctgtgttcttacaggggaagtcaaagaatccgaagtgtgcttggagcatagaactagcgcaagagggcgctagtgaggcggtgcggcgcgggcggccaggagctagggtttgaaaacagacttcggtttgagccctgaatctgccacttagaagctgtgtgcccttgggaagcgataataatacatttaccaaagtcagactagataaccccagcactgaggagttatccacatcatctcttcgtccttcacaacaataaatctataagctagaagttaccatctccagacttacagatgagattgctgaggcttaaaaaagtcaaaaaggtactcaaggtatcatgatagggcctgggggagttgaatgtagtttagattaaccccaggacctactactttatttttattgcgtttattcaaaggcaaaacctgtaagagatgcctaaaaatgataatggctacctttcttaaaaaaactttattgagatttaattttcccacaataaaattcaccaatttcggctgggcgcagtggctcacgcctgtaatcccagcactttgggaggccgaggggagtggatcacttgaggtcaggagttcgagaccagcctggccaacatggtgaagccccatctctaccaaaaacacaaaaaattagccggcatggtggcaggcacctgtaatcccagctattcgggagggtgaggcaggagaatcgcttgaaccctgaaggtagaggttgcagtgagccaagattgtgccactgcactccagcctgggtgacagagcgagactccgtctcaaaaaaaaatcaccaattttaagcatacagtaagttgacaaatgtatcccaccactgcaatcatgatatagaatagttccatctccccacaaattctc

SEQ ID NO: 128072 - DNA, 1031 bp, Homo sapiens
ttgtaagggtgccccgccgcttacccacttaaagtcatgtgtttatttgctttttgtgtatctttttggtgaagtgtctattcagatcttatatagggcctgtaattttttttttttttgagatagggtcttgctctgtcacccaggctggagtgcaatggcacaatcttggctcattgcaacctccacctcccatgttcaagtgattctcctgtctcagcctcccaagtagctgggattacaggtatgcaccaccatacccggctaatttgtgtattttttagtagagacagggtttcaccatgttggccaggctggtctcgaactcctgacctcgagtgatctgcccacctcaggctcccaaagtggtgggattacaagcatgagccattgtgcctggccgggtctgtactcttaacccgcacactctacctgcgcatttttttcctcgagtctcatctattaaatggaaataaaaacgcaagcatggaagaagactgctgctgttccgtctgcccttcccccactgtctagggaaccccccccttcacacctctgcagtcacacgaatgttttagtcaatgtggacgtttccacactggtaacagtgacagcttagtggtccagaggcgggtgcctgagcctgtttaaaacaatcccagtccttccttgggactagtttctagcttggactggctgttctcttgaactgaggatgtcacggaagttgacagctgttagtggccatgtgccgccatgataaagctggccaccgcagaagcaagtgacccaggcacaggaagaggggtcgaggcaggacatgaggagcccggctccagccagtcccaagcccagttgtatccctactcttggcctctctaaggccctcctgagtcttctaatcatttctctttcttgcgtaggcagcttggaattgggtttttgttactaaaagccaaactaacccactaatgtactgggtcattgtggaaattccatgcgctctatatgtaaactgttcacacacacta

SEQ ID NO: 128073 - DNA, 1040 bp, Homo sapiens
cctgggtgggggcctggcgaggcccccagggctggcactggatcgacgaggccccactcccgccccagctgtgagtgaccacgggcttttctccctcctctgctgttctggatcctccatttctccccagactccacctccttgctgctcccctagcctggaatgccacttggaaagcagcccacgcccatgctcgcggcctggtgcctgattagaccctgtcgcttcactctttatttgggttcccagcacgttcacccaagcagggttgtcacccccattttacagatgcggggtcagctgcccagggaggtttggggattcatccagtgccacgtggctgaccagtgcagtgactcactcagtgcccaggccggtagaggtgacaggcacacacgctggagggtctggctgggaagcaaggccccggcaccctaaacacctctcctctttcccctcccatcctttcccagactccctgaggacggcgaggacaatctggatatcaactgtggggccctggaggaaggcacgctggtggctgcaaactgcagcactccaagaccctgggtctgtgccaaggggacccagtgatctgggctctgcctggtcctcagcctgccaggcagatgcagcaccccctacaggggaggccagttgagagcttgggcagcctcttcctggacccagttatccaggtcttcatgctctgctcaagggggccacatgagcgagcctaggagctggacttcaacccaggaagatgcatccgagggaaaggagattttctatggcctcaggcctgagtgccaatattagtctccagcttctgtggatgatcggtttgatgacattgggatggttgtttagcatttctgtgccttggtttcattaaaatgacaatttccccctagaggaaaaagacagggttaacaaccacagcggattccaatctgggttctcattccggctcatggaaatgagtctgccgttgttcagtggcagtgggacttggcagggataacgtcattgctgtgaat

SEQ ID NO: 128074 - DNA, 1144 bp, Homo sapiens
cctttgtaaaatacaatacaaatgaataactagcagcaggcacttggatgtcgggtaattgctacagattcttcctctcaattttggcacttatatcatgatggacaagtaacagtttacagacaaacattgagctgcagaggcactgttttcatctatgatttatgtataacattgactaaaaaaacactttcaaagtgggggcacaacaatgtaactgtacttaactgtgcactcaatggttaagatggtaaaaaaaaatccaaacaaaattgtaaagggaattcacacctgctaggagggctgtaatcaaaacaatgcaaaccaacaagtattggtgagaggatgtggagaaactggaacccttgtctgttgctggtgagaatgtaaaattatgcaaccaatgatggagttagtctttcctcagaaagaactaccggtagcagcggtggtgtcggcagcggctgtagcaaagagtttggcgcgatgtctcacaccattttgctgatacagactaccaagaggccagaaggcagaacttatgctgactacgaatctgtgaatgaatgcatggaaggcgtttgtaaaatgtatgaagacatgtgaaaagaatgaatcccaacagtccctctatcaaatatgacatcagtcagttgtttgatttcatcaatgatctggcagacctcagctgcctggtttaccgagctgatacccagacataccagccttataaaaaaagactggattaaagagaagatctacatgcttcttcatcggcaggctcaacaggctgataaataattgtattggaagcattaggggggttgggggtgggcttggaacacaggtgagtacggtgtgctgtagcggaagttttgtatcatagtaatcctgtttccactttgttatactctagccaagattggctgtattagatgaaatgtgaagttctttttccatttggaaacccccgttgccccctctttttttcttttcttcctttttttttacttaaacatttttatgatgatttagatggaagttgttcttcctcaattaatgttggttccagtccttccactgtttatatctgctttataacgttcactgtagtaacccttcttcaagatggggtgggggatgg

SEQ ID NO: 128075 - DNA, 1064 bp, Homo sapiens
tttggctattgtgaataacgcagctatgaacatggtgtatgagtatctgttcaagtccttgctttcaattcttttgggtatatgcttaggagtggagttgctggatcacatggtaggtttttttgttgttgttcttttgttttttttttttttactaaagaacacttatttatttttaccaaaattttatcttgaggacatggctaaactgcgtttccatcccccaccccatcttgaagaagggttactacagtgaacgttataaagcagatataaacagtggaaggactggaaccaacattaattgaggaagaacaacttccatctaaatcatcataaaaatgtttaagtaaaaaaaaaggaagaaaagaaaaaaagagggggcaacgggggtttccaaatggaaaaagaacttcacatttcatctaatacagccaatcttggctagagtataacaaagtggaaacaggattactatgatacaaaacttccgctacagcacaccgtactcacctgtgttccaagcccacccccaacccccctaatgcttccaatacaattatttatcagcctgttgagcctgccgatgaagaagcatgtagatcttctctttaatccagtctttttttataaggctggtatgtctgggtatcagctcggtaaaccaggcagctgaggtctgccagatcattgatgaaatcaaacaactgactgatgtcatatttgatagagggactgttgggattcattcttttcacatgtcttcatacattttacaaacgccttccatgcattcattcacagattcgtagtcagcataagttctgccttctggcctcttggtagtctgtatcagcaaaatggtgtgagacatcgcgccaaactctttgctacagccgctgccgacaccaccgctgctaccggtagttctttctgaggaaagactaactccatcattggttgcataattttacattctcaccagcaacagacaagggttccagtttctccacatcctctcaccaatacttgttggtttgcattgttttgattacagccctcct

SEQ ID NO: 128076 - DNA, 1179 bp, Homo sapiens
aatctcaataaccctatgaaagccctggtctgttgtgttccttcaccgtacggtttctgtaataaaaagtgttaatccatgttaatctgtgtgaaaattattgcgtgcaacagtattttctcgtgtacctctttttcctatgtgaattgtccctcttttttatttataaatgtctacttttgtttttttaaagacaaaccaatgtgttgtagacctatatgtaacctattccttagtctcatattataggtatgttataagaatggatattttacttggctttagaatgttttacaagaaaactaattcttaactgatcaagtccttgctactaaaatgcttgtgtttttcatcatgacgtcgtgtgcttctaaattaatcattttcgttgtagaaaaatggagtgaatttatattagtcttggaaactaataatagcattgtaaatttatgagatgattttaacagaaaaaatatagaagaatatagttattttaattgtaatattactaactgtagggtgagaaaaaggggggggggtcccattgtggtgaactatgttatagcttgttactcatagtttctttttgatcattttttcggtctccgaggtgaaatgacttattaattaaaatttgtaaactcacatatgcatattgtatatgtgtagaaatgtaatcacactttgtcttggaattacattaaactgtttgaaatcactgtacacctgcctggcatgcttatttatcctggaaccagacctgtcataaaagcgaagaggttattgttacaagtaacatatttggggtttgtttgtttatttagatggagttttgctcttgttgcccaggctggagggcaatggcacgatcctggctcactgcaaactccgcctcccaggttcaagtgattctcttgcctcagcctcccgagtagctgggattacaggcatgcaccaccacgcccggctaattttgtatttttagtagagatggggtttctccattttttggtcaggctggtctcgaactcctgacctcagatgatccacctgcctcggcctcccaaagtgctgggattacaggcatgagccactgcgccgggccgagattatttaatggctctggaaatgtgtagaagccaccactgcattgaacatttgcagagagaggtggggggc

SEQ ID NO: 128077 - DNA, 3015 bp, Homo sapiens
atattagtccccctacagccaaggaaactgcccagagccacacaactcttgaggggcgaggagggcttgaacctgagtctgcccagctccagaactgagcttgcagccattagccacagctgtctcctgcatgtctgagcaaagaaaggcctttacacagcatcaccctgtgccatcccatgcaccgtgggactcagctaaaggactgtgcaaagagggggctcctgagttggatttaggcaaaaggggcagaattcgtttgatttttagagaaaatctctggagagtttcttttgattcatagaattccttttagatttctttccagcataccaactagctttagtagtgctgctacaaccagctcttataagtaagagtgaaaaagtattcttttcttctttaaaaaataagtttttcttgcttatagttaattctagaaaggcaatactaaaggtatatatttttttcaaaatgctattttttactgcacttgataattatcctgacagctctgatctctgtaatagattcactcttcagctctgggcagaaccagaggcagggttcacaccaaatttgtaaataccatatgtgggtctggtgtccaggaacttttttctttctgttaaaaaaaagaaaaaaaaaagaaaaaaaaaaagaagtagaggtggaagaaagacaagacttagaggaacaaaagaatgttttcttttgagatactcttctcaaagaaatagcaacaattgtataaacaggaaaaccagccagctttcatgataaaaggaaggcgtgtctcttgccctggtatgagattaacagaaatacagatgcatttttattttgattgaaagatggtgagaatgtagaaatgcttaggactagatttttaattttttaaaataactattatcatttattatgaaatatttgttcagttgttttgagtgggtttcttgttccttttttcatttaaaaccttctttgttgactggctccaggcttgtttgcctaaattcttaggtagtttacacaagttctagaatcttttagaactttaactccattggaagcaaacctaactaatcggagtttgagatcctggttggtttcaataggtattctggaattctggcagaacacctaaagattttttttttttttagaaggttttagatacattatcttacacaaactgtgacctaatggcaataattacctcaaatgtgggcattcatcctggttttagccttttttgaaatcatgtagccagcttgatcttggaatttaaagactatgaattctctgtgggctgaaaataatgattacttcatacccccggtcatcgttgcttaagtgaattctgaaaatagctcatctttacaacaaaaattaaaccaaggaagagattattctttgtgtgttgtactcaaatgcgatgttcaaatgcacatgttaagtatatatgtttttagctactgtaaaatgctgttagccttctaagctatcaaaacagtcacattttaaatgagtaaactaaacaattgactgtggatacttaagcatatttctggctacgttttatagttaaagtgttttatagtttacatttagactggtactttttaaagaaaagttctgtttataactgacatccgcaaaccccagtgaatgcctcttagttggaggttgtgtctcccccaaggcaagtgtgttgtcccagactcttctgtagtccagcatgcgcacttccctctggattattactttccacgtgaactcaagagaacatgaaaggcaatccagatggagggaaaaggtgtgagtccgcagcccgggccagatgcgaaggtctcatgcgtgtcgtctaaacacttgtcttcaaggccttctctctgacatcttggaagagtcattgagaacagataacctggttcattgatttttgtcttgatttgaatatttaacttattaatagatccactgatttccaggcaccaggcagtagaagagactgggattcaggtgaccatgaaggcacagctgctacttctgggccgggggtgatattttgatcagcgttttgtaggggaggaccatatacccctattcccatggtcgctggctgggttttccatatatctgctgtcatttattcgttttccccttaaaagcaaaatcaatgtaaaaggctatgtttacgttttactcattgtccagcttagactcaaagtctagttcggtgggagggggaccttagcatcctctcagagatggtcagggctgagcaggaggaggcagagacagaggggcagctcagcctggtccattgagacccactctaaacagacatcatatttggaacaagaagatgcttcgagacaggaatgggccccactgtcatgcagaaacagactgggggaatggcagtttccctgagtcttggtttcttttatgttttctcttgtgccaccaccaaactgcagaggacctgctgtgacctaaagggcattcctttagcagataagaccttgaaaactgcaaaacacctgggaccagggagcttttaaaaaatacaaaaaaataccacatttgctttttccctgtgaactgtattgacagcgtgttcttaggacagtcttttggtggaaatgttactgtaaaatagttttcatctcacccctcctaatcatactcccactttcctgtttgtgtggtggtgttgctgttttttcctttacatgaattaaccaaatgaattttgtgtcattgtttttggggcttatatttttaaaacatagaaattgccttttgttcatttgaaaagtaagtatgttgtatctgaaaaagggctctgcctctgctctccctcgcttccttgtaaccaatctccaaacgaatctctcctggcaccgcccccttccttatatagggtcactgtccccggggccacctctgcctccaccctgctgtcaccactgccctgggccaaggcacccaggactcccagaaagc

SEQ ID NO: 128078 - DNA, 1397 bp, Homo sapiens
atattggaacaagcttggggtggaagatttaggccgtgtgagcatgtgtgagtgagtggaacaaactttcttggaaactggagggaggagatgaggaggcttcgggaagtattactgatggctcatggttgagagagcgacgtggggacccagctcgccccagcttttgtcccaggttctctttgtctgatgctgagggcagggtggggtgtgggaccaccactcttgttggcctgtcaagtagaccctaggacagaaaatggaaagaaggaaatggctcggtgctctcaactagcagagagaattgaggagaggtaagggttccttctgcaggccagcctgggactccacagcgccagcaggagtgacttggccacaagacattccagccccagggactttgcaggcttcattccctgtctgtgtcttttccttctggtgtgttttacagacttctgatggggaagcttcaaacttgagcaggccagagatgtccttaccaaattggaaaggaaggtgaaactgttcctttctttagccaaagaacccttctcaaagacgcctccagaaatggacaaaatggccttcccttcgttcctttccaggcaataatgacatcattagtgatgcaattctatttgtctttctctttcctctctgtccttttttttaaaaaaaaaaaatgcatttatttcaaaactgtgctattcttttaagaggagtggaggtgaccccttcgatgctgctgctatcgggagacaaggtgccataccaatacgtgggcttgactaatcccaggccaccatgggagagagcaaagcagggctgccaggagttcagttgcatcaagggcgtagagcacgcgggggctgggctcggaatagcagtacttttccactttgatgccttagaactctcacttctcatctccacagaccagactcagtaaaatctcaggccactagagaatggaaggcggtgaaacaggatttaaatgcaaaaaaaacctattggaggcttttggcaccgtggctcactagagggacccagcatagtagaggtttctcttgttgcagcttctgaaaagttcaaaaaagaactccaggccgttcttccctcaaacccagtgagagtttgcagagaagtgccccctgcagggctcccgtcccagaacaccagcaccagagagggtcttcccgatgccccccgctggacttgcccaagcctctgggagcccctcatctcagatccctgtgttgaacatgacactgactgtcccttatttgttaaaatttgcaatatctctcaagtaaataatagccaacatttgttgaatgctttcatgactcccgggctaaggcctttatgagcgttgtctcaaggggccccaacagcca

SEQ ID NO: 128079 - DNA, 1504 bp, Homo sapiens
aaaacccagctcaagaacccattctacgccaaactggaaaggagaagagagcaacaggaagattccagaaacggggggccccagtttttgaagaactttatgaacttttcaaagattattttcatatggcagcaagtgatacggaagactgctgtcagggacacctgatatggaaatcaaatagatttttaattaattgaacataagatttagggatttttccagaactcgaaagggtcaacagccctccagaatgtcgggctgcagcctgaggaggctgatgtttggagctggtgtgggattggcgaagcccagtccgggctccctagtcaggaaagacgggggacggccaggctgctggaaggcccccgggggcgcggggcgagttttctttttctgagcactctggataaatccctaagcaacgttgtttctcaaatgtcattaataatgtgtgttgcaaactttaggtttttttcttttctgaaaatgtattttctctttgaatccacccctagtcgcgtagcgtagggctagcggtcgtcacagacaccctagtagaatgtagcactcagcacccttgtctcctaccttgtgttcaactccaatgataccaatagaatattcctcaatgtaattgcacaaaaaaaagcgatataacataggcatgtaaccaatgtggcggtgcaggtgtgcgggtgagcgagcacgtgtgggtgtgcacgcgccgccctccccgcgtggccctcggcgccgccaccctagctggcgcagtcttgacactgcatccttccctcctagtgccttaccgagcgacagacgcggcgtgagggtttacttccactggtactccaagaaactgaggctagtcagacacaatctcagctcttctgttgtgctgttgtaacagtttacgctggccttttttttttctttttctttttctttttaaaatgttaatgcccgttgtctttcctgggctgtttgctagcggaaggatgccagggaagccagcaggagctaggagagagtccgtggatctcgaaagaaatatgggagacagatgcccggcgggtgcgtctggagatggggacggcgggagttgagttgtggcagtagttgagttgtaatttgtgggcggaggcccagagagactccccacccttcacccctgccccactctgtccccagttccgccatttgtgaggccagaggtttccggactgttggcctcgccaggcagccgtctcccgccccaggcggcatcccccagtccctcccgcctccacgagagcctggagctctcagcctcgcccggggctccactctctcctccggctccctgggctgttttgctctaacgatcttgccagatccctccctctgtagacaaccaccaacctctgtttgctgttgaattctctcctcacattacccaggtctgctcaagacatgattttggttttggtttctgagggttctagtgggcagaaggttggaggga

SEQ ID NO: 128080 - DNA, 1018 bp, Homo sapiens
tccttttaaaaatgttctcttctctgctctacgtcctcccacttcccggttcaagtttcactggtgtcccgacccgtccccctgccctctgcccccccccccccccccgcccctgccccgtttgcattgtttgtgtgcggcatcttcagtataaaaggccagcgcccacggtcccaggagcgcctccctccttctctccctcctccctcgggccattctctccctccctccctccctccctcccctccagtgtttatatgtaagggtactggttgaccttggcggggctcagtgggtatccagtgtagacggtggaggctggcgaggcgctgatgtaggtctggtgggcaaattgggctggatactgactcgggtggatggtgggcgagggcaggacccgggggcccatgctcacggggacctggtggacgatgctggctgggtaggcagtgtgctgcacggtgtggcgcgcagagccttgcgaggccaccaggtgggccacggtgccggtggagcccagggccgccggcgcagtgtaggtgtagaggtggggctgggtggggaggtgggcagcggcagcggctgcagccagatgcgggtgcacagtgccgtggctggggctgttgtgcgggaaggagtacggagcctgggccatggtgggagtgatgtaggcctgctgccttcggtggctcccagtgcggtccgtggtgatgtgctgctgagcctggggaggagaggcaccaagagagacgtcaggggccgacacatggggaggaaggaatgggaggaggggcaggagggcagggaggaggaagagaagggaaagactccagaagtaatagaaggggcttccctctgtgtgttgagaaagtaaaaatttacttgggacctggcgcagtggctcacgcctgtaatctcagcactttgggaggcagaggtgggcggatcacctgaggtctagagttcgagaccagcctggccaatatggtgaaaccccgtctctactaaaatacaaaaa

SEQ ID NO: 128081 - DNA, 1031 bp, Homo sapiens
aatcccagcagtttgggaggccaaggcaggtggatcacaaggtcaggaattcgagaccagcctggccaatatggtgaaaccccgtctctactaaaaatacaaaaattagctgggtgtggcagtgggcgcctgtagtcccagctactcgggaggctgaggcaggagaatcacttgaacccgggaggcggaggctgcagtgagctgagatcacgccaccgtactccagcctgggcgacagagcgagactctgtctcaaaaaaaaaattagctgggcgtggtggtgcatgcctgtaatcccagctacttgggaggttgaggcacgagaatcacttaaacctgggaggcagaggttgcagtgagccaagatcacaccactgcgctccagcctgggagacagagcaagactccatctcaaaaaaaaaaatcagtattgtttctgtgcacatctcaccccagcaggactggttgcccaaggaggcaggacagcccccagccccagcgccaggctcttgttcattccctggtctgccctgcccttcttggtgggggaccatctgcctgtctttccacctggaagatgttttcttctccattaactctactgttctttagcgtttaaggaacagaagcaatgcttgttgtaactatggtttctaactatacaacacaaaccacacagtcttcaggctgctttgtcgtagccttcacttactaaacccctctttttctgcttccgttgtcattgaagttagagaaaggtatctggaattttctgcctcccacactttcctaggccattatgcagtttgctcctaaagaagcccagtgttggcccagcgcggtggctcacgcctgtaatcccagcactttgggaggccaagggcaggtggatcacctgaggtcaggagtttgagaccagcctggccaacatggtgaaaccctgtctctactaaaaatacaaaaaagttagccaggcgtggtgccgggtgcctgtaatcccagctacttgggaggctgaggcaggagaatca

SEQ ID NO: 128082 - DNA, 1127 bp, Homo sapiens
cctaagcttatgacattcttctcccagcgaggtttactcctaacccaggtccccaggttgctgggttcttgctggttctctccttgctcagatgtcccattctggcaggcccacgggggttgtacccagctctgggctgcaggtgcctcccctgcagctctgctgagctctgctgcacaggaagagcccaggccagcccggaagcatctcactccctagtttccagaagcccctgtgggtccagcaccagccccttctccatgtcttcacatgtccccctgctgccggctacacaggggacttttgcatgcccagtctccctatgggggttagggagggcaaaagccctgttcctgccctctcccctctgcctccctcccctgccccagggcatgaagtgctagttgggtgtctcacctcacggccttctcccacctctgacttctccctttgcattttcagcactgtctccaagcaaagaaaaaacgtcatcagctgtgtcacagtccacgactccccctactccgactcctccagcaacaccagcccctactccgtgcagcagcgtgctgggcacaacaatgccaatgcctttgacaccaaggggagcctggagaatcactgcacggggaacccccgaaccatcatcgtgccacccctgaaaacccaggccagcgaagtattggtggagtgtgatagcctggtgccaggtaatttggggccaggacagggcaggaacctctccctggagagtggttttcctgcttttctgctgctagaaatgttgctgtatgggagctagtacaatagaaagtgcccagtgactgcaggcgacccttaccgaggattttattcaagtatccaggggaggcttctgctgaacagcacattgtataagcagcgttttccttctttaatcctgtaatcaatacctctctgcctttacaatggctctgcttccaactaggttgattaatagaaaataaaagcctcctggttctttatgcctgagcctggaagaatacctggtctggggagttcctggctgacatctagcaccactctctgccaggaagccctggtggtcagatgggcttcttgtgtaggaagaacctcctccgagtctt

SEQ ID NO: 128083 - DNA, 1045 bp, Homo sapiens
taaaagaagaccagttctactacttaatcctgggggacccagaacaatatctgtttgtcttatcttttggccaattctctagccatgaccagagtcccctagtccaacagtaattcactgaaaaggagttccctggctcttccctgcccttcttactttaaaaagagctgactccgcccttctcagtgccatggctccagcactctgacaaacgcccagcaccaagagggggctcagtggacaatactctagactccctatggccctggcatggtgacctgcacacagtggcatagtggtagtcacaggagggagcaggatagaatctgtattcattgaatgaatgactgaaatcagttatttttgccagttattaagtttgacatttcttcaagagcatggcacctgagtcccaattctgctatttagaacctgtatcaatttgggtgagtcacctacctttcctgagcctcagtttcttcatctatcaaatgggaatagaaatatcagccttgcatgccccatcaaatgatggaggagctagtgcgggtggaacacccagtgcatgtttgctatgattctcctgtctttagctcagtgtctcccagcatctgcctccaacatgccctggagttcttacgagtggagctgctggccagccatctgctgtgcaaccaacagtgccacatacgtggggtcaggaataatgattttgcattggctttcttttaaaaattctaggctatatcatctagtcctagaggtttagtgacaccctcaatcaggtctaaaagcccctttggtggtggaggcactgccatccctctgaaggtcatcggctgcctgactctggctgccaagctgaggctgagccatgttaggggaattaaccagcattttaggcaaagttacaggactggcactggggtaagtagcaaatagaaaacgaggctgggaacacagaaggtgggaatcaacatgcccacagcatggagaaatcaggctcgagaacaaggatgatcaatgtgtaggagggaaggtctcc

SEQ ID NO: 128084 - DNA, 1077 bp, Homo sapiens
ccattataatcccatcatgcagcagcctgcactattgaccggtcatgtgacccttccagcagcacagcccttaaatgtgggtgtggcccacgtgatgcggcagcagccaaccagcaccacctcctcccggaagagtaagcagcaccagtcatctgtgaggtaggtggtgagagccaccctagggaagagaaatcccaggggatgtgagtgctaaagaaatgtagtttagggagtatcagcacccactctgaacatgggacagttgcatgggatgggggcactcctcttcctgcagtgactagcaaaacatcctgtaccacctggtttggcctagggtttgcaggaagcacttggtttaagaccgtggtaatagtgtagggatggatgcaatggaatcttgcagtgggcaagagagattgggctcaactccatacagcgtgggcgagtgaaaatttatagccaaggcagggttggggggtgtcggtggatgggaagttactaagaggaagcatcaggggtaagggagattctgcctaaactgacctaacaggattcttgctaatgacaggcccgggtgatcagatatcacacctggaggatgaggaacctcatcagatatcgagggtgatcagatatcagggatggtgggttcttgctaaactgacttagcaaggttttttgccaaaagtagattgtacagcagagtgcacagttagacctaggagaaggttcacaagcctgactaaagtttggtgaagcaaattatcttttgtcactttctacttgtctggagaacactcagcttcacctgaagtttcattttggaaacaatttaccataataattgttttaaaatattttaaaatgttgaagttgtttaaaaatgttttaaaaaatactaaagaaatgtgctttctttgtatctaagatcagaagtttaactgatttagcaccttgcttaaatagaagcaatagcttgtttaatcccagacactaaccagcagaacacaaatctttcccattccctttaaatccattctcatctcaatgaacactttgaaaaaatcaaggtcaaca

SEQ ID NO: 128085 - DNA, 1033 bp, Homo sapiens
gatttgtcctcccacatgtggactgcacccaccaggcccgaggggagtgtgagcagagcttggacgtgcaggctggcaggtccaggcacccagagctcatcatgttgtgggatggaatggggcttgggcagagagaaggagggcaaggtccagctctctccctgtcaccatgtgtcagcacagaacccaaggaatcccatagtcctcaactcacgcctggtcttcccggttattgggaaggtgtatttgtcaaaatgaaaaggcagaacattttattaaacagttttctagcctaatttttagccttttcagcatttagacatggtagcaggcatccgtgtgtcctcttgtctgggcctcacaaatgccaggagcaagtctgaatgtgaacaccaaggtgactgtctcccatgttttcagggacctgcttttccctgcgactttcaatcgtgtttccactcctctctgcttttgcctttctgctcttagtttttgtttgtttgttcttctttgagttcatttatttgatttagattcgtgtctcccaacatgccacctccctcattttttatttttgtttatttttgtttaatccccatcactcctttaggctccctcctctaccagtgccactatttccttagccaatcccgaagtctccatactaaactacccatctacactctaccagccctcagcggcatccatggctgcagtggcccagcggagcatgcccctgcagacaggaacagcccagatttgtgcccggcctgacccgttccagcaagctctcatcgtgtgtccccccggcttccaaggtaagattgagcagccacagcctctcacctgcttcttacagaacggcctctggggctccggcacctgcagttttctgtcacgctcattttcatggagaaaggccctcctcatttcttccagtgagagcgctggtatcactgaactagagggctcctctcctactgtggccaacctagaaacaatagggcttatgcctcagcaccaagtcaatcct

SEQ ID NO: 128086 - DNA, 1037 bp, Homo sapiens
tggttgtcaaaactattaaatgaataaatgtgctttagaacaatgtctggcacgtagcaagagctatgtgcataagggtttattaaataaaattggaaaatgcatgggaaagccctttgcttttccacaatggaatcttgccttattccttagactcagagaaggctgtaagctgatcgaggatgtggcataccttgatcagcctgtggtatggagcaagactgctccatacctgacccggagccagcccctgacacgtgtgcataggaaggaggagggatgggttggtgtggatgaagagagaagggaattgcaggtgtgcaggtcattgaagaatcaaaatctcttccgaaatgtgggaaagagaccctctgtgagacacaggagttccaaggcttgagtcccagtgatgaggagctaagtcacgctaccaattggcttttgcctctcttgacagacaccagatgaccatgaagcagagacagggattaagtcaaaagaagcaagaaagtacattttcaactgtttagatgatatggcccaggtaagcttcatgggtgagtatgcaacgtaagccctttaaaaccaagggcagcaagacttctgcaatagtaatagaagataatgggttgaaatccacattattcaactgcagtggttgaccttgaccttaaatagttacagccagtcttagtaagaataccatttggtgtgtgaaacatttttaaaacttcataccagctcctttaaaatcgttccagttggccaggcatggtggctcatgcctgtaatcctagcactttgggaggccaaggcgagtggatgaccttaggtcaggagttcaagaccagcctggccaacatggcgaaaccccgtctctactaaaaatacaaaaattagctgggcatgatggtgagcacctgtaatctcagctactcgggaggctgaggcaggagaatcacttgaacccaggaggcagtgagccgagatcacaccactgcactccagcctggacaacaagatcaaaactccatctc

SEQ ID NO: 128087 - DNA, 1073 bp, Homo sapiens
cagggttgctcctgttcctgcagcagtatccatttctgggacccactttccaaaccacccccccgaattctaacagcaggagacacacacacacacataccctcaggctctacatcacctctgcctccttcaagaccacccttaatattcattttaaccagattttgcctgaataaaaacgtgaaggggaagaaaaggtgccccagtgtgttttcccctaggaaaatccctactggtaactagtcttatttgctcaataaacaaaatcttaggctgggaactgaaggtcagcacaagcagcatctgcgggtgtgcaccggggctctggggccctgtaacatttgcgcgtgtacctgggggaaggggtgctgcatcggcccgccccccgcagccacccgccgcagcagtggtcaccgagtcagggtgtggggaggtggaaatgaaatgcataattcataggccgctgtggtgtccagtctgtgggaggggtggtaattacagaactgagaaatgaggctgcagcgggcaagtcacctctaggttagaggctgctatgatagatggcctgcattgttctctttctgacctttttctgaacttccccttagaagaacagaggaaatatggtgctgccttttcccatattgtttttgaataataccttcagacgccagcttttagagtttctgttcttccgtttggggttttgcttccccctccacccgcccaatgccttgcttctttccatagaaaaatcgaatcactaatgactttatcctagtattaatggtaaatacagactacacaaatatttgtccacactgaacacaatacatacggggaaaggaaaaaaaaaacccgcagcaccctctccctccttctgctccgccctccactgccaagcaagacaatcccaagagccgtcctccgtcctccgtaatgatgcagacggggctgatgagaagggtggggggcgttgctcggtaggaagtgatggaacctaagctctggcttgcagaatagaatcgttttaaccggacgtgaaggtgcaagcaggaatgatgctcactccc

SEQ ID NO: 128088 - DNA, 1068 bp, Homo sapiens
gccgagatcatgccactgcactccagcctgggcgacagagcgagactccatctcaaaaaaaaaacaacaacagtctcgaggaggccagaggagcatgttttgttccccccacctttggaaagaaaaaaacattgtacaagtggaaaatcttcactaatgcaacataaaacttggcgattttcatcacaccaggtcaggtaatcccaggctgtgcttcttgaggcagtggaagctgatttcctttgctcacttatcacctgtgcctctcaatggcatgtctgtaacaggaggcagaggcctccttcccgaggtccatgggtcagagttttaccatacgagatggcggtgtgggaggtgtgatttgtcccataagatctctaaatcccaccacccattctgtaacagttgatagtcctcagcactgcattttccagttactcatgtttacagacaaatgtctctttgtctgtagttgctctctgaagaaatcaaagagcagctgttgtcctgcctcagcaccatggcataggaggtccagagttagcatcgaggatgacagtgacgctgtttctgctctggtatcacttgccccttgctcctactgccctagcccttgtgtcacttccttgttctcctgaacagtttttttttttttttttttttttgagacagagtcttgctctgtcacccaggctggagtagcagtggcgtgatctcggctcactgcaacctcagcctcccaggtgcaagccattcttgtgcctcagcctcctgagtagctgggattacaggcccccaccaccacacccatctaatttttgtatttttagtagaggtggggttttaccatgttggccaggtctcaaactcctgacctcaaatgatccacccaccccggcctcccaaagtgctgggattacaggcgtgagccaccgtgccggccctgaacagtcttctttgtgttttcctgcctctgtaccttcgttaatgatgttttcttacctgcagtgccctctcccttctctcaactctgaagtcggtggtacctaacgattctatttaaattct

SEQ ID NO: 128089 - DNA, 1052 bp, Homo sapiens
cagcagaagcctgggtgagctgtcgggggactgctaatagaagtggacgtagaactggcaagccaggcatgggggctcatgcctgtaatcccagcattttgggaggccaaggctggaggatcatttgaggtcaggagttcgagaccagcctggccaatgtggtgaaaccccgtctctattaaaaatacaaaagttagccaggcgtgatggtgcaagcctgtaaccccagctactcgagaggctgaggcaggagaatcacttgaatccgggaggtggaggttgcagtgagccgagattgtgccattgcactccagcctgggtgacagagcaagactccatctcaggaaaaaaaaaaaatggaggtagaactgaactctgaggatgtttaggatttgaataagagaaggagagagcatcgcagatgaagaaagcaacatgcacagaagtgtcgagtaaggagagtattgcggtgtgcacaaatgacagggaagggtcagacctaaaagaagaggatgttatgaactgaacacagaaaaacatgatggggtaagggagggcagctgtggggccttgggagcaattagaatttggattccgtgtgataggcaagttggttcttgaggaaagctgtgggatgatgaaagtgagtcaggcagcaggctgtaaattggattggacggagggaaagattagaggcagagaaactagccaagagactgtttcagttatcgggcccaggccaagggagtagtggcattgagaataaagaagaaaaagtgactgtgaggtaaatcccaaaaagaaggcagaaactcaagaaataaaggtaaacgtgataagcaaagatgactcttgagcatcctaattttggagatgaaaaaatcatggttctgctggaataagtggggtgagctggagaggagccccgttttgtgggggtggagggacatgatgacttcactttgaggcatccaattagagatacttaagtcaatgagaatatggtactagaacccagggagagattggggctgggaatgcatctgcctggt

SEQ ID NO: 128090 - DNA, 1222 bp, Homo sapiens
tgactgcttttctgagagtcttttacctactcccagaaagttatttactctgtgggacagttcattctgttgcatcttatctgagtacttaaagccccaaggaagaagatgatatttgccagtacataaactgacattttggcacctaatctttgactttaagaagaaccagaggacccttgatggttccagtgagccctgggtcttctgtgctttcgtggcgaaggcctctttcagaggacacaccacggcagcccctgctcctcaagtctcagaaggcctgaacccatggtagctggaaataatagcttgacattcctccctcattttaaactgtgattttttttttaaacactcttcttgaccttttctttgaaggaggaacaaaacagggaaaacattgctcttcagtacactagtgaattattttgacaatggcagtctcccgaaacaggctaccatgtcatccctacgcttttctcttgtgtgtctttgattgggtgtcattgccagtccttacagaaattggcttctggcccccaatagtcactgtctatcggcaggacctatcacataattgctatcttgaaagcaccatctgggcagctcagtgtttaaaaaaaaaaaaaaaaaaggcagacctccttattgacttgaaagagcttacagtctgcttgtaaacagaagacatgaaatgactgaagaatgttctcaaagctcaacatgaacaagtcacattacagacatttgaactgaactgaatgctgaaggaccttgaacaaatgagcatctgggtcagattagctaggcagatggcactgggtgcccaaatggagtgagcatgcatggaagaaaaagtgaaggcccaggcactcatttagaggggaggagtttggtaatataatgaggataaagaatgcttgtagatttctggttagtgagtagtagaataaaaattgtgactaagcaccatgggtggatggatggatggatggatggatggatggatggatggatggatggatgtggccaggaggctgaaggcagtgctctatccaggagagccaggtcagcgcatgcatagctagggcataagctaagaaaatggggaagacacagcaaattcctgatactttacataaaaggagtttgttgggttttattttaaaagtgttgaatgtgagataaaaaagaagaagggttgggatccctaatgtagatg

SEQ ID NO: 128091 - DNA, 1115 bp, Homo sapiens
ccaacccgcccggaaaaacaaacagccttgtaggacaacagccttttaggacttgaaccttctcaggcccgcctctcaaaacaatatgacttgaaaatgtttagtttttcttgtattgtctcacttgccaaacctccgaaagcaatttgagagtaatttcaaccacatcttttagcaggccttgtgaaaaataaatttaacaggttaattgtgtgccgttttgatttgtcttggcatctcaataagtaaaaggttaaaatcatggccacaaaaagtaaataaagcttgattattccagttgaaaattcatccatgggtactctagtgcctggctttcgtgttgacctcattgccatatgaccaccatcaatagctctttatatttaattaatttcctaaaaaaaccacactcacacatttgtaatgtttgtaatctttttattccatgataattgatgtagcctagcgtaattgtagtttttgtgtgtgtgtgaagtatctgacattctgtgctttagtacgttttatttcatcacttaatgtgtcccccccacccgcccactggctgtgacagtgtttttgcgaatgaaacagttcagtgagacctgggaatttcctgtggcatttatgtggtctcatgctcatctctatttgccagataccatccgtgtaagaaccatgctcaacagatacattttggagaaccagatgtctcattttgtcattcaccaatgagtcttgaaaggctgaattcaagaagacaactttttaagatctttctctctcagtctacaaaagaaaaaacgggcttattactgtcaccgctgcctttaattatgtacagtcacaatacaattatctccctatttgggtgttatctcccctgccagatcaccaatgcctcaaattgggagagcacggcttctgtttattgttcatcctttgaaatgacttaaaaggaagctgagtacacagttgaccccctagccaaggggattgatagtggtctcgggctggggagaggactctgtgattcttcccaaaaggtcactccctatccagaatgataagtcctcagtttttagaatgtagttgttaggtaaagggattaatcc

SEQ ID NO: 128092 - DNA, 1535 bp, Homo sapiens
agacacccgcaggagggcaaccagaagttcagcatgggtgagcccagggattcccttgccagggttagcaaactagggtccacaggccaaccacatccattcatgtacctgtggtctctggcaactcttgtgccacgtcagcagagatgagtagatgcagcagagaggagttgcggtgtatagatagcctggtaagccgaaaagacttagtatttgtttctttatggaaagtgtttgctgaactctgccatagaggcacagaacaaaaatgagcgcagttaccttagggggccccattgcaaagtgacgatgcatacttggttctcttttgatcaggagacgactgacctgattggagatatgtaaggtttaggaaagttgacatgagaatgattcagtggactggagcttttgggaaagggaccaagtatgagaaaaccaattaggagtatattacagccatctgttcaggcatcattgaagaaagagcatcattttgagtcttatctaagcgttggggttggcaagtattacctcctaggccagaaagccttgtccttctcccagtcccagttcatgtcactagattgggggtccacctcacagctccagaaacctcaggtcaaccccacccaatcggtcacatgctaacttcctctctggtgatctttgcacaaacatataactcacagcatggtgtctggttcttgctgacatcaactttgtaactgttttcagattattttttcttttctccacagtaactctcaggcttcttgaggtcagaaccatgcattcttgttttgctgccacctccccacctgcctgcccctcatgctgtgtcgagtccgcatgtgagaaataagatgagagtcactggcagcaaagtgagtgccgacatttaaatatggaagcaagtctggggccccagactccaagcgcctagtacctgtggccttgctcactgtttttcatatgctgtcctctggtcttgtttgtaaagtgacctgttgcacaacctgtcagtaccctgaaggtcagtgactgtgtccacacctctttgtgttctcggtggttagcataatatttttaacataacggactctttttaaatgtttggtgatgacacagtcactgagcaggatgtgctgtaagaagaaaacatactctccctcattctgtgaattagtcagaatatatcaggttaataacggtaagagcaagcttctgttggtctgatgcaccagcatctattggatcaagcaattaaacccatgtcagtcattttggtacaatagaactaaaattagacacagcataaatacaatcaagacgtgagcacgtttcccagcattagccttacgatgacaaaggcaaatgcagaagtgtgcgaacttccaggacaggtccggagatggctgttccagagaagagccagggtggatggcaggaagcggcagctgggatggaacctccagtccatatgtggcacctcttttacatcttcatcgtaagcgctaccaggagtttgaaat

SEQ ID NO: 128093 - DNA, 1683 bp, Homo sapiens
gcggtaccttgttacacattaacaggcagctaatgcagtctctgttcgcatttttatcctcgtgtgtggcacgcgtgttatatagttaagcatgaagcaggtcacgtccaggctccgaggtgagagccaggcccttccaggtaatgctaaatattgtacaaacagcaaggttttgttcatcaacccaggagtgaccttactgagtggcgtgttggtggtaaaaatgccttatatttaagagagaacacacattctcctttctctcccaccagaaagtctggttcttgctgctctgtcatttcccagaaaggaccagcctctcttgctccaccccacttcctgtctgtggccctgtgatgccagggggccctccactgtcctacagaggaggggacaaggggcaagaggggccagaagcatctctggaatgcacacagctcatgagcagctaggcttgctccagcagtcacatgtcctgactggagtcttccagcgccttctgtcccctctgttagaagaaaggggaacgcgggtccttaacacagtgcttttgggagattgccattgactcagagtctgagatttaccattaggcgcatttgaaacaataaacatgcatggagcacttactgtgtggcaggacatggtgcagggtgctgtggggaggagatgagtaaaacagtgttcctgctcttgaggagcagtcaagcacagtcattacggccccacccaccacagggacccagaggagggcacaggcacgcagcgggagggatgagggaaagcttcccgtaagaggtggtgtccacactgcacctgaagaaggtggaactgacatctctgtcctaggtgcctcaacagagcccttcattccaacccctcattgcacatgtatagttacaggtctggctacccctgctcatggatgagtttcttgaggctagagatgggttttacccagtgttcctggtgccaagcccaggtcttgactcactatgggctctcagtggatgtttgatgagtgagtgagtgagggcatgtggtggatgatgaggctggagaggtaacaggactgaatcataaggaccttgcctgtcgtgaatattgaacagcttggcaatagagggggttttccttctgaggagtggaagcaacgtggtctatggtatgtgccaagtgagggcagaagctggggcagtagccacattggcatctcaccatgagtcctctacatggcccagggtctgtaccagcatgacataagccgtgcacgagtaacaggagtgtcagccagatccgagggctccactgtgatgcctgccctggaaaagatagagcccactcaggccaggccatggtggtttgagcacctccagcaccaggggagatgctgtcctagaaccagggcccccagtcagtggacaaagaaatgtaggaagattccagctcagagaacatcagaccttctgctccctggagcagtggtggctgcatggacccagggcttggtgcatggaaagtccaggctccgcacgctgtgactctccttaaagtgagaatatttttcccaggagtgcaagggcctttcatgtgaggagttttaaatgtgctctctggtggtagccacagcatccttaattttcttgtacagcaaaagtcaatttggaattgcaggaaaggagg

SEQ ID NO: 128094 - DNA, 1145 bp, Homo sapiens
caggaatgggtctgagggctttctgggtgcagctcatttcccaagcgctttcccctggcatccctttaaacctgctgtgtcagctgtccctccccgcactcccccacccccgcccccaccgcttctcatggacctgcatagattgggccccaccttgaggctcccccagccccctgtgcacaccgaggtgcccggcaccctgcgtgagctctcactgtggatggtgagcaaggacatccacccagcgtctttccccctcacaggctgcctgaggcctttgtccctgtcctgtcagggaagctctgccgctctcctgttgattgactcaccacctgactccttcccagtcctctttttctcattttggagttagaagtctccagaccccagttagtcctggctcctcttcaagcaaagcgcaagccatagcttgggatttctgagccacacgattacatgtagggccagatatgacccttggaccaatgggaagctgtgtgtggcagagatgggcaggtttgtaataggaaagttccaggctgggctcatcaggtgagaaacatttctgcacacctcccccatagcagacccagtattcttcaccatcaacagacataaggtaactgagacaggaagatgttacctgtgaggaacttgcaatttagctaatacatataaatgatgttgtgtgaaagtaattctgggctgtttcacaagaaatatttattttcattccaaattggatagcaagccaattctttcttataagacagcatataacatacataacttcaaaatgacacacttggactgcctaaatcttaatcctgagaacttcaaggttccatttggtatgtgggcttcattgtgatgattgaattaggcagccctgttaacgccaacaaaatatgaccgcttttctctgattgcatttcctgacttctaagttttcccgatagcagttttccctaccagcagttcatttccccagctcttggggagcactctgtggggtccgtggctgcatttacaccccagccaaacgtggcactcatcgggcgtctccaggctgcacgaagattcaactttagctttggctcttggtccaccacttggcagttaggaaagttttcattttgagagtt

SEQ ID NO: 128095 - DNA, 1227 bp, Homo sapiens
tgctattgtgattaataaattggaaaatgtgacttgcctactgtgactttttggtattttgtattttctcaattgggagatagtaacaatgcaattactatcatgtgggatctaaccattcccccaccccaaattctacagatgacaatagaaacctacttcatgtcagggagccacggtcacccctctctgtacacaggaaaagaacctgtcctgctcccttagtaggattgctgtgaaagtctaggatgtgggaacatagtgcagggtatacagagctagctctatacctttgaccttggcattaagcaggctctcggggagggcctgacaccctctctgtagccagtgtgcatgagcttaatgcacagattttacatctatttttggtgctcaaaggcctttttgagttcacttccaggttctgggttatgttctaggtagttgttggtgccaaatgaaaatgagcttcaaatgttattaaatgtatgtatttctttaaaaaagaaaatactgtttcagatacttcagaattagaaactgcaccaggttggtcatttctttgagcactggcctatttaaaatttttagaaaaccaaaaagctgtccatctactgtctactgatatgcctgtaatgttatatcaaaaacctgttaccttaagttttattttttaatatatgaatgcgtagaaatcatctttttataaatatcctggttttggtggatttaataccttccctgaaaggagaaataagtataccacgtatatttctattccccaaaaactctggatttttttcataggccacggtttttaatgtattatttatttttgaggtattaatacaattttgtacttgacagagcaccatgatgtatacagtttcatttaatcatcagagcagctccgtttcatccccacttgcacaggtggaaactgagaatctgccctgtccctggacgcagagccaggaaggagtcaagccagctggtccccagccagctctctccacaccaggctcacctccttatcccagctggttttgctgctgtggggcagctcactgtgccagacttttcccacatggtttatgagggctcatgaggtgaagggtcaggctttcattttggtccagtgtttcacatagaaattgtgctccatgcagcagtgccaggtcagagtgtaagtgattccaagccacatattactcttgggtaggcagg

SEQ ID NO: 128096 - DNA, 1030 bp, Homo sapiens
aacgtacacatctcaccaaaaacacttattcccatctcgtctttccacctgtgtgaagtttatatttaaggcctgcagacagctgattcagcttcgaacagatcagttccctgaaatcagccaacatctgtcttgtcccattataccttcgcagaaaatgagaagcgacttccccagcataaagaaggggccaaatgcagcaagacctggctgagtcaccttgaggatagaaagacagcatcatccccggggcctcgtaacctccaacctgcttttctgtttttgaggctctgtggacatgctgctcacgttccttgtaactttgtcttcgtacgtaagagctgcatgaacaaagccttcctggagagagtaaggccaatcgtcagctgctcaacccgtgcctggcacatagtgagcactcaggaaatgttagctgctcttttttttttttttttttactaatcttttcatccttgttattatttgtattatcattactatcatctggcagacagagctggatttgaattccagatctgctactttacagctgtgtgactccaggcaggttcccaaacctttctgaggcttattgttcttttttcttaaaagagaaaacttcctcacacctgtaatcccagcactttgggaggccgaggcgggcggatcacgaggtcaggagatccagaccatcctggctaacatggtgaaacaccgtctctactaaaaataccaaaaaatcagctgggcgtgttggtgggtgcctgtagtcccagctactcaggaggctgaggcaggagaatggcatgaacccaggaggcggagcttgcagtgagccgagattgcgccactgcactccagcctgggcgacatagcgagactccgtctcaaaaaaaaaaaagggggaaactactagcagttggtagtagttttcccttttaagagaagatgaggttggtagggactgaatgagatagccgcatgcgtgtaactcgccctctgccatgcctggcacacagcagctctgtca

SEQ ID NO: 128097 - DNA, 1040 bp, Homo sapiens
accagaatgtgcttctgggtggaagagattcactttttcaaccttgttttcaagtgggaggaatatattctgtatggcccaagccacagatgagaactgaaggggatctgttgagtttacttgtaccaaggtgactccgatacttacttttcgttttcctttccttgtaggtatggcctcacatgtgcaagttttctcccctcacacccttcaatcaagtgccttctgtagtgtgaagaaactgaaaatagagccgagttccaactgggacatgactgggtacggctcccacagcaaagtgtatagccagagcaagaacatccccctgtcgcagccagccaccacaaccgtcagcacctccttgccggtcccaaacccaagcctaccttacgagcagaccatcgtcttcccaggaagcaccgggcacatcgtggtcacctcagcaagcagcacttctgtcaccgggcaagtcctcggcggaccacacaacctaatgcgtcgaagcactgtgagcctccttgatacctaccaaaaatgtggactcaagcgtaagagcgaggagatcgagaacacaagcagcgtgcagatcatcgaggagcatccacccatgattcagaataatgcaagcggggccactgtcgccactgccaccacgtctactgccacctccaaaaacagcggctccaacagcgagggcgactatcagctggtgcagcatgaggtgctgtgctccatgaccaacacctacgaggtcttagagttcttgggccgagggacgtttgggcaagtggtcaagtgctggaaacggggcaccaatgagatcgtagccatcaagatcctgaagaaccacccatcctatgcccgacaaggtcagattgaagtgagcatcctggcccggttgagcacggagagtgccgatgactataacttcgtccgggcctacgaatgcttccagcacaagaaccacacgtgcttggtcttcgagatgttggagcagaacctctatgactttctgaagcaaaacaagtttagccccttgc

SEQ ID NO: 128098 - DNA, 1053 bp, Homo sapiens
ggactatgggtgtgcaccaccacacctggctaattttttttgttttttgtagagacaggatttcaccatgttgcccaggttggtcttgaacttctgggctcaagcagtccacccatcgcggcctcccaaagcattggaattacaggtgtgagccactgaacctggctccaattctcttttataccaaagtgactacagttgctcctcagtagattgagagatacattcctatatggcctttttcagaagcgttgtaacatcaactcatgcagagcttaatttaaagtagatagtatgcttttacttgtttccagctatgatattagactaattgaaatgaacttataggtcctttaaggtaagatatagagaaagcacaaagtgaaatgtcttatctccaagaagggaaaaccgaagagacttcttttggaatatggtaattatttaacctgagaaaattatactttagtaaaatgcttttggtttccttaaaactattgttatgggttgaattgtgtttcccccctgccaaattcatatcttaaattcctaaccttccatatctcagaatgtgactttatttggaggtagggactttatagaaggaatcaggttaaagtgaggtcatcagggtgggccctaacccaatacaactgatgtccttattaaaagggaaatttggacacagatacacacagagggaagatgatgtgaagagacacacagagaagacagtcatcagtgagccaaggagggaggcctagaacagacccttcccttccagccctcagaaggaaccagccctgctgacaccttggtcttggactccagcttcttgaactgtgagacagcgtctgctgtttaggctgcccagtcagtggtgctttggtaccccaaccctggcagattcatatgctatgtttagaaagtggtgttttgtgtttttctaaataaggttcttaacccagccaggcacagtggctcacacctgtaatcccagcaccttgagagtgtgaggcaggaggatcgcttgagcccaggagttcgagacca

SEQ ID NO: 128099 - DNA, 1060 bp, Homo sapiens
caggctgtacaagaagcatgatgctagcatctgctcagtttctggggaggcctcaggaaacttacagtcatggtggaaggtgaaggaggagccagcctttcacatggccagagcaggagcaagagagagtgaggggggaggtgccacacacttttaagccaccagatctcacaagaaaactcactcccgttgcaaggacagtaccaagatgaatggtgctaaaccattcttgagaaaccacccgcatgatccagtcacctcccaccaggccccacctccaacactggggattacaatttaagatttgggtggggacactgatccaaaccatatcagggactcactattttatacacacacacacacacacacacacatatatatataatatgttatatatattatatgttatataatgtcatatataatatatgttatatatagttatatatatatatgttcatttactcctcacaaggaccctatgaaatatgattactgtctccactttagagatgaggggattgaggcagaaaggggttaagtaacttgctgagatcacagagctagaaagggcagcactggcatctgacctagttgttgagaatgcagaaacaatctgaaaattagctcttggaatacagacccctatgaagatagggatggcctacatcaccaaatgccatcctgtctgttttaaagcaagacataggagagctatcagacatcttagatgtacgtggggaaggcgccccgctacaagaaccagtattatctgagtgggcacctcctcccagcactgggtgtaagtggctccgtgccatggagttgttgggtaataacgccaggactggcttgatgacagtgactcacagtagaaaaatgtccttgcaacagaccaaagaacccactttaatttgcacagcttagaatgggccactggttgccctgccaagggatccctgtaccagctgattttcatatccacaaacacacacacaaaagcacctatttaaatattgcaaataataccacattgcatttttattatgctttatag

SEQ ID NO: 128100 - DNA, 1053 bp, Homo sapiens
cagtggtcacctgccactcttggggtggtgcttggacatcgtaggtgctcagcagatattcctggatgctgctcactctgtcctctacagtcctcagcctagcagatttggaaatttgactccataaatttaaggattattgggttctaaaagactggttcatactaactaattctataaaaggctgatggatcaatctgaatcatttaaagagagataatcctagcatccagagaagctaggcctacatatcaaggtattttctccttggtcagaaggtcctctctggaatcccagtaagagatgagaaagttgcttatttagcacagaatttaagcaaaaggcttaagtcgtcatgtacttctaaatgtatttataaatcatgaaaacattctctgctcatgggatacttctcttaaagaacctgcatgggatatctagaatcaaatattcccttcccccctcgacagtgaaaaacctatgacttacttctagacttcactaagattagtgtcaattatctttgtaacatcatctctctttatttaggtatgacatatcatagttataccaagttggtagatattctcattaattacattttacgtcattttggagtcacaaatcatacggcttgtcaaatcctggttttgtaatttttgagggttccttcatttaggatctgcagatctctatttataaattagtacagcataacactcctatgagggaaatgataaatgtgtgtgccttgattctagaaatcacaatctaaaacaccatacaagttaggagtccacagtagtgtgtatttggccattaatgaatcagtggtcccctgggtgtgtgagccatgctatttttaaaaccattgctgacttcagtgataaagagagtacagaatgtgccttcccaggcttgtgagcttaccatgaataatacccatggttatcatgatgtcagaacttaaatattctttaccaagagcacaaccgtggcgtcatggagcatgggaatgcatttagggggcagggtgtggaaagtccatttttc

SEQ ID NO: 128101 - DNA, 1032 bp, Homo sapiens
tgaactttatggtatgtgagttgttatgtccataaagctgttactttaaaaattgccctgctggggatggtggcatatacctgtggtcccagcaaatagagaggctaaggcaaggaggatcatttgatcccaggagtttgagcctggacaacatagtgaaaccctgtttcaaaaacaaaacttgcccgaaacttacctttgtagccaagtccttcatggacaggctagaggtcagatggaaagaagtcagaaaatttatcttgggcgagggcatttattctgccactgtgggagaagcactgtgccatgggtgtggaggagcagtgttcagagaggagtgtcctgtggcctccacaatattcattcaaaatttgccaatgtcttggacatcctgggttccattccctgcccggaaatgagttcctctttttgcctggtagatttcagtgattaataaataaatgttcatccttatacatttaaaaacattttatttggaaatagtttccaagttactaaaaaattgcaaaaataaaaatagtacaaagactacccctatacccagattcccctcccctataccccatatccagattttcctgttatcacttcaccccatttgttttgtcatgcccttgaatgtgctgtctctcactgttgctcttttggttgttgtgtgtgtgcctgtggtgtgtttgtatatacagacacacgaatgatcgttatatgactcgagggtaagttacaaatatcatggtgctttattccggcaccatccagaatggtagctactagccacaagtagctatttaaattaaaactaaacaaaactttacattcagttcctcagtcacaccagccacattttcaagggctgcatagacacatgtgtggctgcatcagacaatagagactacagaacctcttcagcagcacacagagctcctctggacagctccgcgttacccccgatgcttcagcgtgtgtttcccaagaatagggcgctctcatacatggtacagagatcaactg

SEQ ID NO: 128102 - DNA, 1065 bp, Homo sapiens
cgctttatttgatttaacccagcatttcttaaactgttttgacctcatttttttcttcttttttcataataaatattagcacctcacaggacactcagcccagtttggtaagcatggcctccttcatggaagaagaaatctgtgttcagaaatattaagtgacttgctcaaaatcaacacaaagccagacttgaagccaaattttctaactcccactccattgttctttctacaatttataaccatgtcgtggctgagtaagggtttatgacttttaaagatgttgtcatttacattcctaatggaaaatgtaaaggcattagggtcatactgacatgtgtttgaattcaggtcctctgattttacgagctcatgaccttgggggagcgaatcctgccagtctctctggatctctttcttctgtaaggtgaggatgataataatgacctcccagggttgccgtgaggcttagatgagagagtgtatgtaaagatcaagttcacgttcttatctttgttttctctgacatttttcatcataccaggttctgtgccacttatctatgatttcaaaagacgaaccatattacaaacaacaaaacgtgaatggtggtgatcatactgagtatttattgaatagtgactgagaaaatgaatgcacaggagacaggaggagttacctgtgaaaattcagagctatactgaactgatcaacgttcacggaattggagaaataacaaaggtgggacaggctagagtgtggagattaatgggggctgagggaacaggctgtgcactggtaggacatattcaggatctcaagctacctgcctgccacttctgcatccccaccgcgtcaaactgtggttgagctttctttattaaatatgtagcagtttgcttttgaaatacaatatcttcaaaaacaaaaataatgccaggcctgccaacaaagtttgtcccgagggggcaaaggtgaaggacaagtgaaatgttgcaagaggacaggacgatacgaaggatggggtccagagtgaaagaagaggcctatgaggctcagcacagt

SEQ ID NO: 128103 - DNA, 1180 bp, Homo sapiens
gctgtcttttccaagcactcttaaactcattgcaggcaagattaaaccaagcaacaaaagacatcaagcgatgcagggtaatacgtgatgagcactgttaggcccaaagagaaaaccctgaggtccccagtgacaagggatgcatcatttgatctggggtttgaaggatggtcttgatttggaaaggtggctagggagcaagctcgaggttgccccacacaggggtgcacaaggcccggctgggggacagtgggtgtctcacttgggctgactggaacaagttccaggtcacaggtttttttatttgaatgtaattatttgactgtagtagccatcagcagatggagagttcagagggactgcactgaaataatgaataatttgcagatgcagttggtagccctggtgtcttggtgtgcctttctgttccagcaggatgcgtgcaaagagtggctcacagccccatctgctctgctcctcctggctcgagctttgctttaataacctctctgtcacctatttacacgaggtcatccagctcctctttttctccttttctgtgttgaaataatcgtggctgctacttgctgtgaaagacttaactagtagtgggtaggattgacctctcaattcagtaaacatttactgagtccccaggacaatgcttgcagtgagcatgcagaggaggaggtgattccagccggcaagtggaggcagagctcgagccagcaggcctggccactgcctggaagttggggggtgaggggggtgtggaaggtgagccagggtgcttagcctcagccactggggaatgcgaatgatagtcctgggggaaagagaaaacaagaggaggaacagatttgtgggatggagaacagtggggtaatgagctccatttgggacattttaagtttgagacaggacattccctggagacattaagcaggcaataaaaagacccccaacttagagtcctcgaggccctgcggttgcagtgtgaaataatccggcttcagcttccttccctttccttctcaagtggttccccatggagtcactttagactcggggggaggatagttgcttcctcagtctccctagcctttatcctcacacttgaatgctaaatccagaactcctcattcctgctaagtagttcaaaagctccaagggatccttg

SEQ ID NO: 128104 - DNA, 1056 bp, Homo sapiens
gctcatttctgcctcgtttgtcacctagattctctttacgatgacatctaatgtgcagaagtccagcccgtagcagcagcatttgactaatgtgggaagttcaggaattttgagcctggaaagtcctgggaaggaaaatccctcatgcttcagcagggctgtgtggccggttctccatgtgcttcagcagagttttctttctctttttcttttttttttttttttcagctgtgaaaaaagcagtgccagctgtttggtaaaatatgggtcagtgagaaataggatttgctttatagaagttaactttggagaatcgtgtcctcaaaaagaaaagaagtctaaagataggaggactgagggaatcctgggtgtggtgatcctaaccccataagttagcttggggtgctttcaggaagattttggtttccagcagttcagaagggaggtgggcatgatttggtgcagaagggggagaggtgagggagaaaatcacatgcagacacgttgagtagtgataaaccacgagacagactctgcacggccggacagagggcatcttattagagtggaaaagaatagtattttattttgctgtgaacaagatagtttggggagtggagaagagctcccagggtgggcgatgacaggtgtctgggggacactggagccagtggatgcagcaaacagcttggacttcagtcccttttctagcaaaggagctgcccctgtggggtggggggctgaggaggttggagaccatttgaaatagcttctgagcatgtgtgtgcacacaggcacatgcatggctggtgtctcttagagaaaaggtatttagagaaaagcaaggttgtgagtggcctgagagcagttacaattgattttgaatatggaagcaattctacctaatccagagaatatacaaagtatactttggaaaggggcagtaaacttttctggttggcctgccttcctccctccttttcttcttccctttctctcttcttcccttcctcccatccttccttccttctgtgatctttgtgggagagcaagagc

SEQ ID NO: 128105 - DNA, 1007 bp, Homo sapiens
ttgcttcaaaaactgaagcaacaaaggcaacttgaaatgtttcctgtttatatggctggtggttgcatttctgcatcctctgctctccttttcctcctcaaccttggtctcatacatatgattgcttcctaaagcaaagctgatgaaactgacccatttcctgttgcttgccaaagtagttcagtaaccagtatgttccttctgctggtgaaacctgacagagaacctggtaattctgacagctgttatgttttgtgggtttcagccactgacttccatggcctctcctaccatccttctttgatggcgtctctgctctctgcttccacctatttattttttcccacttgtctacccacagagccaggctcccttacctacctgtttattctttgactgtgtgttccttgagcgtgtatttgccttgttttacttgtaggtgtgaaggtctaagtggatgtacacacagaaccttctttggggtgtatttgtgtaagggactgtctggaagaagtggttcttcaacctttttgcccttcagttctctggagggcttgttacaacagattgctgggtttcacccccagagtctctaattcagtaggtctgtggtaggcttgagcatttgcatttccagttgaggaccattgttttggaagagtacattcagaacaaaaagtcagaaatatttagaatcagatggtggttgttttggtgaaagcttttcttggatgtgagagagtcagggacctggccttagcattcttcgcaattctactgccttttgtggctgtgacttccagaagccataggcacatgcagatccagcctccgacttcctctcctctcacctgccttcacatcttctcagggaaggtcacaaagtgcaggagccactttctcttgttcattcagagccagctggtctgtgtagttcatccagtttggtcttggggccccagaataaaatgggccaaatatcatcctcacaatagtaatacactatt

SEQ ID NO: 128106 - DNA, 1041 bp, Homo sapiens
aaatggttaagtttctggtagagagggaaattaatttatgtagatcaattttgtggatagcttctttccaaggatgtcggataaatgaggtattcctatagaaagagacaacagcaataggcaaagctctggtgttggcttaacaaggtgaataagcagagtgcataatggaattcatttgcaaagtaatttttgcttggctggagtggtaagcacaaaatagactagcagatgagaatggtaagtgtttgggatcagttgttaaaaggtttaaaaggggttctaattcaagtgacattttgtggtgtggagaaggggaccgatattatcagaatgatacttgaacaaggtaatttttactggcctgggtataatagaaggaaccagacagccaggggtgggccatgctggtaggccttgtggtgcggtggaaggcactgcggccgtggagatggaggtgggccatgctgggaggccttgtggtgcggtggaaggcactgcggccgtggagttggggcagggctgctgttggggtggtgcaggagaacacgcatcgagcacttgtcggcttgcctggtccagaggttcaataaatgttggtttctttttgctttcctccccacaccttatggcagtgatctaggatcaggaaaacttgctgggattggcaataccatgatgttctgtttttctaaagaatctctttttgtaggctcactcgcatttcacagaatctgactgggtcatagtataaccctggtggggtcttcatgcgttattattcagtctttgacacatgagaatctgaggccagagcaatgaagaggctgttccaatgttatgtgtgctgggggagcagagctagggctcttcctctcccttcccctgtagcagtgtgcacagaagccccagaacactccagaatgccgagtggagctttgctaggctgcactgccaggtggggctccaggtatagtggttcctaccaggctgtcagagccacttcctttttccccagaggcatacggaagctcctgagtt

SEQ ID NO: 128107 - DNA, 1042 bp, Homo sapiens
acttgaaagaagagcaagcacacagaagaatcttgatgattcagagcagtgtcaggtcatcctcatttagaagggaccgtttgtcaaattcgttatagattctgagtcagctaaagccatacctgttttactaggttctccaaggtgagtgagctaggtgtttatgagagtggttacaagtcagactttcagagggtagtcctccctctctttggtttaaagccaatggaaaaggcaaaagatgtaatgaacgacatcactgcaggttgtgttttttctgacagatatctttgcccttagaaagcaagctagtaaaatcattgccaaaaaagaaaaggcagaaaacctttgaaactccaaaatatctttgtggttttatagctacttatttctgaatacagcattgaacaaatttgtaatgtttttgacagtagtctgttttaacaattcttgcctaagtacttttgccttagtaggttctgatcaattaaatgccactgtgtttaagcagaattaagattgatcaattcttctgcatgtgttaatgctgtcgactctataaaaacctttgtcacaaaaagaatgcagcctaatatgtgagtggacaagggtatttttcctccaggtggttctgtccatccgcagtgagagatcaccatagaaccttccatgacattgactacgaaagcacttctggcttcacacagtcacagatttgcatcttgaagaacaaagggtttgtttgtgtatttttaccattttccttcacactaatatttccctgttgattcaacctatggaatcgttattcccaagtaaaatcattcgtccaagggcttatgataagaagccagctctatacaatatagaacttatagtttcatagcattaaggaagcaaattttaatggtgtttgtgcctggatttctgttaaaagtcacagggttataatgccgaggttgtgagtattaaattaaaaaattttaaaaagtcacagggcagggagatttggaaaactccagcttattgccgattgtggaaa

SEQ ID NO: 128108 - DNA, 2429 bp, Homo sapiens
attaatggagcgttctgaaccgccagagatttagacagaaatgctgtttttgaaacaaggggtatttgataataccaattaatgggtggcaaagagaatcagtcttccagggcttgcttgaaggataggtttataaatagcatgttagtttttggtggtttggaactgaacttcttataaaaaggtttattttctttagaaggttaaacatttgccttgtgattgtatttcctccatcaacttgctttgcgaggctttttcaatatctagtgcaaaggccaaccaccaaggtctctattatgggttctgaatgagaggagcctaaattccaagttatttatgttttcctctccctgagatatgctgtgttgattactattggcttatgtaaaggaacacttcacagacttccaaaaactgtctgctgcaattcatcatcagatggacctgaagatgcctatctaccaagctgtctaccaagaaatgagattctgaatcatcttgggttagcagagtttgatgacacatgccctaaaatatctgttcctgtgtttaggttttatattttaaaaatgagtaagtataaatgttgcttttcttctcgccacatttgagtagtgagtaaggtgccttaattttatccttgatttcagacaatgtgctatgatacttgaatcagagaaacctgagtttgaatctagtgatacgactttgggctttattggactgtgcaggaactccattagaaactagtgcacgtaaagtccctggctgtagtaggcatcttctcagagtgtgttaaatccctctatcttctgagatgcttacagacatgatgactccagggaaagaataacccacaaatagtttcgaaaaccaataatagcaacatttcaattattaatctcctgcgattccctttccagtttgggcaccagcaacaataaaccccctatagccatagaagaaagaaccttctttttactccctctgtgacctttccagattctttatttgcattgagcttctgctggtttcaggtagagaatttctcttctatagtggcactttctgtgctacttgaaaaatgtggaaataaactgctggggcagagtttcaggggctgcagctgtgcctcttggaaagtatccccaagtatgaaagataacctttgccgttaaccaagatccattcctaaacaaggcagcaggctgggcaagggagcacccagaggtggttcaccaagagcctcctccaaggggaggctcctcgcccaccacaagccagggtctgcctcaccatgcattaaacatcattttcctacaaaagacaatttggtgctttctgtaagttacaggggctcagattctttgtattttatgttttatatttcttcatctctctctctctcccttcctcccatagagaccagtcttggggaaccacctttgaggtttgtgtggagcaaagtagtgatgatcaagagggtgtgatatgtgagcatttcttattgttctctgaacgtgtaattcgcctgtgctttctggtagtcttattgatgacaattcaaggactttgggttggtgtcaaagacgggcttcagaataatggcagtagactttatataaccaccgatgggatgtgaacttgaaaggcccaaactcgcaagagttccatttcatatagctattctcttttgggggaaaaaagaaaagaaaaacctacagtataggcagatctttatttttcctataaaagaaacccagatgcttgagggtcacggtgatcactgtgacttaggccatattgactttgtgctgtgcaccgccctgcgcccttcacccacatgaactcaaatgttccacctcttgacagacgagggcccatctttaacgcattcattcagcaaacatttatgcaggacctgctgtgtgtcaggccctgtggcaggttctgggtttgtcgaaatgacaaaatcttaatccctgtccctgactttacagggtgggggaagtgaaagaagcatagactcactagaccatgggtctgattcaagatggaattttttcttctcctttttttttttagtggcagttcatacttctaacatgcctatgctttcttcagctagaatgggaagacttgggtaggcacagtggctcacacctgtaatcccagcactttggaaggctgaggcgggtggatcaggagttcgagaccaacctggctaacatggcgaaaccccatctctactaaaaatacaaaaaaaaaaaaaaatagctgggcgtggtggtggtgcctgtaatcccagctacttgggaggctgaggcaggagaattgcttgaacccaggaggcggaggttgcagtcagctgagattgtgccattgcactccagcctgggcaatggagcgagagtctttctcaataa

SEQ ID NO: 128109 - DNA, 1048 bp, Homo sapiens
tccgacccctccatctttgtgatctttgagaaacaccaggtctacccagagtatgtcatccagtacaccacctcctccaagccctcggtcacaccctccatcctgctggccttgggctccctgttcagcagccgacagtgagcgcacaggagtgttccaggcctttcacctgctctgccttgaaatggctatttgggcctttccttttctttttaaacagaaacttttaatgaactgttctcttaacattgacctctcaatgaagttatgttcttaatctcttgctaataatgatttttacttttaagtcacttttgggttcactagtggattaaccagaagtgattgtagttgagtccagttttgctttttaataatgtgttgaagttttagtttttactctttgttgactttgctgcttattggcaccagggacagagtttctagatacaattttatggattggttttaatttttatgagtttgtctctgcagtgattcggtttctcagagtctcatggcatcatagtttttccagaatgacacagtagccaccggtggatgacagcccacgggcggcacagtcacttctgcctgttgctctgacaccaacccaggcagctctgctgtggcttctcctgggctctggcattagttggtctgtgtcacattgtcagaacaggtggctgctgtgtggtgccatcgagtccctgctggttccccttgtcctgggagggtcacccattgcccaaggaagtgcatccacctggcaggtgacctggaggagtagcttccccgaggacccccaggcttggcctgtgattgcgcaaacccacatttcctaagcacactggacacccttcgagtgtgggttttaacatccctgtgagattgaatacttgtgccacacatgtcacaaaagagtatggaaataaaagaaaatttatccgaagtggatgaagactgaagctcatttttctgcgtctattgattgagcacctactgagtgccaggcgtttttctgagagtcagggattgcctttgttca

SEQ ID NO: 128110 - DNA, 1049 bp, Homo sapiens
ggagtcctggatctggcaagcagccatgtggcgtcaggctgccagcctgtcactaaaaagtagaggatccacctgtgtaggagcactttcaccccaaacacgatagggctttgtgagcttgcgttgcccacttttgtgcagagaactgaatgaatcctctttaactctcttttataccccatatcagaagctgacatatctttgtggtgtttctttgcagaaagaaaagacagttcaggttctgtgtccccaaacactcttagccaggaggagggtgatcagatctgtttgtaccatatccggaaaagttgtagctttcaaggtaagttggaagaggctccttcattccacttgtgggaggggtaactgcttgtcattcccagagctgtgctctgaagtcaccccctaccaaacctctaccccatccggagaggatcagggcttggcactttggccaaaccaattctgaaggtattttgttggggagttgaagatggtagcaattctttgagttttcagaaattaaatgtggatcatttttgggaacataactggttcatgcaccaaatgagtgtcaagtattgagccttggtcagcttagcatgaggtcacagacctgcacaggacagggaactgctcagcctggtgggaacaaagataagggtgatgataggctgagagctcccttagaaactggaaaggacctcactgcgaaggaaacacttgtgttagctcttggaggatgagtagttgtttaaattggggttttttttctgtattgatccagtgaacaatccagtgatctcttttttatcagaagcagcaattctggtgtgcatgtgcctgtctgtattttcactaaacctttgttttcttcttaaatgctgtcctgggctttgactgaagaaaggtttgttctcaaatttggtgactccccttgacaaccaccaaacttcttgtttcattttcagtttttaaaaattacccaagcaattaatgaatactttcactctgtaaaacagttcagtaatacagagtgaagcatgaag

SEQ ID NO: 128111 - DNA, 1611 bp, Homo sapiens
ttccttacctagaactatttcttccttttaagattcataagtaaccttttatttttacagagctacgtataacttccacattacagtcagggacctgaggtgtaacttactaagtgaaccccaaggttattttatcttgcaaaagaaacctaaaccaaactaagggccttacagtttatggttagactgaatcaaaagctataacctcaatttttccaaaaacagcttctgactgcaaaagcaagtcatacagttgttaggtatgaaatagcactgatcaggaaatgcatcttcgcagatggtatttccttcagaaaagacttttctacttttaatataaattaagccataacagtttcatgctgtggaaagagggtgaaaaggttcattttaagagattatataatatgaactttcacatttactgtgaaatgtctaactttgccagtgcttcagcaagtttttttggggggtgatggggaggggtagtattggttttagaggtttcaaatctgtgaactttggagaggggacagttgttggctctggtatttactagttttgtagtaacgttttgctagcctgactgacttttcttactggtttttatgcccacggtccgaggggactgttcttcttgttgggggtgtctgcggaatagcgtctcgtcttgtttgtataggcagtcaatgtgtgtgacatgtgtgtcctttcagtccggaagcccactgtgtgacaatggcgtggggtgtggctgggaggtggggtgctgaagcttgaagagcatttctttgctgattcataacagtatttcccatcttttgcctgcaggcagggaaagtgtacagtatttattttgtttctgttttactttaaatttgtaagtctttaagtagcttacattgattattataggggaggacaagtgacttgtttaaagttgtatttagtattctttccaatttctgtattttaaaatattgaaattaaaattgtattacttctgttttgatttttttagcacttagtgtattttttgctcattttgtttgaaagtataaatgttgaaaattgtataaaatgcgtccttgaaagaaaaagaatctgaattctatatccaattctgactttgttccctttttctgctgattgaatcatgggaaattatttaaaagtatgaaaaactgggttcagcgtctgctccttactacttctgaagacttcaatgtgaaaagtaattgtcttattttattagcagtattgctggggatgagtgattgctcaaagagagggaagaatacaaaagtgtaattggcaacatgaggctgaaacgtagaaacggatgtgggtacttggctaatgaacatttcagcacactcacagcccctgcccaggcatcccacaaatatttcctaacacctgcagtacagtaggcactgttttagcactagtgctgcaggagtgagcaaaaccaagtcccaggcctcaaggagcttgtgtgagacacaaaaggcaagtgagagccaggggtgtggtggcctggctggctggtgaaggtgagagtgttaagtgcacactccgtgaggaagatgagctcagttttggactcag

SEQ ID NO: 128112 - DNA, 1619 bp, Homo sapiens
gcagttgtggtctctgcccttgaaggtatcttctccaggaaattagcagtattattttcacttctaagcaaacatgagcaaaagaggacctgttcattaaaaaacatgctgacttttttagtttcaactgagatatgccactgtagaagtgaaagtaatttcacaattaaagaaatgcttcaacttggtaattaatatggtcatacagggacttggtgtagcatgcaaggaagcagaagacctgggcttttgtcgaagttctgccatttaggtatcagctgtgtaaccttgaataagtcacttaactctttctcttagttttctcatttgtaaatttggattaaagtgtttattatgataatcaattaagaaaatctcttaacacttcatacatacagagaacttatcattaagttaaaactggcaattaatgcacctttatatatatttttaaatgaaaactaatactattcatgatgtttattttatatcaaatatatgcccagggcatgctactttaaaaatccgaggaatctccaacaaggtgctggattaaaatcagatttcgtgcttgaagtggaagaaaaatgaagttgtttatggataagagagtgagaatgtgtatcctcaagtacgttaagatgatttaactgaaagatggctttaggtttttcttgaagaattaggaaagtaccatccccacagattcagcatactcttcaggtactagataaaggtgaaggaagtcatggaattaaaatgacttagcaactccccagggaacttgtggggagaatgaggtggttagaaaggtgagaatgcacaaagacagctctgggttgggtaccaacagtttgcttggtagaaagaaaccagtgtaggaaaggagacgccaccagacatcttcaacagacaagattctttctgcctttttcaaaagatgctctctgcagcagtaagactatagatagagttgattggaatatcatgtgacccagtatgctactgctaggcataattatcaaaaattcatttttctcattaaatattgttaattgctcgccacataaagagaagctagagctcaccagtcttggtggtgtcctagaccttcctctaaagcagtcttgggaagctggatcatcagatctttagcctagacagagtgtcgctggtaaataaaggagacacaggtaacccagagtggacagtgatttgcgtggggagacacagtggatctggggcctctgatactttgcttcctaaaacagcccccagttttcggcttgccctatgagatgatgttcatgtgcttccttgaaaccaggtggaaagaaaggggaagaattaattttctcattctgttgctgttgaacgtaatgtaatcttaatactgtagccttcctagaagcccttccctctttttcatgctgtaaagtcaaatatttgatatccttaacataaattttaaaaattaaggtcattaggaagcaaatgtctatttccaaagcaatgagcttgttgtgactgtgattttattcttctatagtatttttttcctcattttaactgagaggagaaaataatactcttttgcaatatccttaggttctcccctt

SEQ ID NO: 128113 - DNA, 1932 bp, Homo sapiens
caacgtcttgggaagatccttaagttgaacagaaatggccatgcacgtttctttgtgtgacagagctgctgttgcagccattcttccctttggagaccagtctaggggtgcaggagcctggagcttccgctgtccccctgcctggagcagtttgtgtgtatagtaagaacactgcccgaagaacagaatgaacctgatgctgcattttcactgtgccacacccactcagcaataaccattttggacctggtgggggagaggaagaaggagggtagaaccttaaaaagagaccttgaactggaaagggtctcttgtcagggcttgaattttattttgttgttggtagtgtcttgatgtattttcagtggtagggtaaagaattatcaataatttatttaacagatttttttttaaagttaacagcttttaaattctttttttaaagctatttatttggaagatttctggagaaatatctcactaatttagatgtaagaatgtgaaggtttttaaattatttttgatagtgtgtgtgttacatgtggggaagggccacagtaacagtaactagtctggactcttaaatttgatattcaggttaaagtcttaaacagggatttgatgcattaattattttaaattaagatgtatatgaaaatcattttattttatatatttcatgtgttttttataagctattagcttcgcttttgctaacatccaaggtgcatactgttatccaggttgattaccttatatcccaccttccctctgcactccccatcattttgtgatgacccagtaagactcttctctttgcagggaaacactttcgtagccaatgtgtaagaactccatgaaagatccctcatttctcatttcgtttgacattgtgattttcttctcaacattaaaaaaaataggcttttgcattttcatttctgctgatgatatctgggtcccaaagagagcagctttaatatatttttcctacttgtgggaaaagtattataagtttggttaaattgtcatgtttatagtttttccaagtacatttgtaactacagcaggccttcttcgtactgctgctgttggacaacaggactggcacctgctgcagaggttataccttatgatacttttatgctccatacctgatttgttgggaaatgttatttaggatattcaaatctgcatcataagccgtaatataataggattaatactacattaagttgtatagaagcaagcatgttggaatagatcttttgtgtgtatttactttttttatttcttaattttctaaagaattacttaagatatggatttggagtaaaatgggtgcttttggcagtttcttccatctatcctaacctgaccagtacatattgaggttaagtatctggttaaactttaaggtattcatttatctcctttatgtatgatttttactaaatgccagttttcatttgcttatagtagcttctattttcccttttttccatccatggcataaaaataagtgatttctgggggtggggcagaaatgttcccaagtctgacaatagagcattttacaaattcctacaaagaaaatataggcaaatagataaaatttatttttatggagaagaaatatggccatattatggatttgtcttttttttactcagcaagatagcaggacttacccttctctattaagtatcacttgaattgctaagaagaaaaaagtctgtaccatcatctttcatggttgcattcaaatgtatattttcaaagagaaatacttcttgtgtccccattccaaaatgtcatgggataaatatgaaatagtttatgaagtagcctttctggttcagagtgactggaccaaagtctgaatcttatctgggtatcaggaaaaagaatttttatggaaatccttagtgt

SEQ ID NO: 128114 - DNA, 1050 bp, Homo sapiens
atctaaggatttcctagcaaaaaaatacagtggagatgaacctgatagaagatagactctagaaaagaacatgacacatgagaggtccaagggagctgtgacttgccagggaagtgggagatcgatccattcccccagctcagggtccctgcgttggcatgtgctcactgagctgagtagcaagtagggcgtggtgcctgtttacgttgttttctctcactctctctttcgccttcttaacttaacgatgcaacttaaagacccgagtccttcagagctactgagacgacatcatgcaggagtggtcatccgtggctaatagatgttaagaaaatcagaattcagtagtttgtttcttctctcacttgactttgccaatgcatagagagcttaaatacctcatttaaaccctaaaaattcagcctcatgtccttcctcctccttcaggatctaagtagaagccagaaatgcatcagaaaggaaggttcatcagaaattagtcagagggtacaaagtaggaattatgtggacagcagcggctcaagccttcagaatggaaagtatatgcagaattcaaacctgacttcgggggcgtgccagataagtaatggcagtctaagcccagaaaggccagttggtgaaacttccttctcggtgccccttcaccccaccaagagaccggcatcaaatccaccacctatcagcaaccaggcaacaaaaggtaactttcacacatgtatagagaaagtatatttctgactgtatgtgatggtcatcatggcagttgaggtgtagtctctgcactcaagttgttcaacatctcatgcatagtagacagcatagtgatggcagtatacacaggctactacaggaacaaagaaaaaggatacccaagtcagctctgaggagcgagagacagatcctaaaatcagatgttcaggggttagccaggctgaattggggaaagtgacagaatagacagctttgaaggcagaggattgagcctgaggcagggcacaaaggggagaagcaggatatggggtatttgtg

SEQ ID NO: 128115 - DNA, 1027 bp, Homo sapiens
ccagcctgaccaacatggagaaaccccatctctagtaaaaatacaaaaattagccgggcgtggtggcgcatgcctgtaatcctagctacttgggaggctgaggcaggagaatcgcttgaacctgggaggcggaggttgcggtgagctgagattgcgacattgcactccagcctgggcaacaagagggaaattccatctcaaaagaaaaagaatttgattgtagatcttccagcatctagcccaaaacccatcatataaagacagtctttgaggctggtctgagtatggtgtttataactatttgatcacaaacaattacagatttctttgtttcttctccatctcactgcttcacttgactagagaatgaatgaataaatgaagacagtctttgagagaatcaaaagaattagcataataggttatgaattggtgactttttgtttttgagggaaaggcatatagtgaaggtaaaggtatgcaaatgagtatctaaagagttaatgtgtttttaaatacaatgtcaacataaatttgcttgcttttttttttttcccccaagatggagtctcactctgttgcctaggctggaatgcagtggcatgatctcaactcactgcaacctccacctctcgggttcaagtgattctcgtgcctcggcctcccaagtagctgagattacaggcgtccgccaccatacccaactaatttttgtatttttaatagagacggggtttcaccatgttggccaggctggtctcgaactcctgacttcaagtgattgacctgccttggcctcccaaagtgttgggattacaggcgtgagccatcacgcccaacctgctttcatttttaagcattaggctaattttgtcatttcaaatcaagtttgtgcaaagttaattaaactaaaacttctctttaggataccatgtcaagactgaagatccagacttgaggacttcctcctggattaaacagtttgatacttccagatttcatcctcaggtatattcaaagtttgaaa

SEQ ID NO: 128116 - DNA, 1061 bp, Homo sapiens
gacgagcacagaggaagaagctattcagggcatgctgtctatggcagggttgcactattccacgtgtttacaaaggcaaatacaaagcacagactgcagtggtgaaagaaactctctccaggatcccagcagctgccatggcagtaaccatgaggttaggcagttgtatcgctatgataaaccagtggaatgtggtaagaaacataaattatcagtctctaaaaagtaacatatgttgcccaacttaatggctcaataatcctcatttaggttagagattatgaataagcatctttaattggaaatgtgttaagaaggttgaccaaaaaaagcacaatgctgacatatcacgtaagatggaagcagaagaactcaaaatgtaaattacctgggattgacaattgtgttcactagcatcattctaccattgttattgcaagccagttagtattatttcccttttacagacaggttgatcagagtggaaggagtgttttggtgccttaaatggccaactaagcttgaacaatcagccctttttccttttatgagaggaaaaataagttttaaactgtttctttctgattgaggctattccttctcctacttgaaaagaaagtattaggaaaagagggtagactcagtggcagtgttaggcatgccacatagtgttttcttccttgtgcctttagagaaaatgtttgtatcccaaaaagcctgaggaggaccggggagaagatagtactatattaaaattgaatgcctatataataaatatgtttgatcctacataattatcaattgtataccaggagcttgacatccatttcactgaaataattttttttattatttatttatttatttattttgagactgtctcactctgctgcccaggctggaatgtagtggcacaaatatggctcactgtaacctcaacctccaggcctcaagcaatcttcctgtctcagcctcccaagtagctggaactatagatgcatgtcaccacacctggctaatttttttattttttgtagagacgaggtctcacctatgttgcc

SEQ ID NO: 128117 - DNA, 1104 bp, Homo sapiens
gtggctcacacctgtaatcccaagttgatttgggagtctgaggtgggaggatctcttgagaccaggagtttaaaactagcttgggcaacttagcaagactccatctctacaaaaaaataaaaataaattagctgggtgtggtggccatgcctgtagtcctggctacttgagaaactgaggtgagaggatcgcttgagcccaggagttcaaacttacagtgagctatgattgtgccactgcactccagccagggcaacagagcaagaccctgtctcaaaaaacaaaaacaaaaaacgaacctcagatccctagcgcatactattgcacagttgaatgaaatatggggacagtgtctcaattctctactctttgtaaattaagggagaggggaataaatactgtttggctacagagtcttgcactatattctgattacttttccttcttaatacagagatgaaaggcagccctttgcagatcaaagtctttatacagcagatagtgaaaatgaagaggataaaagaaggacaaaaaaggcaaaaatgaagatagaagagagttcaggagtagagggagtggaacatgaagaatctcaaaaaccactgaatggtatgtttttttaatggttattttaaagatcttttgattactaatgtgataatatgtaaagtaacttgctaattttgaagttcttaagtttaaaatagcagaaaacttttgtgtccctaaaactgtcttgaaaaatctgaagtatgagagaagtgctgaacgtgaatgcccagtgaggtatacgcccagtggccaggggcggtgttctcagtgaggggatgtttgtgggttagagctgcactcatctagtcagtttttaaagagtcacttgaaagctcatgcatgttataggcctctactccccaaaataaaagtttcaagtttcgtttaattttatatgtaagttcagctaccatgtgtatggttttcagaattaggaagtatatatgattagctaatctgaagctgttagtaatccatgcattgtggttttaattgattacctgttgacaagaaggcctctactgggttattaattggttatcatcagtatgg

SEQ ID NO: 128118 - DNA, 1053 bp, Homo sapiens
attagctgggtgcagtggcgtgcgcctgtagtcccagctacttgggaggctaaggtaggaggatcgcttgagctcaggaggtggagattgcggtgaggcaagattgcaccactgcactccacacactgcagcctgggtgacaagagcgagaccctgtgtcaaaaaaaaaaaaaaaatcaaggaagtatgttcacagtatattatgttggagagagaagggatataaagttctcagcaaagctgtttgaagcttaggatttagtcttttttgtgtttatatggttaaactgaatggtttttgttttctgaaatatttttatggatgattatttagtcacgtatgtgtgtaacagccttcttataaaaatactctgattttaattcttaaaggaggaaaacggcaaaccagttaaatctcagggaattcctattgtgtgtccagtttcacgatcctcaaatgaagcaacttccccataccattcccgaagaaagatgaggaaacttcgagatcataatgtccgaactccttctaacctagacatcctagagctccacacaagggaggtcctcaaaagattagagatgtgtccatgggaagaggcaagtattatgtttcatgacaacaaaaagaaacttggctgttccttaaagtctttatagggataataagagaatagtcttgactattgttgatatctaatcttggctgcagcattgtagggatcaaccagtagttatgcctgtgacagggagtggtgcttaatctttctaagttttagtgtagaatttgaatgaatagacctcattcgattgctgatatgtttattgagtctttagcaagtaccatttcctcttctaggctctggagaagattgtgagcaaaacttaagtccctgcccctcatgaagcttccatcctagttcaagctggaaggatggggagacagagacatatactaaaataatacaatttcagatgataagcgttatttaaaaaaaacccaaaacaatagaacaacagaataaagggggatggggtaaagctggctgcttt

SEQ ID NO: 128119 - DNA, 1015 bp, Homo sapiens
gaaattatcctggtcaacttgcatgctaattccccaatgagtgatgtgtttttttttgaaatgatagccttagaatattttaggtgttacaaaagtgaaagggaaaagtcagtctcctcattttatgcctgagaaaactgaaatccagacagtgttgcacaatttctacatgccaatataatgtatttttttgtcattatgagctgtacaccaagatatcattagtatacagaaagctttgtaagccatatacacttttatattcagtgtaaattgtgcagctctgtcttactgctttccttttcctctgaaaaatgtcccttttttcctgaaaggtccagttgaacttgagaaattaagagtatagggaaaatatttgtctagactacatagttttatagttggtttaattatcataccaagttaaaatattttttgattagagcatctgctgatgtaactcttaagtccaataataagactgtaatttttctctgcaggtggtgacaaagtgatagatgtcattgatgtggcgaggcaggcagacagcaaaatgacacttcacaattatgttaaatacttcatgaatcctaacagaccaaaagtgttaaatgtgatcagccttgaattttcagatacaaagtgagtagttctgggtattttggtttagcattctgagtgttagctaaatgtagtgtaatgatgtatttattttaggaagaaacatagttgtgacttctaaagttgtccagtggtagcaatgttataaattttgcattgggacactcagagatacttagaaataagatgtattttaaacttttggctgggcacagtggcttatgccttaatcccagcattttgggaggccaaggcgagtggatcgcttgaggccaggagttcaaaaccagcctggccaacatggcgtaaccccctctctactaaaaatacaaaaatcagctgggcatggtggcacatgcctgtaatcccagctactcagagaggctgaggcacg

SEQ ID NO: 128120 - DNA, 1821 bp, Homo sapiens
tatcaagtggcttctggtgtttctacttaacttaaatctaaccgttcattacaactagttgtaagcatcctattattttatgatgtcttctagtgtagtttacatactaaaatacaggttgagtatcccttatccaaaatgctaaggaacagaagtgtttcagaaatgatttcagattttttttttcttttggaatatttgcattatacttagcagctgagcatccctaatcggaaaatctgaaatgctccagtgagctcttcaattctcaaaacattttggattttggagcattttagagtttgtatttttggattagggatactcaacttgtacatattttactataaactggttggttttttctttttgcatttagaccagtttatatatatttctaattatatgtattgaattgtgtatattacattatctataaattttagtttaggatagcaaaaggagatttacaaaacatttgtcattaaaagaatgagaagtgataggttaagaaccactgatatagataatccagtatatgaattaacccatcactaccgtattttttttaaactgaccttaccaataaaaatgacatttttattcttatgtttttccttagtgccgatgaaataattataaagatgcatggcagccagctgacacaaagatatctggagaaacatggatttgatgtccctattatggtcccaaaattagatgatctaggactcaggctcccttcacctacattttctgtgatggatgtggaacgttatgtaggtacgaactttatttctttaagtacctgggaaaacatggtaaaagtaaaaatgatagtcctggtaatattaatggttaaatgaagaaatgtcaatttagttttctgctcagaaaagtgaggctcagtatcatctatattgaaaactagtttttctcagcagacctacaactgtcagaaaaacagaatgacaatttacttgattttatttactcagcttcatcctgctgctttcttttgtgccattaagttctctgatacttgcttagggaaaatcattactgagggatagatatagataccaggaagaagatattggaaagttggattggttgtaggcatctgtagaatacaggtgcaaaattcccagatcccagtacaccagctgcacagttagtcctctggagtctgctttgtgacctgctgctgcttagaggaaaggtggtaaaaagagcagatcattttcaaatctgtttttataataatgacttggtgaatattgccatttaatgatgtctggacttaatttttgattttgaaaattccccaaagaaacagaaagacatgagaaataagggggatcccctataccccttgccatgttgttgacattttcagtcatttcattaattctcgtgatatttacagataaagctgactatatgtagatgtcatttcttgtcagcagtagatagagaatatttgagattagattccaaatctattttgactcaaaattgtatatttactatattatctcctcagcatggaatatctgagaacttgtccctttatcgagccattggttgacaattctcattgattattgtttcactgaggaaatctaactaagtattgtaacttcacattcagctaaatttgaatatttgacaagtgagaggatggggctaaggattaacctgaacctatttgcgtagatagcatctgcaaaacaaatagctagtgtaatacatgtgcaggaaaaaaatgctcaaactgcttgatagctaactttttggtactgcagagcacttcagtta

SEQ ID NO: 128121 - DNA, 1028 bp, Homo sapiens
gactactcaaggtcatagccttccagagctgtagaattacagggtcttagcattggaataaatgatgaagttatgtattttgtcatgctacccgtctttctttaattatgactcagtcacctgctcttctttatgtcagtgtaactgtgcttatttagggagtaagtcttcacatgaaagaggaaggaatgatgctattagaatagatttctaatgtgagataaaaggccctgtcctgagaagacgatttggattatctggataatcatattaggacctaatgttctgatgaaaatcataattgtatataatttggaaattgtatagtatctataagtgtggacattataaaaggctccatctgctgatttgaatttgttgctttaattttatatgttttgaaataaaaagagtaggttttaaaaatccacagttaattgtctgtaattgcagcattacattaagcaaaattctcaggcctggaaatgcattaaaaacttgagtgtttttaatgtacttacaattgttatttctgattatgtcggatataatgattagaaatcacatagtatcaccagttaccaaaatcatttttttttaatcttttaaaaatccagtgaaaaaaaggaggaactggcacagacatgactacacagaaattgatgatggttccaaaccagtgcaagctggaactagaactttcattaaggaattacgctctcgagtcttcccaaggtatggaaacttactctgataaaagaaaatgtaagaatgtaagaatgtcgtctcatagagtgacattatataaaggcaatgttttcaaacttaggctgcaacccattattgtcctcagccagcttttcaccttttttcttccttaacgaaatagaaaagtatcagtacattccaagaaatagcagtaagtaagcatattttcatggaacttttgttacatctatgtgcacactgggtcaccctgtaaaaacatttaagtgtgggccacagtccaaaaagtttgaaatacacta

SEQ ID NO: 128122 - DNA, 1039 bp, Homo sapiens
tgaggtagatacatagctcattaatttcagcctctttttttctagcagatgcatttaaagctatatgtttctgtttacaagtgcttcatcccacaaattttgtcatattgtattatcattgttcacattttaatatgatttatcttttgattcattttattgacatttaataacagtgacatttacataatggttgaggattttatggcttataattgcagtatttctgatgtctctactgctgctaagagaggattactttgagtatagtatattctccctcacactcacttagcaagtttgtagagaacagaataaaatttatctttatatgtgtttctgtgctctacaaaaatgtgttggtgaggtggttgtacatttctcagctaaattccaaccactgtattatagttaagcgaagattttcaacttacttacatactgattttggtttcctttgtcttagctgtgttggagtagaagaacatcatgctgttgacattgacctgtatcactgtcccaactgtgcagttttacatggttcctccttgagtaagtactagatgcttaaataaaaatggacatttcagaaaaactgacatttcaaacttacatgtacatggtaatactttaatgatactctgaggagttatattacacccttcaagaactgtagggaaagattttgctcaaggtatttaggatgtagtttttgtttcattaagtcagaagattaaggggggaaatgtactgtcagtcttaattgccagtgcagagtccccaaactcaactacatagtttgatatctttcaatttgagaagtgtggtaaagtaaaatttttctgtttctggaaactgatttcacttgttttgctctcttcacaaatagaagatctttagtagtattttgggagagtatacagaataagactttaatgcactcatatgccttatattttaaggagaaaatgagagcattgataagctaaaatattacttatattttctgaatttggttgctgtattgagtatggcctgg

SEQ ID NO: 128123 - DNA, 1048 bp, Homo sapiens
ctgtcagcagttgtatcccaaagaagaacctgggcagaggctgcagagtcggccacagcatcaaagcccagctctgcttactacctgcgtgacctagacccaattcctcatccttgtttagcatgcagttcagtttccccatctgtaaaacagggaggctgtgaagatcaaatgagaccatgttcccgtaggggacaagaagcccgcccctggctggcttccctctagggagctgctgccaatccctttggccaggatccaggactctgcttcagccacctgtataagggggcggggaccctgtgtgatgaggtctgtgccaaggtgtggccttccctcccacatcctactctcagggggtggatggatcttgctcttctcactggctcctccagctctggggacagaacaaggacggcgaaccaaggtcctcttggagcctgtccttctggcctccctcatcctccccacatgagcactggcaggttgggcccaagcatggccagggaagggagaacctctggatcctggagttccgagcctcagctgtgccatgcagcccagagccctgccccgagtggagtgtcaggctctgtgccatttgcctttatcctctgtgtgtgccaatccccaggaaccccacaggaaggaaggggtggaagagctagggcagaattctggcattcctgggtcccctaaatcccacctgcactctgaatggtagaaaagatgggaagatataaatagaaagcagtgggggtgtgggggaaggtcagcagcaccccagactgcttcagggcccctggggacacaaggaaacctgatgtgagttggaaaaggtccctcctccgggtggacgcacacccatgatgtgcagcttagctcacagatggcgcctttgtgcaaactagaaaaagccctcagccctccctgtgtggttggggtgcagcgcccaacctgaatgaagtctccacgggatgtcacaggtcccttgcactgccagttttctcagcacacacgaaattgaaggtatagccttgggttctgc

SEQ ID NO: 128124 - DNA, 1057 bp, Homo sapiens
gcctcttcccttttccctttttttttttctttttttgagacagggtcttgctctgttgcccaggctggagcgcagtggcacaatcatagctcactgcagcctcaacctcctgggctcaagcagttctcccacttaagccccaccctgagtagcgagggctacaggtgcacaccaccacattcagctaattttttaaaatttttttgtagaaaaggggtttcgctgtgtttcccacgctggtcttgaactcctgggctcaagtgatctgcccaccttggcctcccaaagtgctgggattactggcatgagccactgcacccagcccccttcttcagaacctccagaagtcctcctgtctcccaaatcaatacacggtaaagccttttcttttccctactggcttttctgactaatgtcctagttttctttttgcagctaaaccctttgagctaatagacagtatctgctgccttcccatctatactactcatttcctcctcaactaggtagctacctgtctatctgttggcccaggacagtcctgacttatacctgtcattcaccgtaattatcaatggcacttccttttgctctccaagtgtcctgatttggaccccttatctctagcctctggcctctcatcaccctacagaagccatgcattgagggtcattgaattttgagactttttcccccctcatcccatatttgtgcttgacacctgtaaccacttcgtctttcccaggactttttcttctttggcttctctggcattttaatttatcgaatcttcttactgactatcccttttcctgggttctctcctctgctctgcctgcactggtctcctttctactttccctgatgagctatttttgtaatctaccaataaccctgtcaagtacttaatgaacaagaagccactaaagagaggaatggcatctgtttgttaatgactatctggtgtatagttaagaacagctggtctcaggggaggggaatgggctcgacttatataatcccaaccccttctcccctccccacacagaccattctg

SEQ ID NO: 128125 - DNA, 5238 bp, Homo sapiens
actatttttgaggcatcaattatagtacctttcattggaagaaagaatgattaaatgggagtggcttgcggatgttcatcttcctctctaaatagcaaagtgaataaaaataaaccttctgaactgacaacttctattatacggtttttccatttggactctgcatgcttaaatgggccattaatcacagcaggcacatgtatgtggaagagctttgtaaactgcaaaacatacaaatcctgttcccttcttattttctaaaatagccatgtttaatctactttttagctgcttccttttatgaattataaagaattatattgtaatttttttttcctccctttcagtatttagtgtctctgatccgggacaagctaggatggatgtgggttttctactttttcattctcatggtaagtgtgtgcccctttaaaaaaaaaaaagtcatttttctgttaattaagttcaaagcacttacttaagtcacttcagcaaaactgttgattgcttttaaaggctcctttgtgaaaagtaacattttattagtctaaaagacatcttcttcttcttcttcttctttttttttttttttttttttgaggcagagtctcgctctgttgcccaggctgaagtgtggtggcgtgatcttggctcactgcagcctctgcctcccgggttcaagcgattctcccacctcagcctcccgagtagctgggattacaggcgcctgccaccacacccggctaatttttgtatttttagtagagatggggtttcaccatattggccaggctggtcttgaacttctgacctcaggtgatccacccgactcggcctcccaaagtgctgggattacaggcaggagccactgcgcctgacttcacattcttctttgtgaggaagaaaaaggctctcagtttgctcttgacctgagtctaatgaatattgccatttatgatttcagaaaaacaagaagagacttatttaaagtatcaccagcccctaatcagtatactcttctaggctaccctctatctgctgaatataatataggaattctgaagtaaattacaatgtataccaagcaacacttgagttaaaagagaagcattgctgtaatcaacactgtcatgtttcccggttctaaaatgttgatagtttcttgaggaaatatttatgatgccctagacattcttggctgggattctctactttcttggaaatagccaatacagagtaaggccttgtttatttttatttatttatttttttgagacaggtctcattctgtcacccaggctggagtgcagtggcacgatcacagctcactacagccttgacctcctgggctcaggtgatcttgggctcagggggtcctcccacctcagcctcctgattacctgggactataggtgtgtgccaccatgcctggtaactttttgaatttttcctagaggtggtttcaccatgttgcccaggctggtctcaaactcctgaggctttgtgcttttaaaatattgctctctgttatgagctgtgacatactcaggcacgttattgtgggacagtgctcaagacaggtctacctgagagagtctggaaggcaccagggacgcattcagtatcctgtccccaaatccagggcactgtaattgaaggcagcttccaccacccgtactccaggcagctgtcctcttgctgtggtcaaggagccccaggatagtccagctccaggaataccttggagctttcatctaattcccatctagcttctaaagactgggcccatgtaacttgtgttccatttctgacatccatgctaagtagagggaagtatcttgtgatgaactttctgatgtgatcatactaggaactgtagtagaaagaaaacttttatctattataaggatcactgttgttcatctgagcctctggtctcagttctctgctccgcctatggcaaattatttgtatgtattgttctttttttgggaactgaaatgtgatgttgagtgttttgtaatattagccataattttcaaaatcattttctaattcattgaagattaaacattatctttgtatgaagtcaaaatgaatgtaattgtccaaatccattattatgttcaaaacatgacactctaacagaagtaaactgttgctgcatatttaatactattttctctttacagacaagttgtacaattgtgtttatctcgccattaatagtgagggaaatattctctctcgtgctaaggagacaggctcacatattgagggagtgaccggtgcccgcgagacagaaagaacaatgtcagccacatcaggaccgctggggcttcgagtctgccctaatttgggtttgtctaggagctccagcctgatcttggattgtcaggcgtctctcaacactgccagccacctgagatgctgaccagcagtgaaggctgcactagttttctacactacaggaattactgttgatgatttttgctgttgtttcatgaatgtgccgagtgacttctgactctgccagcatctttgacctctgactctgcccgcgtctttgtttggcctattgaggtttagcgttttaaccttaactgttgttttggacttgaactttctctagccttgaaaatggagtgaacaggaggcaaagccacgcgtggtttgtgttggtggtatgttccacaaatggaagagatcattgcattttgctttggtaatgagtttacagagagtgggtcatctttgaagcatcaaatcctgatcaaatgctcaagctggaccgagctgcaagcctgccttggacaaagaatccctctgttcactgtggtgggaaagatcacactacatgcctgttgattggctcagtcactctgtgtctgatctaaacgtcattcagccctagaagcatgaattgcttcaaattattgtcaacttgttctcttccattttcattcaaattaactttgactcctggaagtattgagtcttcctttcaaggaccataaggtacatcagttatcttgaacattctgacgtgtaaaggaccataaggtacatcatttatcttgaacattccgacgtgtaactcacagccgaagcactccatcccagatttgttgtctgggaacttaggatcctctaggaagctaatctgcttagtctatttttagaggattgatctctggcacaagcagcttcctggagttacctcagcagaagactagaattagagaaaagggaaagaccttttcttctagtaagtgtcaagtacagatgctctttgacttatgatggggttatgtcccagtaaacccattggaagtcaaatgcatttaatacccctgactggacaccacagcttagcctcgtccaccctaaatgtactcagaacacttagaattgcccacagttgggcagaatcatctaacacaaactctattttataatcgagtgttgaatatatcatgtaatttattgaatattgtacattatgttgaaattgcaaccatttcacaccattgtaaagtccaaaaatcagaagctgaggactgtctgtacatgacattgaatcacatgaatggattactagggcctgaggggtgtccgttctttagaaaaatgtagagtatatatatcttcagggctgtgaattccatactagttatcaatattttaagatcattctgtatatacatattttaaattatgcaagcaaactaggaggagaatgtgcaattttgagggatacctaatttgcattcggttaggggatatttttcaacctcttgctttatactctgatatggggtgtgtttatgaacttgttaatgttatttaatcatgcagatttccaatcagtgtattgctcatttactgacaaaaagggaaaatacgaaacacagaaagggaaaataaactgacttttataatgaatctccatttcgttacttaaatctatataccatgagcactgagatttagaatgtgatcggtgccctcatgtttcctgatactgagcgctcccgggtgagcccacgctgacccacagcattgctgggtcacgtgctccctcacctgaggtgctggggtggcttcatttccatctgttctgtgaaaacttgccctttcccactgtggaagactgtgctcggtttggatgaattgcccggttgtaagttaagggccgtctgttttctcattgaacctcttggctggcgtttggctcagagtttcctttccggctgcactgtgggtgtggtctcatctttgtgtccccacgccagccaatgttttcttacccagttgaaccttagatcggtgactgttcccctgacctttctatggcccccgagctgtactgaaatgaaaccatttaaaaaaatttttttgagacaaaagtctcgctctgtcacccacactggagtacagtggcacgatcatggctcactgcacccttgacctcctgaagtcaaaagcgatcctcccgcctcagctcccaaggagctgggactagcctcccaagtagatggaccgtgcgccaccatgcctggctaattatttttagtctttttattttctgtagagacgaagtctcactgttacccaggctggtctcaaactcctgggctgaagcgatcctcccaccttggcctccccaagtactgggataacaggcatgagccactgggcctgcgtaaaatgaaattacaaatcaatgctcagcactggacaacatgaaataaggatatattcccttattctagttctgccagtctgcacaggatttaactttttttttttttttttttttgagatggagtctcactcttgcccaggctggagtgcactggtgcaatcttggctcactgcaacctccacctcccgggttcaagcgattctcctgcctcagcctcccaagtagctgggactactacgggcacacgccaccacgcccagctaatttttgtatttttagtagagatggggcttcgccatgttgaccagtctggtctgtaactcctcaagtgatccacctgccttggtctcccaaattgctgggattacagatgtgagccaccgtgcccagccaggatttaactttgatgaacatctaagagttcactttattttcttcttaatatcttctcccttgagaagggaagagaaaaccatagtgaaagctaatttgaaaatgcatcctttcctcacagccagatcgtcgatgct

SEQ ID NO: 128126 - DNA, 1095 bp, Homo sapiens
cactccagtccagcctgggtgacagagccagaccctggctctctctctctattttttttttttgagacagcatctggctcttatgcccaggctggagtgcagtggcaggatcttggctcactgcaacctctgccttctgggactcaagcaattttcccactgcagcctcccaagtagcttggactgcaggtacccaccaccatgcccagctaatttttgtattttttttgtagagacagggtttcaccacattgcccagactggtctcaaactcctgggctcaagtgatcctcctgcctcagcctcccaaagtgctaggattacaggcatgagccacttgcctggacaagaccctgtctaaaaaaaaaaaaaaagacaaagttgcagtcagtttggagccccccatgcttcctgtagtggatgatgagacctctgcttttttgctacacatgatgtgatctaatataaatcacatagtcgttctgcattaatttttttcacttgtacatttcagtaataatgtgattgaagaatgctacccttttgtgtctgcggccaaattgatttttgacaagggtgccaggaccattcaatggggaaaggatggtctctcaataaatagtattgggaaaactggatatccacgtgaaaagaatgaagttggagctgaggagtgggagaggaaagaaaaaaaaaaaaaagaatgaggttggaccctaaccttacctcatatgcaaaaattacctcaaaatggattaaaggcctaacttgaagaacttaaaattatgaaactcatagaagaaaacagggacaaatcttcatgacaaatatgtacaaatgaccaataagcacatgaagagtctcagcatccttagtcattgggaaaatgcaaatcaaaaacacagtgagctgtgacttcatgcttactacgatggctgtaattaaaaaacaggaaagggccgggcgcggtggcttaagcctgtaatcccagcactctgggaggccgaggcgggcggatcacgaggtcaggagatggagaccctcctggctaacacggtgaaaccccgtctctactaaaaatacaagaaaaattgg

SEQ ID NO: 128127 - DNA, 1056 bp, Homo sapiens
aatgcccagtggtcaaagaaagaggaaggcagcagagtaacctgtagtcaagggaactgcgtttgagaaggcgttagtaaggtcatggatgtagagaggtcaggagaaagagaactgaaggatttgtcttttaggctcttagttttgacatctaggaggtcattaataaccttgaagattattgttacttgcttgatgggggtgaattgctgatgtctgattgctagtggttaatgagagataagtattgaggtaaagtaagccatgttaatactttgactacctagccgtattttaatagtctatatgcacttgttaatgtctgtctctcccactgtaacataagcttcctgagcgcagcattttgttgtatgttcttctgtcaccttagtacctagaacagtgcctggcacacagtagacattacttgtggaatgaatgactgatatgcttggcatatttgattataagactaaagggcaaaaaaccccaaagaaacaaaaaccttagcaaagccttgaaaaatacgcttacctgatcatgccctggagcgggaatcgaaaaatgctcccagccatcagttcagacgtcttcacctatggggtagagagtggctgcattgggcatccttttctgacattatattattttaagttatccttccttacgaatgttttcttcactaactaaatgggtgcattataatgagtatttcagagaatttgcttttattcagattgcctcacctgccagtatccagatccctcactgtgaacttgggtcctagactgaccttcatggttggggaagcacgtctggagtaaatcactgttagctttactcattcctcttccatgttgagttttgaatgatttcccattgcctaaggggtgaaatcccaaactctgtgacttagcgttaacctctatcagctctgtccttagccagtgtactaatttaccctgaataactttgttaccccgtctttccctgacttcccaagtaaagaattgtttcttcttcaggttgccatagcagttgatgcggttctgtagt

SEQ ID NO: 128128 - DNA, 1019 bp, Homo sapiens
cagcagtgggaccagattcacctgggccatcgcatgcctgattcatgggcagcctcactgagagcagtggcagatagagtcacctgctccattgcagtggctttttcctctttgctcttttttttcaatattcctggttgaatttgtgtagtggaatgatcatatgatgcaactaccgtaatagaatttatttgacaagctagtgcaattagttattaatgaatgtaaacttcacaggattagaagggctatgtgtttcactatttttgtatctttgggttctacaaaatatactagagtgtcacataattcgagaagggatttcaggaacgtggatgttaactactaatagtttgaaaatgatactatctgggggtttccttttttttccacttctctccaacatattaagaaaactattcggatattattttgccttatgcagtagattgctagtggttgtgaattgtgttttaataagaacctgtttatgacttcaggattttttattggtggaccttctaatatgattagttctgctatttctgcggacttgggtcgccaggagctcatccaaaggagcagtgaagctttggccactgtcacaggaattgtggatggttcggggagcattggagctgcagtgggccaggtgagagaacaggagaggggctgggattctagtgtcttccctcaaaggcggctgaatgtgaacctgccctctgggcctcagtaggtggcactcttgtgctgtagaacgctgttcccagagcccaaggacttccgtctcccctcaggaccagctgatgcgtcctaatgtagaaggactctccattgtttttagttccttttttctacttatacttctagattcttcctgtctgcaaataagctaagacctcgtaagacagacagatccttctgccccagcccaccatccccttctttctttccaggctgaacttggtattccgtggtggggggtgcttcttgttatccccacctggcatgtggacccc

SEQ ID NO: 128129 - DNA, 1049 bp, Homo sapiens
agcttcaaggcccgatatgccacctttgcattgtcctgtgaatgcctgggaaacctgtcatcacatagttttatttgtcttgggaggaaactggcatctcttttgctttgttaatttgcttaaaagcttgcttgggagtgtatatgctttgtttgggggaggctccagaggcacagcattatagccaataaaacaataaaaagggaacaggtttcaaaagcggaaagatggtaattagtaggtttggtatattcccttaagatgctgctgagacaggagtagagcttttctttagcttttagaagtcttgttagcttgagcattagcaagaggcagacgttacaaatcagagttgaaagaggcagagagagttgtgtctctttgttgtctctgggagtgatttgtgaggtcacggagattcagatcttcgcgtacggttggcagaggcacgtggagtctgcttttcaagccaccatggtttgtctgtgtcttccctcacaggttctccaaatgataagtccatcaatgcccttctgatgactgttacaggtacggcacatggctctgctccaccatgcttctgttgctctgtaaattcagaggaaaagggaaactgttttctccctcaatttgagtagtaccgaaaccttaattacagagaattcaaattttaaaaggaaaaacgcctccttttccagattctttttctctgctgtttcttacatgacctcctcagtcctattgtgacagaagcggtccctattgacagagattttctacgatttttgattgctgccccagcttctgctcttacctctaaaagtgacttagaaaaatgccacatgggagaccaattcaccagctttcaaaaaaatccacaatagctcgtgtctcctcctgtgttggaattggtcagcattttgtcacttgagcactagataaaatagttgggtgcatttagggactatgttatagaaaaattacttactttatttattatttatttattgagacagaatcttgctctgttgcccaggctggagtgtagt

SEQ ID NO: 128130 - DNA, 1049 bp, Homo sapiens
ttgttcacagtgttgccttggcaaggagtagaataaccaaccccgtttggctgctcccagtaaaggccgtgatgcttcctggacttctttgcctatggttaacgctggttagtggcatgaataccattcctctttgtgtgaataaagaaatatgggtatgtgctctgccttataggttcaaaacactggcttgcttctaccagagaactgataggaggagaaactggacacagctaagaagtagccataggtgttttttattccaaaggcctgctgtacatgcctgtctagaagttaacagggatgaagagcagagggagactagctgaagtcaggcatgtgggagtttgtagagatgtttaactgtaaaatcaggttctgttcatcctaacttcctttattttgttttgcttttaaatgacattaaaaatggtagtcgtgctgtgctatttgtccctcgctgatagttgaatgcttttcttgtagtactcactggcctacgcctgcttgaagttagtgaattactccttcttcttctggctccccttttatctgagtaacaacttcggctggaaggaggcggaagccgacaagctgtccatttggtacgacgttggagggatcataggtatgccggtgatacatcttttccataataaagagttagtcactagtgatcttttactgggttgtgaaatctggcctcatttaaagttttattacttattctacagccattttccctaaactgtcctactagtaaacagccaaactcaaaaaaaaaaaaaaaagaaaagaaaagaaaagaaaaaacaagaggtccatagaaaggaagacctagcctaaggcagcgctgtgatttattggactcttttttcttagtcctttgttgatggatcagttcttttgtctcgggaagcacatgggaatctctttaaatgcaatcctttcatacggctttctcagtgatatcttagctctaaagctaattgtatgtcagagatccaagttagaatatgaacgtgttcattgtatctacctcccacctt

SEQ ID NO: 128131 - DNA, 1049 bp, Homo sapiens
aggagaagccgccccttctattccgaatgtcttactattatggccgaaaggaaatctgaggccaagaaatcgaatctcttttttcctaggaaaactctgagctccttttagtgagtgaaaggagaacagtactgccgtttgagtcctgtcgacattgtagccagcccctggcacagctggacgtgtttgaggggagtgatgcacgtcttttatagatacaggaaaatcttcgcatttgcaaattatttttataattgagacactggcaaggaatgaacatagatgtatttctgatttcacttcttgaaacatttcttttcatccataaaaatgatgcacaaaaaagatacttaacctgtagttaaatacagattacatacaaatgaaaccacagaagcaaacagatgtacaattcttctatcttttgagtatttttagatagactgtgtgactttaattgaccttagttgacctcggtctctggaccttcgttgctgcttctgtaaaatggaaataaaaataacatcacctcataagtagggatgtatgcagagcccttcacacgtggtaggcactccataaacagtggctgtcgctgttattttaggtctctcgggtattgaggcagaagaaaactttgaagaagactcacacaggccattaattaatggtggtgaaaatgaagacgaatatgagccgaattattcaatccaagatgatagttctgttgcccaagtcaaggcgataagcttctaccaggcatgttgccttcctggagtcataccggtaaggaccgcttacatcttaccacagccagggaggtatgagagcccgtgacatctcctctgcctgagataaagcttccttaagtattgagcctctgttggatactttattttaggaatatacgtgctgaggaatgttgtctagtgcccctcagcttatctgatctctaatgcaggggttgacaaaccttttccatgaagaggcagagaataaatatttttgacttcggggaaccatccagtctctcccccaactactcagct

SEQ ID NO: 128132 - DNA, 4817 bp, Homo sapiens
taatcatgttttttataagttaaaatatgatgtccacacaaaaattggtacatgaatgttcttggcagcattatttataatagccccaaagtgggctaatctaacctaacctaagtgtgcatcagtctatcaagctgagtagttgaaaaatctcgatgaagttgtttttctttaaaggcataagagagtttacgtgcctgtcacccttattttccgacaggttttaactagggtcttaacctcatgtagaaaccagaaataacaaacagtatggaaaaccgtctttaatgtagttgagctccaggtttggggtagagaaaattgggtaatttttcagttcccgaagttgagtcctcatagtttgattttctagtattgttaagtaccaccgcaaaaacaaacaaacaaaaaaaaaacaccacacctgtgtttacttgtcagcaaagctaattttcgtgtcagcttgggaacattgttttttcagttgactatttgattctttgactgtgaatcattaactgttgctcaagtttttcagggttcaatgactggattccacttgttctctctccaccttctctagtcgtgcattgaggcccatgagaaggacatggagctctcatttgccgtgcagcgcagcaaggacatggtgtgtgggatctgcatggaggtggtctatgagaaagccaaccccagtgagcgccgcttcgggatcctctccaactgcaaccacacctactgtctcaagtgcattcgcaagtggaggagtgctaagcaatttgagagcaagatcataaagtgagactcctccccagtcttcatttgtgctttctcttttggggaagaatttagtaacttgtgccaactttcaaccagatggaccgcatttaaatgcatgcattttatcttgaaactgggatattctaatggggatttcttctttgtatttcagctagcttctaggttagttggtctatctacttttatttgaatgaggaaaccctgtgtatcagttagaatcttcgtgctttttctgaggagattgtgtttaatggattattagccagtttaggctcagtgaacaaactgatctagctctgaatgtatgtttcctgacgttttacatttccactttcctattccattcattaagctagccaacaatccaccatcctttaaagattgttctcataactgaacaaaaaccacataatctaaacagagcaaagctacaagaaataaatttatttaaacgaaagaaaaaggagtctgtgtgaaatgtcttcttttgtttttgttttttacctaagttatatttttcaaaaaaaaaaaaaaagaactggctagcccttgagttggatttataaaggaggttgccttgcttgaaagaaatggtcagttgtgtgacagtatgtggaaccctttcaggaaatgcccacgtgcctttcagttaagtctttaagtctggaggcgacacaccagggtgtgtccttgaagagtgggcctgtaaaaggggaatttgcattgcagcctgttcattgtttcccaggtcctgcccagaatgccggatcacatctaactttgtcattccaagtgagtactgggtggaggagaaagaagagaagcagaaactcattctgaaatacaaggaggcaatgaggtatgagcactgcagccttttctcaagcgaagagcccaacagagcttgggttcactttgaaaagaatggtgctgcattatacactcctacctccttcctacccttctttgacttcccaggacagtttattttgtcaccctgataacatccagtatatatcttgctataacacagtccttggggtccatgccaagggactgtgttataaagaggtctctactgttgacaagtaaggccccatgagtggggttctaccttattctgaatccgtgtcatagctgtcctatgttctcatgtgttggctttctagaagattttctctctatggcatctgcttgtactagagctattaaccagcatagacttgaacagagttaccggtttctagttagtgtttcttgcattggcacacacatgtttataagaacacatcttggggagggctgtaagctgacatactggttctatccctacctgtttaaagaaaccccggatgatagtcaaatacagacctgaaatccactgtgaataagggttgcgatattttcctttccagcaacaaggcgtgcaggtattttgatgaaggacgtgggagctgcccatttggagggaactgtttttacaagcatgcgtaccctgatggccgtagagaggagccacagagacagaaagtgggaacatcaagcagataccgggtaactctcactgtttttttaaaggaggggaaattccaaggtatcagttgagtcctgcacatattggggtaggggaaggagaaggttaacgctcaggtctgggagcgaaagtgtagagtattaaaggaggaaacaaacctcagaaaactgggagggataggaaaggaagaaaaaatgtgtgttaaagctctagcctaaacgatttccatgaagtaaccagaggggaggaagtggtaaatggaaaccctaactaagaagtctggttcgtcatgccctctggtgtgctggacgttttgccttataaacaacaggatagaagatactgctcgacagtgccatccctatcatggccttgttttttacaggcccaacgaaggaaccacttctgggaactcattgaggaaagagagaacagcaacccctttgacaacgatgaagaagaggttgtcacctttgagctgggcgagatgttgcttatgcttttggctgcaggtggggacgacgaactaacagactctgaagatgagtgggacttgtttcatgatgagctggaagatttttatgacttggatctatagcaaccttgcgtggcgtgtgaactggtctgctgacctcagacagcagctgtcccctgtggtggtgtggcagtgcctgtgttctctcctaggcaggcctctcaactccaggtgctgtcctaagaatttttacccagggcctgtcttctcaacccctcacctttccctgaggagtgtgttgttttccctgttgaaaaaagttacaaaaataaatcttaaagttagttttttgtaacacgaatttaactgtcagacagttagtgtaggtgtgttgcgtcatctgttttcaaccagattgcatttatggacttttcacacactcattttgaggaccccaggttcaaaagtaaaagcagtggccctgctttggggtccaagaataggagtgatgggtgaagggacctaagctggccaatagccctctgccccagacatgggatgtggatccttgaggtttctggtgaaatctgcacatctgtgtttttatatctgttccctaccctgtaatccctaccacgtgcacttgttctgtggttttggtctcttgtttaattgcacacaagtaatactactgggtaaccagaatcaggtgtgaatgtgttgagattttttactgttttgcatgataggaaaattgagaaagaatacgtataaaagatagagaggcataacatcaatgcagagttggaagttggctcccaagggctgacatggtgtgagtgtgtgggtgtgtgataagcttctcatccctgcatagatgcagtattcttagccttagtagaaaaacctggtttagtggtttaagccttgtgtggcagatagatcttaaagggcaaagcagtatattggtagttgtcaatatagcagtgctagctctgtctatataaatagagaaatggggttagccatagaggttaaaactacctggttatcccatataataacacaaactgggtcttggatacacagttgtatttaatgttttacgatctagcctttccagtacaggcactttctgagaaacctttgtcctcacttgaggcattttgttgtcgggtttttgtgtttgtttttgtgggtatttgcctcattccacccctgagctttcaggtagacagacgtgattcaaaactctgttctaaggtgtttattgtagtggagtaatgggtttgcagtgataagtcatacttttccaccgaaagggagggcttgggaatccctgagattagctaaagttaagttgttggaagaattccttgattggaaattgtacctttgtgttttgttgctctgtttcctgaaaataactcggggatgctcctggtttgtccatctactgctttgattccttggatcccacccattctttcactttaagaaaaaacaaataattgttgcagaggtctctgtattttgcagctgcccttttgtaagaagcacttttcccaaataaaacaattaaaaaaaaagttggctgttctgtgtaatgagctgtttttgaaatgtgccgatgtcaaagaataatgatgtttttctttcactgactcttcgatcggtcccttgtcggatattcgggaggataggtactttgagaaatgtgtgtgagagagaaagggaaaccttaactagccggggtcatcaaacaatcctatacttgaaaatgttcaagactaacgctgggccacctgttgagcaaaaggcactggcagttttctgctaccatgcacttgcggttgaacttgcttcatgcccttagataacgggggaaggtcataatataattgtattttgaaagcttattgttctgcataattatttcgtgaatttttaaggagttttcattattgtgaattttttgtgagtaagaaccattctgctactcccatg

SEQ ID NO: 128133 - DNA, 2177 bp, Homo sapiens
aaaaaaaaaaaaaaaagaaaagaaaaaggtatatatgaagttaggcagtgagtgcttactttttttttttttttttttttgagacggagtctcactctgtcgcccaggctggagtacagtggcatgatctcggctcaccacaacctctgtctcctgggttcaagtgattctcctacctcagcctcccgagtagttgggattacaggtgcgccaccatgcccagctaatttttgcgtttttggtagtgacgggttttcaccacattggccaggctggtctcgaactcccaacctctctggtgatccacccacctcagcttcccaaactgttgggattacaggcttgagccaccacgactggccgactgcttacttttgaattttttcttagatatgaacatagcaaaccattgaaacaggaagaagcaactgctacagagctaactacaaagtcatcccttgctgcttcctcaagtctctcatcgatagttggaccacttgttgaaatgaatacaggcgaagctgagtcaagaaattcaaactttgcaactgtaggagcaggttcagaggactgggtgaatgctattgagtttgttcctgggcaaccctactgtggccgtagtaagtattctgaagaagaaaataagagttagagggctggatagcagttcatccatttgcttagttttgacaactttcccctttctgcttctattccttttttagtttaatcttagtacagtactttaatttggattacctaagatttacagatagagtgaaggaaatttttaatcccagtgaaatgaattcagaatgttttgaaaaactgaatcctttcgagtactttttgaaattaaatttcagttacccaagacatagataaagaagcaattttttttttttacaagtctaatcttggaaataacagcggtagaaaaaattcctttctttcaagtgaagaagttagttcagtagactgttttggtatttcattgcagttttattttcattttttgcggttagattctcagttctcttatagttcatgccttatctatttggacctttaccaccctcttacacattttcagctgcgccttcctgcactgaagcacccctgcagggctcagtgaccaaggaagaatcagagaaagagcaaaccgccgtggagacaaagaagcagctgtgcccctatgctgcagtgggagagtgccgatacggggagaactgtgtgtatctccacggagattcttgtgacatgtgtgggctgcaggtcctgcatccaatggatgctgcccagagatcgcagcatatcaaagtaagtctttagggagatgtgtgtgttattagatgtgagaatcattatttgccctttcacagcattgtgggtttatttcagagaaacatttgatgaattgaatggttatcagtgagtagggaagttttcctttcttgggcttcttggatgctttatcaagaagtcatatttccagtgaacaaaattaactgggcatggaggcatgtgtctatagtcccagctacttgttaggctgaggcaagaggatcgctcaagcccaggaggttgaggcaaaagaaaaaaagaagtcctacttccagaaactcagactatagacttctaacatttttttcctcttttaaaaaataatgtttctgagattcacattgaatatgtttaatcttttgaaaatgcacatttcattggtttttagtatatttacagagatgtgcaaccattaccattttactaattttaggataatttgatcatcctacacccattagcagtcactctttattccagccttcctccagctcctggcaataacgaatctgctttgtctctggattggcctattgtggacatttcatgtaaatggaatcctgtaatgtggtcctttgtgattgacttcacttctttcacttaacatagtgttttcaaggttctttgtgtggttgcgtgtagccgttcttagttttgatggctgaattattgtctttgtatggctagaccacatttgtttttccattcatgagttgatggacacttagatcatttccagtttttggctattatgaataaggctgctaggaacatttgtatataggtttttctgtgaagatatgttttccgttacctaggagtggaattgctgg

SEQ ID NO: 128134 - DNA, 1056 bp, Homo sapiens
tacacttgctttactcctgttttcttatcaccttctttttattttttttttttgaaatggagtcttgctctgtctcccaggctggagtgcaatggcgcgatctcggctcattgaaacctcagcctcccacgtgtaagcagttctcctgcctcagcctcctgagtagctgggattaacatgtgtgccaccacaccagccaatttttgtatttttagtagagacggggtttcaccatgttgcccaggctggtctcgaaccgctggtcttagacccctgacctcaggtgagccactcacctcagcctcccaaaggtactgggattacaggcatgagccaccatgcctggccctttctttgtgtttatttcgtatgtttgtgtatttactggttgaatatattagtcatgaatactaattagttttaatattttcaaggattggttttaatccagttttgtggtctttcgtctcacaggtattttatgcatggggtttgtaaggaaggagacaactgtcgctactcgcatgacctctctgacagtccgtatagtgtagtgtgcaagtattttcagcgagggtactgtatttatggagaccgctgcaggtaagaatttgtttataaatttgttcaggggtgggttggaggaaaaaggtaaaagacatacttctgatagctttatatgtcactgattaaaaataatgctttgaaaatgactcttggctgggcagtggctcatgcctataatcccagcactttgggatgcttaggtaggaggattgcttgatcttggaagtttgagaccagcctgggtaacctagtgagacctcatgtctacaaaatatagaaaaattagctgggcatggtggtgtgcgtctgtaatcccagctacttcggaggctgaagcaggagaattgcatgaacccgggaggtggatgttgcactgagccaagagcccgccactgcgctccagcctgggcaacagagcgagactccaccttaaaaaaaaattgggtagggcttttctatcctcctagttcagaaatgactaggtgtatt

SEQ ID NO: 128135 - DNA, 1814 bp, Homo sapiens
tttaccatgtaccaggcactaagctcagtgatttctaaggacatcatataatcctcacagcaaccatatgtgggtctgctgtcatccttattcgagagaggctgaaacggaggctcagatagaacaagtacctagctcaaatattactagagaaatgggaaagtgcagattcaaacccaggtcttccgactgcaagtccctagtccccagccccagctccactatatcagcctctgctaggaagaaagccgctaactatggactttcgtcgccggggtttcgagcctaggacacacctgtacagacccccgtttgccccgcccctttccggaggagacgtcccctccaccaatgagcggcgccgtgggcgggccgcgggcgcgcatgctctgggcccgcagttgaagtggcgagagcgctcagatacgcgacgcgtagcaggcggggaccgaacgggtgcctcagtgtccttcccctcccctcgcctggcctcgccgtcctctccccgcagccggaccggaactatgtgatcccggaagttccggggcctttgctgtgtgggataaacagtaatggcggaggctgcaactcccggaacaacagccacaacatcaggagcaggagcggcagcggcgacggcggcagcagcctcccccaccccgatccccacagtcaccgccccgtccctgggggcgggcggagggggcggcggcagcgacggcagcggcggcggctggactaaacaggtcacctgcaggtaggacgttgcgcggcggagcgccgggcgcggggagggggccgcgggccaagcctgcggcgcgggagggaggagggcggccggcctgcggctagaggcgcgggagggcggggaccggcgttgtctcgatctctgcagccctcgcggcccccgctgccgccgcgttcccccagtcactgcgtcaacccccgctgggccgcggagccctcagcgctgtccgcggaggcctggcggtgcgcgattactgcggagccgcggggctgcaccgccgcttacacttccctgagcgctgcctgagctggctgcgagcgcatcggggagaggtgggctggctcctcccctgccgctggaaggatgcccccgccgctgcctccggctcccggggctcgggaggtggtcacttgaggccggtctcccagcgatcctctccgggcctagacaccccgccgagggccccagcgagcttgcctggctcccggccctctcctctctccgtgccatccgtttgtaacgtcttttcacgtccctccgtccctccgccccccatcctccgcccaactgtgagaagaagcttttgtatttcttctttgtatgtttgtcgaggttggcggtgctgagctttgtcttagaagcaggcgttcgggggccggggtcgtcttctccacccgcggtttttttgagctgcagattattaccctcccccagcgctatgttcctcttttgaaatttacgcatcttccgaagggagtgaaagggctcttcgctcccggaagagagagaggtttggttttggtttgatatgcgagacgaaaatattagaaaaattaagggatggcggttgtatggatgtgtatggttgtaaaaaactacctagctctacgcagaagagggcatttaattgtacgttttttattttccggtttttaaatagtgatcagtagcgactgtaagcttttctttttctatcagttgaataaatcaactgaaatgccggttttcacctgggtggtataatttatatgcaagtatgtaaaaatgattcctaattagaacttgt

SEQ ID NO: 128136 - DNA, 1431 bp, Homo sapiens
ctttaaaaggactgaaaggaaaacccactaaaacattaacgcttgttgtcttggggagggaaactgaaaggagacagattatgagtgattttaaattgttttagtacattcatatatttttataatgatcatcagttactttcactagcagagaaggtaacacacatgtattttctttttatcatttgctagagaggcctaacttctatcagattttgcaagaagtaattatagtaattacagaaaatttctctgggcattctgatggattacttccaagtgttgccacattgctgaaaagttcagtagcattaatgctgttttttatcattactttcacttcctcaaggcccacagggtaggcccttcccaagaccctcctgctctgaggccctgatcccaaagccagccttagatcacacaggccatctgccctggccagaatcccctggttaccagaatccactagctaccctacaggatggagcagtggaaatcatctattgagtatcctctcagtgccaagccctttcacagggtaattgtagtccattgtagcttcacaacaaggtacagattgattggtagtccattttacaagtggggaaaacgaggctcccgttgcttgtaaaaagtaggctcggccaggtgcagtggctcacgcctgtaatcccagcactttgggagaccaaggtgggcggatcacctgaggtcaggagttcgagaccagcctggctaacatggtgaaactaaactactaaaaatacaaaacattagccaggagcggtggcacgcgcctgtagttccagctacttgggaggctgaggcagaattgcttgaatccgggaggcagaggttgcagtgagccaagatcatggcattgcactccagactatgcgacaagagtgaaactctgtctcaaaaaaaaaagtaggctcaagattgaaacctcagacctctggctttcagttgtattccttccatgaaactggagactgagccaggcctgccctgcagtggctccagtgtgtcctatggccaagacgcagccaccgtgcccataagcccacctgctacctctgctttccagatggacgatgaggactccatcctgccccggaagcttcaggtggccctggaacacattctggaacagaggaacgagctggcttgtgagcaggacgaagggcccctagacggcaggcacggtaagtgttcagccacctcccagtgggtctctcccttccactctgagggtcagggaacaaatgggcagtggccaagggccaagtaggaatatgggcaagggagacataaggagagaaaccagggcctcattctgtttatctggatttcattcccacagtgaattgtgggaaagattttcccacctcccccattttggccttaaagtacctgtttaaaaggggg

SEQ ID NO: 128137 - DNA, 1061 bp, Homo sapiens
atccagacccatcactgacatatcctggggctggaagcttattccagttcttctcttggagtcgaatccctcccagactacactggctttgaaacactgtcatcttcaccttttggatgcactgcagccactggaaacctctcagacacgtttctctgagattctttttttttttttcctgagatggaggcttgctctgttgcccaggctggagtgcagtggcatgatctcggctcactgcaacctccacctcccagtttcaagtgattctcctgcctcagcctcccaagcagctgggactataggcatgtgccaccacggctggctaatttttctgcatttttagtagagacggggtttcactatgttggccaggctggtctcaaactcctgacctcaagtgatctgctcgcctcagcctcccacaatgttgggattataggcgtgaaccaccatgcccggccttctctatgaatttcttagtgagtgtcaccatcattcttttgttctgtcttggctaaggagcgctagaattaccttcctgtgacacccttcgttcttttgatggcctcaacaaaagctcctgtttccagctcctggcctttgctctctcttctgggttcatcgtttgtagatgttaaagttggaaggacggccaggtgcagtggctcaagcctgtaatcccagcactttgggaggccgaggcaggtggatcatctgaagtcaggagtttgagaccagcctgaccaacatggtgaaaccacatctgtactaaaaatacaaaaattagctgggcatggtggcacatgcctgtaatcccagctcctcaggaggctgagataggagaatcgcttgaacctgtgaggcagaggttgccgtgagctgagacgacgccattgcactccagcctgggcaacaagagcgaaactccatctcaaaaagtaaaaaattaaaaaaaaaaaaaagaagctggaaggacatcagcaacgatctagcgatgatctagtctactttagttatttcacaggtgagaatctgaggcctggagcagttcagggctt

SEQ ID NO: 128138 - DNA, 1023 bp, Homo sapiens
aagacacagctggcatggtggctcacgcctgtaatcaccgcactttaggaggctgacgtggaaggactgcttgagggaagtagtttgagaccagcctgggcaacacagtaagacccccatctctacaaaaaacgtaaaaaaaaaaaaaaaaaaaattagccaggtatggtggctcgagcctacagtccctgctactagggaagctgaggtaggaagatcacttgagcccagaagttcaaggttgcagtgagctatgatcatgccactgcactccacctgggcaacagaacaagaccttgtctcaaaaaaaaaaaaaaaagaaaagaaaagaaaaacacagacttgtctcagtgcagtggggtaacagagacataagccgactctccaggaccacattagaggcaggtagaggcagtgagttctggagaccgagggagggcactcactcccagggaggcgagttctgagggccaacactcagaacaagtagtcagcacattgcaggcaaaaggagccatcctacatagatatggggacaggtgaggcctagctgtcaccttcaggactgtaaagtaggccaggcgcggtggctcatgactgtaatcccagcactttgggaggccgaggcaggtggatcacttgaggtcagaaggtcaagaccagcctgaacaacatggtgaaaccccgtctctactaaaaatacaaaagaatttagttgggcgtggtggtccacgcctgtaatcccagctacctgggaggcttgaagaagaatcgtttgaacccgggaggcggaggttacagtgagctgagattgcgccattgcactccagcctgggcaacaagagtgaaactcaaaaaaaaaaaaaaaaaaaaaagagagagaaaaagaactgcaaagtagttcactagggctggcccagagagaggaagatgggggagggagagatgagccggcagtggtggacagaggccagctcacagaaggctgcagggccatgctcaagaggacagaccatcgtgagg

SEQ ID NO: 128139 - DNA, 1006 bp, Homo sapiens
atgcccaactaatttttgtatttttagtagagatggggtttcaccataatggtcagactggtctcaaactcttgacctcaaatgatccgcccacttcagcctcccaaagtcctgtgattacaggcatgagccactatgccctgcctgtgtgtgtatttttgagacaggatctctgtcttgctgttgtcatccaggatggcatggagtggcacgatcacagctcactgcagcctcaacctcctgggctcaagtgagccttcccgcctcatcttcccaagtaactgggactacaggcgcatgcaaccatgcccagcttatttatttatttatttttcgtagagacgaggtcttcctctgttgcccaggctggcctcgaattcctgagctcaagcgatctccctacctcggccttccaaagtgctgggatccactgtgcctggcttttttttttttttttttttttttttttaatgcaatggtgatcatccttgtacaggcatttttacatgtcaggcattttatctccttgtctttgctcccttgctccctctgtagaaaggcccttttcctccttctctctcttctctttttaaactttttttgtgggttttatccctcacttctgtcaagtcacctgaatcaaggcacagcccctatttgcatgctaatgttccattaaaatgtttcctatcccatatttatctttgacagttcagggagactgggctgttttccagccatctgtgattagttgtatttgtgggaaatttccgtgtgcagcttcctgtaactgtgctcctgtgcatatatgagcctgtgtatgtatgcgctgataactcgtaggttgatgacgtgtgggtaggcacaagtgtgcctgtatttgtgtgtgtcctatgtgtgatctggggtgggtgcatgcaagtagtgactgggctgttgaaaagggctggaacttgtttccccacgaggtctgctcttcagtcctgaatgctgtttcctttgtgga

SEQ ID NO: 128140 - DNA, 1348 bp, Homo sapiens
gaagcctgacttagaagaagaaagcaagctgtcacacctggtctgtcccctctgggtcctacctggctccccacttcatgcggggagtgaactgcctcacccctgaggaacaatgaaaaacatctgcccaggccaagcgcggtggctcctgcctgtaatcctagcactttgggaggccaaggcgggtggatcacctgaggtcaggagtttgagaccagcctggccaacatggtgaaaccccatctctactaaaaatacaaaaattagccaggtgtggtggcgggtgcctgtaatcccagctactcgggaggcagaggcaggagaatcacttgaacctggggggcagaggttgcagtaagccaagatcatgccacttcactccagcctgggtaaaagagtgaaactctgtctcaaaaaaaaaaaaacatctgcccaaggcagctctgcattcagggcagaacgctcctccctgataccaggaaataaaggcttaccaacccttttcttcttgtcactgctgggctggagaaaacctagagcctctgccaccaaagcagctaagcccagtaggtgagaatgtcaacaagaacttaacgtccagctgtatctgtatctgtagctgtcctgaacaaagagaatccagttgtccagagcacgtgtctgattgccacggatccttgcaagccctcagcgggacacggtgtccgtgctcattattctgctcatccacatctgggtgtctgctgtgtgccctgttctaggggacagctggagacttcaccacttcctccattagctcatcaaatattcatggagtatctaccgcatctgggctgcatctgggaccctaaagcttgcaggagcagtccctccatgtgacctcccccaccagctgcggagagatcctcagccatctttgggatgttcatttcattaggccacagctagttattcgggtcactagaatttccattcgagagggaagggcctgttggataggctctcctcagaaaggaccaatgtgtagctgcgggcagatgctgctgctgctgaacgcaaactgcaagctcctgaaagggactgttttcttttcttgctacgcatcacccaccgtttcttttcttttcttttgagacagaatcttgctctgtcagccaggctggagtgcagtggctcgatcttggctcactgcaacctccacctcctgggttcaagtgattctcatgccccaccctctgactagctgagattacaggcacaggccactgtgccggctaattttttgggtatttttagtaaagacagggtttcaccatgttggccaggctggtttcgaactcctgacctc

SEQ ID NO: 128141 - DNA, 1041 bp, Homo sapiens
catggattttcacaccttttacaataacagaagttgatttcaggccgggcacagtgtataatcccagcacttttggaggccaagacaggcagatcacctgaggtcaggagttcgagaccagcctggccaacacagtgaaactttgtctctactaaaaatacaaaaactagccaggcatggtggtgcatgcctatagtcccagcttctctggaggctgaggcagaagaattgcttgaacccaggaagcgcaggttgcagtgagccaagatggcgccgctgccctccagcctgggcaacggagcaagactttgtctcaaaaaatgaaataaaataaaagttgatttcggtaacaatttttctaagaaaaagaaaatttggccgaggggatatattaatatattctctgaaacagcctaatttgattcaaattctttgttttttcctcccatctggcacattccagaaagtcctatgagtttgaagatttactgcagtcttcctctgagagcagcagggtggactggtacgcgcagactaagctggggctgacacgcactttatcggaggagaacgtctatgaagacattctaggtaagaagccacagcgtctgtgtgcggatctgagtctgtctgggagaaaggggagggagaatggggctggctgctggaaacacacgtgcacacacatgtacacacacacacacttgaagacacctgtgcactcggatgaaaaagcaggcaggtggggtgggagagtgagccttgtgggatatatgacagaccctagggctggagggggaagactagctggtaatgagtggccaaggaggcagtgtggcagcgtggcatagcgagaagcgtggggcctggagtctgaagatccagaaccacatcttggttctgctgcctgttggccgcaggacattgagccagtgacttcacgtctctgaactgagttctcccatctgcataatgaggatgaagctagctcccttgcaaggttaaggactggagagaatgttgtgtcaactacctcacata

SEQ ID NO: 128142 - DNA, 1031 bp, Homo sapiens
cagcctaagcgacagagcaagactccgtctcagaaaaagaaaaaaaaaaaggaaatatataatcatacaaccgtaaaaaaacagatccaaacacaccaaaaaactttctcccatcacacttaattaacaaatgtttctgaagtgtggtatggtgtagaagtataaaacagttgctgatcttgaagaggtgagcaagacagacattcgtaatgatgagctagagtctagttctagtctatattagatatgagaccacgggaatattgtcgaaggagcactagacttggattcaaaacatagacccattacttgtgagttattgtatgagcttaaacatgtgacctaactccctgaggctcaatttcttcatcacaaaaaaatgataggaacactaacattgatttctgtagagctgagaaacaaaaagggtttcttagctgggtttccggcctacctgagaacagagagaaggaagaccaagtttacatatttgaaagttgaaataagttggaacctgactcttccctgtttggcgatctgtaatacacaaaagaaacaaaaggaagtgtacttttttattcaaaaaatacatttatctgaattcagactattaaaccatattttacctgtattagcatatttcataacttttataactcatgctttaatgatttatggcaaactcatactagccttgatcagagaggtgaccctggcagttattgagcattaactctggaggactgacgccactgagtctttctacacactgtaatttagtgttcctatccaagatggccactaaattgcacttcttctattttcaccctctggagaatggtaaaaagcatgatttgcaaatattgtcaagtccaaagtgtgtttctaaactactaagctagccaaatgcatctctatatgttacaatgttctgcagatgtgaaaaaatccttcccgggtttatgaaagtgagaatgatatgcatctttagctgcctctggcatccggcacgtcacacagtgtggtcagtc

SEQ ID NO: 128143 - DNA, 1186 bp, Homo sapiens
acatagacaaccttccaggatatcagaaggggaccagtgccctctgtttaccctccagctgactgatgcatctaatagggtggaaaaatgtcagagaagagagagcttcttaatccctctcaaaacaatcagacttgaagattccagcaccacagagagccaagagagcctcttattccaggctcttctttcccttgaatataggacagccaagattcctggtctggtacagaactgagagagatgggtaaaggggctaagaggctgcttctgggtacacacacaaccccgaggttcaggctgccaatttgtcagagaaaacgagaaagagaatgctccttttgggaccaagaaagaagcagaacaaatgcaagagtcccacgaggcagatccacatgttccttccccacacccccgaaatctggcttctattcctatccatctgctgaaaccatatcttaggttactaatggttcgtctgtggccagttccctgttctcatgcttcttgatctcactaatgcacttgacacacccctgacccttccttcttgaaacacaagtcaaggtggatgtaaaatgggtgcagtgatgaatctgcgccacttgtcaaaatactgaaatacttctattctggttggtaaatagggtgtcccacactcccaggaccactaactctccccctgccaagatctggccattaaagtgttaacaataaggccattctgcttgttgggctcctgcacacctttgttataattttgttgtgtgtttttgtttttgttttttgagacggagtctcactctgttgcccaggctggagcgcagtggcatgatcctggctaactgcaacctccgcctcccaggtttaagtgtttctccttcctcagcctcccgagtagctgaaattacaggtgtgtgccaccatgcctggctaattttttgtattttattttattttatttttagtagaaacaggctttcaccgtgttggtcagtttggtctcgaactcctgacctcaaatgatccgcccgccttggcttcccaaagtgctaggattacaggtgtgagcccagcctgttatgtattttgaatactgcctcctcagtgtagacgccatactgttttggttgttttaattgtctttcaaagaagagttcttcactgcttcctcctattcttattc

SEQ ID NO: 128144 - DNA, 1086 bp, Homo sapiens
ccttcttctgccacctgaatcagacagcctccacttgtaccccagactctcttgaaattccctgtgctggttactcagggaagagtgccaggccccgctggcccctttaatgataggaggcaaacactgcctggaactagggcaagtgatgagctaagttctctacttttcatatgcaaaagacagcgacatgctgggaagccagagtcagactcttctttaccctggccttaaaatcaatgtctgacgtgggcaacagtttactccgtcagccctcagtttgcctagaagttaagttctttgccagctgggcctagaattgcgactctaccttcagcttctctttggcacgtttgtccctggcttgcagttcagaggggctaaagaacagataagcctgagacccactcttccaactggctgaactatgggaaaccaagtgatcgttttttcccctggccttggggaaggaaggggtgggtcacccttgcagcaagcttagggaagaggttagcttccctcagtggtagggaaccaggaggtcataggcatcccttcagaaggaaatgaaagcagggatcattggctggagagtggggccagtacagggagccgcaaccttggctgtgacccctcctcccgggatccccaggccttccgtacactgcggatcttatctgaagggcttatcagaccacttcaagcagaatgccaaatgcatttccttttgttgttttgtcttctaaaaaagtacacttaaaaattgtaggtttacttataaactttatatgtaatctatgaaagttatatttgtcataaaacatttacttatttatttatttttattattatttatttttagacagcgtcttgctcttttgcccaggctggagtgcagtggtgtaatgatggctcactgcagcttctacctcctgggctcaagggatcctgctgcctcagcctcttgagtagcggggactataggtgcgcaccaccacacctagctaatttttgtatttttggtagagacagagtttccccatgttgcccaggctggtctcaaactcctggactcaagcaatccac

SEQ ID NO: 128145 - DNA, 1030 bp, Homo sapiens
gcgcgtgcaagcgcggggcatcgaggcggctgagcagccgggcccccctcacagcggtcagcatttgcagtcttgggaaagcaagaaggtaaagatgattgaatggtcttacttcttccactttgtccccaagggtggagttgggagcagatggagcccaggggaagtctggacacaatcgtattaggagggtcacagagagctgggtgagaccacggagtagagccagacctcagccgtggaatcttgtcatggggggcctgggacaggaagcaggaaactggtcagggctctccaggggcgtaaattgggcaagggaagtgcagtgaccctgccttaaccagctggtgctgacttccagctgctgttcagatgcgattcaggaatgtgacttccccaaggttccaaatgacatcggacagtaatgggctgggggtaacagagttgtaataggcgtgctacagtaatcttgttagtaaactcttaaaccctctgtggttaccacataaaagaagagaaagaaatcccttctccttacatcatcaaatatcagataccaaaagagtggagtagaaagtctgggtgggcagcgtgggacggagcagaactccgagaggaagtatgtgtgagtgtgcgagtgtgtgtgtgtgtgtgtgtcagagacggtttctgaggcctggtaatgaaaaggctggcgggaggctggcctccagtcctttcgtttgttttttatttttatttttttgagacagagtcttgctctgtcaccctggctggagtgcggtagtgcaatctcgacccactgcaacctcagcccccggagttcaagcaattctcctgtctcagcttcccgagtagctgggattacaggcgcccaccaccacacccagctaatttttgtatttttagtagagacggggtttcaccatgttggccaggctggtcttgaactgctgaccccaggtgatctgcccgcctcggcctcgcaaagtgctgggattacaggcttgagccactgtgcctggcctcc

SEQ ID NO: 128146 - DNA, 1050 bp, Homo sapiens
ggtgcaatcacagctcactgcagccttgacctcccaggctcaagcagtctcccccgacctcagctgggatcacaggtgcgtgacaccatgcccagctaattaaattttttttttggccaggctggtctggaactcctggcttcaagtgatcctcccactttagcctcccaaagtgctgggatttaggcgtgagccattgagcccaactcagtgttaagaacactttttgccctaacattttgagtctaggagaactatataactcaaaagacagtaggtccaagtgtcacagcccctgataaaatttcagaagagctagtgtggtagagttctttataatacaactttataataaccaaagtgtccatagttctgggctaaattttaaggaaaacctcacatatatggtatagtatgttcttaaagccacatctactctgttgtaatcacacatgaaggtttagaaaatgaatttctatgatgtttatattatagaattaccattttcagaagagaaaaactgcagttcataggaaattaagtcttgacatttatttttatttttagcgtgggtgtcttgctatattgccctggcttgcctcaaactcctgggctcaagcaatcctcctgccttagccttttaagtcttgataacattttattgtttgggaggaggggtgaaaccagattcctcaggcacaagccctttttaggcttttctgttccttcatattattctcagacataaggataaacaggtgaagtgttttttttgagacagagtctcgctctgttgcccaggctagagtgcaatggcgtgatctcagctcactgcaacctccgcctcccaggttcaagcgattctcctgcctcagcctcccgagtagctgggattacaggtgctggccaccatgcccagcttttttttatttctttctgagatggagttttgctcttgttgcccaggctggagtgcaatggcacaatctcggtcggctcactcccgggttcaagcgattctcctgcctcagcctcctgagtagctggaat

SEQ ID NO: 128147 - DNA, 4835 bp, Homo sapiens
caatattcagggtgatacactttttcttcccttgcattttagaataggctggtatctcatttgaacgggggagcagacttgatctcaaatgaagctgtgcccaggagccaggcttagcatattgagatttttatagataccttaaaaaataaaatatttaaacctctcttttcttcctttttctatgaaataggttttttctctagtttacaaatgacatgaaaataggttttatttgtgttttatctgctttattttttgatgcttagacaacagttagacttactgagctcctaaaaaaacgaggaagaagtccttatttgtgaaaagcactttatgagtaattgtatagacagtatgtggctgcgtcactgatcatcttgtaagggtgtaacagtcttgtctgtaaagtggctgcagtgccttctgtagtgtgttttatttttggtagggagaggtgaagccttctgaaaaatttgagagcaactacagaggattgtttgtaactgtgtagtattcctgatggacttttttcatcgttagagtcaaggacctagacttttgccactgaaataatattgaccaaaaaaatagtttataaaagggatttgtgaatagaaaattcagtgtgatcatttgttgttaatgtgcaccttaaaagaagattctgtctagctgtcaaattctggttcccgaatatctcacccctgattgtatttgagatctagtagggcatactggggcattttagaagataaaatcccatacaaatgatatatgctatatttatgttggtgttggagaagaaagagcagtatataaagaaataattcaagactgcagcactgtcaacctgaaactttgtaaatatttcctagcttctggtttggtgcggtgacagcactttcatcacaggatgttaccttgtattcaccaggcggagtgcgagctgctgcacatcctcctcagatctcacctgtccccactgtacatccacccgccagctgcttgcaaacctcatctctagctttagttcgaaaccacattgcagggttcaggtgacctctacaaaaaactacctcttcagaatgaggtaatgaatagttatttattttaaaatatgaaaagtcaggagctctagaacatgacgatgatttaagattttaacttttttgtgtacttgtatttgagcactctcattttgtcctaaagggcattatacatttaagcagtaatactgtaaaaaaatgtgttgctcggaatatctgaatgttgttgaaagtggtgccagaaccggtttaggggtacgtttcagaatcttaaccttgagtcaattgcatgaaattaaatagctgtggtatcacttcactaacagtgatgtaattttaattttcagtaggcttggcatgacagtacatcctcataatgagtttgctgcagctttgtcacatgcacaggcattcatagaaagaccacccagctaagagggtagaatgattactctttttgcaagattctcttctttgtccaagttggcattgttagtgctaggaataccagcaccttgagacgagcagattccaaccattaggctataaacaccatagccagagatggaaggtttactgtgagtatgaacagcaaatagcttacaggtcatgagttgaaatggtgtaggtgaggctctagaaaaataccttgacaatttgccaaatgatcttactgtgccttcatgatgcaataaaaaagctaacattttagcagaaatcagtgatttgtgaagagagcagccactctggtttaactcagctgtgttaataatttttagagtgcaatttagactgcataggtaaatgcactaaagagtttatagccaaaatcacatttaacaatgagaaaacacacaggtaaattttcagtgaacaaaattatttttttaaagcacataatccctagtatagtcagatatatttatcacatagagcaactaggttgcaaatatagttcagtgacatttctagagaaactttttctactcccataggctcttcaaagcatggaacttttatacaacagaaatgttgacagaaattgctgtagtttagggttgaagtactgtatgatgggcagcaatcatgtattaacttagaaggggaaattgaaatataggaccgaatttggttttatcagtttccagagtactgctgccaacctagacactgatttttcagagtttgaaatgtaaatttcttcccgggacttgattgcacatgaagctggactgcgttagtcatcctgtcccaaagcgctgtgggggccagggtggaggtctcaaggcatcctttatgacctggccattggatgtaaaagaaaacatattccatgctgtggttcttgtatcttgtttcattcctcaccattgaaagagaaagtccatgtattgtctccagcacatccttgaaatgttatactgggatggattactgatgcccatcggtagttgagccccagaagagggtagtagcatctctgcctcaggtgatgatttgtagcttggccagaggagagcggagtcaccagtatatctgtggtccatgttgctagctctggtaaaattaaaaatactggtaagatgtttgttttattagtacactagacagtaagctctgttttgttgttttcaaataacctattttcacttttgtttgggcaaagacatttaaattgaaattcaattctaatttttgttaattgtggaaagggtaattaacagttcctatcaggtatttttaatgtggaaaaggacagaaacccaactcctaaaatcttaaattaaggtaacagtgctttaaaaaaaaaaaatgcatggggcaattagtcggcaactcaatgagtgactaaagtacttttatttaacatccacaacttcaactgttaagttttattaattactaaatcagctttattaaaatgttgacatttatttagctattttgaataattatagtgacttgacgagtgtgtatgaggacacagccaatgtaagccagtgtatccattttttagaggtgcatttttttttaaagaattctgtagatagaagtgctctgaaaacaactaaaatatgtttattcatggtagtatcaaaaaatgtttgtacaaaccatctgcttctcccggccagccgagttcattctccagcaccgtgaccgctggttctcatgtacagcacatatgcgggagagttggcagaaaatttgtgaagagatgccgcaaaggaagggtctgttgacgggtgggattgggggttttgatgaagttgcttagtcctggttttgttttgaaaattactgcgttgcatttttgtgttaagtttttgaacccacgtgtgttttggtggagtatgagttggaagtcactgcaaactagcataaacaacaaagctcacagagtaggcacagatgtagagaacagagaccaaaatggggtgaggtggcagtaaatctaggatagggaaaaattaatgtgagggtgggaaataaactgtaattacctgaaatcaaatgtaagagtgcaataagtatgctttttattctaagctgtgaacggtttttttaagaatcattccttcctaatacatttgtgtatgttccatagctgattaaaaccagctatatcaacatataatgcctttttattcatgttaatgaccaacgtaagtggctagcctttatgtcttatttatcttcatgttatgttagtttacatacaggggtgtatgtctctgtgctgtccccttctcctgccttcattttaaaatgcatccatgggtcctccgtgtttcctttggccatgccacatatatagactcagtttggccttcatgatatcgcctgatttttgaggactgtatcacagtgatatgtatttgtggtaatctcatttgttggttgtacatctgatcctttcctcaacatggcaattgctgcctttcctaagataggatcatacaactgatcaggggattgaatttgatcattcatcaacatgtgtctctgaattttattcagtagttgtcattgctctttggtttagaccaagaaaaaggaaatccccccttttcatgtattccttggtttgaggacatgactcctgtaagggagaggaaagggagatgcttcctgtttgaactgcagtgaattcacggttcctgtttcaccactccaaaccttatggcgactcacacacacattcctcttttctgttactgccaaaggttcgggtttagtacacttcagttccactcaagcattgaaaaggttctcgtggagtctggggcgtgcccagtgaaaagatggggactttttaattgtccacagacctctctatacctgctttgcaaaaattacaatggagtaactatttttaaagcttatttttcaattcataaaaaagacatttattttcagtcaaatggatgatgtctccctcttttcccctattctcaatgtttgcttgaatcttttattattttttttaattctcccccatacccacttcctgatactttggttctctttcctgctcaggtcccttcatttgtactttggagtttttctcatgtaaatttgtataacagaaaatattgttcagtttggatagaaagcatggagaataaaaaaagatagctgaaattcagattgaagaaatttatttctgtgtaaagttatttaaaaactgtattatataaaaggcaaaaaaagttctatgtacttgatgtgaatatgcgaatactgctataataaagattgactgcatggagaagtcttcatcaa

SEQ ID NO: 128148 - DNA, 2333 bp, Homo sapiens
cttgctatttaattgatagagctgaaccatattctgtatactatatatgttgtgttcttccatgggtttcagccgtttttgcttttaaattagcaatgctgttgctagacttgaaatatataactagttacttttcagtgaagctcaaatgaggcttttctgtgtctctaggttatttgagatgacttttttaaaattagctcttgtcctccctctacaggagaatttgcagccttcaagtagccaccatcatggcagcatctgctcttatttcttaagtcttgtgttcgtacaatttgttaacatcaaaacacagttctgttcctcaaatctttttttaaagatacaaaatttccaatgcataagctgatgtggaacagaatggaatttcccatccaacaaaagaggaaagaatgttttaggaaccagaattctctgctgccagtgtttcttcaacaaaaataccacgagcatacaagtctgcccagtcccaggaagaaagaggagagaccctgaattctgaccttttgatggtcaggcatgatggaaagaaactgctgctacagcttgggagatttgctatggaaagtctgccagtcaactttgcccttctaaccaccagatcaatttgtggctgatcatctgatggggcagtttcaatcaccaagcatcgttctctttcctgttctggaattttgttttggagctctttcccctagtgaccaccagttagtttctgagggatggaacaaaaatgcagcttgccctttctatgtggtgcgtgttcaggccttgacagattttatcaaaaggaaactattttatttaaatggaggctgagtggtgagtagatgtgtcttggtatggaggaaaagggcatgctgcatcttcttcctgacctccggggtctctggccttttgtttccttgctcactgaggggtctgtctaaccaagcaggctagatagtgctggcacacattgccttctttctcattgggtccagcaatgaagataagtgtttgggttttttttttttcctccacaatgtagcaaattctcaggaaatacagtttatatcttcctcctatgctcttccagtcaccaactacttatgcggctactttgtccagggcacaaaatgccgtggcagtatctaactaaacccccacaaaactgcttaataacagttttgaatgtgagaaatttagataatttaaatataaggtacaggttttaatttctgagtttcttcttttctatttttattaaaaagaaaataattttcagatttaattgaattggaaaaaaacaatacttcccaccagaattatatatcctgaaaattgtatttttgttatataaacaacttttaagaaagatcattatccttttctctacctaaatatgaggagtcttagcataatgacaaatatttataatttttcaattaatggtacttgctggatccacactaacatctttgctaataatctcattgtttcttccaactgattcctaacactatatcccacatcttctttctagtcttttatctagaatatgcaacctaaaataaaaatggtggcgtctccattcattctccttcttccttttttcccaagcctggtcttcaaaaggttgggcaatttggcagctgaattcccagacagagaatagagcaattttagggatattaggactgagggagggtgtgggaaagctgtcatcagttgtttttatagaaagaactggcattcattaagaacctaaatcttatctttgcacaaatggaaaatataacctagttatagcttcctttggcctttattaaagggtaatatcaatcacagtcatagcaaagaaagcggatgtattaatggcaaattaatggaaaacctcccttatcaggaatctagactcagaatttaggaacacaaatcaaatcagaccaaccaagctatagccaaggacttgaaagaaattaaacaagacccagaataaatcaaggaattagaaattgttatttaaaaatttcagattgtaactccaggccctgctgtctatattgcagccactaaaagctcactaccattagatttttgctaacatacatgtattcagaagaaagcctattgaaattttcattgtcttgtaaaaggttgtcctagtaaaatggaaaagatccttaagttattaatcagtttgaaaagcaaatttgtttttaagttttacatcagcagggcagtgtcttacaaaattcagaaattgcaaaggtggaaataattcacgctgatttgaagaacatcttctgtgcaataatactgcctctctt

SEQ ID NO: 128149 - DNA, 1025 bp, Homo sapiens
ttagtcagccataccactatttttcttttttttttgagacggagtcttgctctgttacccaggctggagtgcagtggtgcgatctcggctcactgcaagccctgcctcctgggctcatgccattctcctgcctcatcctccccagcagctgggactacaggcacatgaagccacgcccggctaatttttttgtatttttagtagagacagggtttcactgtgttagttaggatggtctctatctcctgacctcatgatccgcccgccttggcctcccaaagtgctgggattacacgcatgagccaccatgcccggccagccatatcactatttttcaatagcagcttctgatgaggatccaagcaatcacttatatgaatatactgtttaatccaggaataacctatctaatttctgattgctatcagattccaactggttgctagataacactggcacatcccaacaacagattgctaatgactggatgattgaatcctcagctttgtaagctgatagtattagtgactgactgagtgcctgatgcctcacggaacagtttgtacacatctgcatccaattctcatgataaccctatgaggcagatgctatcatctatattatatagatgaggaagccagggtttagagtggtcaagtaacttgcctgagatcatatacagaaaattgcagagaaggaatgcaaacccaggtgctgactccaagacccagcagtccctaaacaactttcaacaattaacactttgttttcccaatctgaatacaactactaatgaactgcagatagtctattatctctttctatgcatgaattccttttaacaagcaattaactaaggtattgtgagtccaaagatcaagaaagggtaaaagaattattgcctcatatttaaagttaagaggattggggaatctagcactgatttaaaaaaaaaaaaaggctaaattaaattactaagaccttagagtaaaacatttggagtataatcataggaggctattatg

SEQ ID NO: 128150 - DNA, 1385 bp, Homo sapiens
tgtcttttatttccttgaagcaataaactaagtttctttttataaattttgagtgcaggtgaccaaaaatattgctgaggagtggcacgtttgacatgagtaaaatgtcttaacttcggatttttagcgggaaaatgttataaattggagtttcttttaaatagctttttttaaaatacattaaggatgtctcgctcatgtagaagtcaaattttgttgcaaacgcattgctcccttcacacccaatctctcccctgcaaaaaatcttcacagaattctgtgagaacttttaggtgtgtttttctttgagatacctctggttgccaaacaccaggtaatagattttttaaagttgttattagattattcttacctctcatgatgcatattttagcaatcaccttatcattgtgtctcatgttctgtcctccttatattctttgcccagcaagattctacttatgatgaatgaatgctcttctccttttttcattcaatggtatgaagtatttgttagggttctttagtacttacactttgttgtgtagaaaatgactgtaatgtggtggtcagtgtattcttactgtgattcagagggaatcaaaagtagaaagcaacagcacgtggtcctatcaaagatttggccatctctgcttcactgtcagcctcttaactatatcttcacttactcaatttggttttgtcatgatttttaaatgtagccaatagatcaaggttcttccagtaaacacatatctgcataaatgcctccttgaagtcaataaagaaggaaattgagaagactttaaattaatgataatttagtttttaagtacccacaaataaatttttgaaacattttctttatttgaatacttagatgtcatccaggaaaatcactcaataataattacggcaaatctttaacccctcatttgggtagcttaagataagtaatgccattatgaatcagaattgattcatgactttagttaagaaaatgaaaaggaacatttcacgtatttttaaaaatgatactaaggaataaagaagtacaactattggaaaatatctaagtatatgatttttaaatcctccagtggcattaaatatatgattattagtaattgttagatagggttttattcattcacaaatagaagactagcaagcatgtaactaacaaagtttttacaaaattgactttgtggaatgctccaaatgtttggccattttgaggcacaaggtcaggggtctctttattgatagagctccttctataatttcccagcatacctgcctcacagttatcttcctttcattgttcactctctttttcttctcaatgccatcctgcctaggctcccatcatctgcatctgacac

SEQ ID NO: 128151 - DNA, 1110 bp, Homo sapiens
gttaccctgtgagtgggaaaatggactggataaagagagaccaaaagcaggggagcaattagagaacctttgccacagtccaaggatcatgaagatttgagcttgcactccttttgtgggtttcccaccatctatgatgtggcattggttttttaaaactttttattgaggtgtaatacatacatcgtaagctgtaaatgtacagcttattgtgttttcaatgagtgtgaagtatatttttcaacttatctacaaggttgaattatttcccttttttttctctctccagataatttttatggtgggacgaggatacctgtctccagatctcagtaaggtacggagtaactgtccaaaagccatgaagagattaatggcagagtgcctcaaaaagaaaagagatgagagaccactctttccccaagtaagtaaaagcttcatgctatccaaaagaacagactaacattcatagacagatttctgagcacttttttgggcacacagtgtgtatttcatgagtttggattctatgtgcagactccagacaagaaaacacattaagatggcttcatgagggttgagcagtggcacacctagaaattttgggtcctaatacaaaatattcagaaagactttgcatttgtccatcagttctcagacttctcagtctttgaactcttttacacatttaaaaattatcgaagacccccccccccacaaagagcttttgtttatataagttttaattccttattagaaattaaaactattttttaaaatattaatgaattaaacatagtaaaccaatatgttaaataatatttagaaaaaaacagttctattatctaagagaaaaaaattagtgaggagttgtattgttttactttttttgcaaatccctttgcaaaaagaagacagctggattctccgcttttgcactcacattgcaatatctcacatcatgtcacccctaaaaactctacttaacgcttgtaaaataatgacagtaaaaaaggcaaatgatatcttattgttattacaaaaatagttttgacctcgtggatcccctggtggtccacggaccacattttgtgaaccactgctttattt

SEQ ID NO: 128152 - DNA, 1097 bp, Homo sapiens
ttagaatctctgaatctgttcgaatctaaaggcttttaaagaattaaaatcttggccaggcacagtggctcacacttgtaatcccagaactatgggaggccgaggcaggcggatcacctgaggtcgggagttcaagactagcctgaccaacatggagaaaccccgtctctactaaaaatacaaaatgagccaggcacaagcctgtaatcccagctacttgggaggctaaggcagaagaatcacttgaacccgggaggcagaggttgcagtgggccaagatcacaccattgcactccagcctgggcaacaagagcaaaattccgtctcaaaaaaaaaaaaaaagaattaaaatcttgtgaagagtaaaccatggcaaagattgtgaacattcagtgagaaacaaaggcttattctcttcccacaccactggtctctttgcaatttcttcagcaggccaagcgtgttccttctttaggacctttatgtttgttatattctctttaggatacacatgccacaaatatccttgtgtctcggttcatatgtccccttttaatagaaatccttgctcaccttatataactaacatgtccccacgtcactctgtcactctctatacccataggcttgattttctttataacgcatagctccatctgacttgtttcttgtcttttatccccactagaatgcaggctgtatgagagcaggggctttttttcattattttatgcctaatgcctagaatgggacctggcatactcagtacataactgttaaatgaaaatgattacacacaactgcatattattgatagatttacctttcagaagaaagagatgccaaatccttctcacatcacagctgagaaatgtggctgggcatgttggctcacacctgtaatcccagcactttggaaggccaaggtgggaggattgcttgagcctaagagttcaagaccagccaggaaacatagggagaccctcgtctctgtaaaaaataaaaaatttagcaaggtgtggtggcacttgcctgtagtcctagctactcactaggctgagttgggaggatcacttgagcccaggagtgtgaggatg

SEQ ID NO: 128153 - DNA, 1022 bp, Homo sapiens
ctttttagtatgatggataatgttgcactaaacatctttgtgcatatcactttttcttctgaattatttccttaagaaaagttcccagaagtagaattacagaatcaaaggatatgaacatttttatctctcttaatgtgcaccagtataattttttttaaggattgatgaagccattttttaaaaatttatttatttccaaagttcaggggtacatgtgcaggatgtgcagggttgttacgtaggtcaacatgtgccacagcggtttgccacacagattatcccattacctcggtatgaagcacagcatccattagttattctttctgttgctcttcctccttttaccatccaccctccaacaggccccagtatgtgttgtttcccccatgtgtccacttgttcttatcattcagctcccacttataagtgagaaaacacagtatttggttttctgctcctgcattagattgttgaggataatggaagccattggttttgaatggcctgaaatggacatcaacatttgattaggactaataattgtttcattataggtttacattggcaagtgcttcaaaatttagattgtattatgttcactagataattccaaattgttttgtgtaatagttataagatgtattgttttaattaataaaataattcttttaacgttagtggaaaattcagtgttatcgctactctctgattatatgcttgcttggaataaatatacattactatttatttgtaggacttgattagagaccaaggatttcgtggtgatggaggtaagtagtgatttcaggtttttttaaaaactcaaggaaactgcaattgctttgctgcttatttcctttatacttgcctctttcaagtaacagacacagagaaaaatgtgtagagaaacccaaaatttttttgtttttctgtagtgtttgtcatttacctctaataaaatgttaactagtttataacatgagtagaaaagatgactggacataaaaggaagtcttttt

SEQ ID NO: 128154 - DNA, 1114 bp, Homo sapiens
gactgctttatcagtgaccaagtcctatagttatcatacacagcactaaaaatcttatcggctgggtgcagtggctcacacctgtaatcccagcactttgggaggccaaggcaggcggatcgcctgaggtcaggagttcaagaccagcctggccaacatgatgaaaccccatctctaccaaaaataaaaaattagccgggcatggtggcaggcgcctgtaatcctagctactcgggaggccgaggcaggagaatcgctggaacccaggaggcgaaggttgcagtgagctaagatcgtgccattgcactccagcctgggtgacaagagcaagacttcatctcaaaatcttatcacctgtatcacttagttggcaatcaattgagcagcaaactttggcatctcttttattatattcttatgcaattattcttaaattatttgattttcacttacttccaatgtgtgcatcttacttcccatgagattgtaagctctcaagaatggaaagttaatgacatcactaggatttttatatttgttagtagccatataactcctgtcaccttcttttcaggtacgtatttgatttttctgtagaaaatgttgaagactttatatgatacattaaacatgatagaaatacatctttaaagaatttactttgttttagcctgtaaacaaaaagttgtctatttgcagagactattcagagatatttggggccattcaatccctcatatttaagttaaactaaataaacagactaatgcaagttctacccatcaaggcccaaattgcattaccagtagcgactgtccccactaccatcgttgttataaagagctaaatatatatatagttttttttttgttttttttctgtgatggagtctcactctgtcacccaggctggagtgcagtggtgcaatctcagctcactgcaacctccgcctcacaggttcaagcaattctcctgcctcagcctcctgagtatctaggattacagtcgcgtgccaccatgcctgtctaatttttgtatttttagtagagatggtgtttcaccatgttgaccaggctggtctcaaactcctaacctcgtgatccaccagcctcag

SEQ ID NO: 128155 - DNA, 1107 bp, Homo sapiens
gggtggaacgcttgacccagaagttagagaccagcctaggcaacatagtgagaccccatctctaccaaaagtaaaacaaattagccatgcatggtgaggcatgcctgtagtcccagctactctggagggtgaggtgggaggattgcttgagcccaggaggtcaaggctgcagtgagctatgtttgcaccactgcactccagcctgagcaacagagtgagaccctgtctcaaaagaaaagaatttcaatttgtgctatcataagcttggcattatgaccaacaaaaacttgattttttctgtgtttattttaaaattagcatataattgaaactataaattttattaaatattaatataaaagaaaaacttataaattttaattttgtaattttaggtaaatttgcaaatcagactttcttcccactttttactaagaaattttctctatttttattgggttcattttaagtgacttttttctagtactagttttccttaactagcaaggttcacctctatctagcaagacctaaaaacaaaggaagaaaggggaaaaggagaatgtgatataagaaatcaaaccatatgtccaggttagggttgttctcagtctgtccaaaattgcaaccttcatctttactttgaaaactatcatccttttagactattccctttttctctgattgttaccactgttccctggtatgttgggcttcatttagagtgtcatctttgtatcttgccttttcatcctctctcgtaaccagtcacagggtatcaccttttcatgtgcatctcaaactggtttttacttattaccgctgccatttgggcccatattttttcacttgaattatatactacattaatctcctaaatagattttctgccattgatttctctctatctatttccattccttctgcaactgtcagaatttttttacacttctagcatcatctgttctcttgttccaaaacttttagtgacttactgttgattacaaggtaaagtgcaaactctttagcatttttattcatgttcaagcacttatgattccattaaaaagatttactaataactgtgggctatgcattgtgttaggc

SEQ ID NO: 128156 - DNA, 1013 bp, Homo sapiens
cctaaagcaaaaataaagacagctctgtcagaaaccaaaagtttctcaataatcagaaaaaataaaaaggacctagatggaacatgctaattttcctaaaggcttgtttcttacctataattctcattgagccgataccaatttttttttagtacataatattttattatttgcatatcaattctaagtggattcatttcattaatataaacacatgaagtcaaaacttctttccttatctttaataatatgcttcaaagaagtaaaattgtgaactggtgtggttcagattctgacatgttttattcagagactgactttcactgttaggcttccttggctcttcaaacctttattcattcctttcctactatatttttttcccattcctcacgtctcacaaaagtgtctttttattccctcaacattgtctttctagctgtgtcttagtaaccactaataattagtttgcataaaatagggtggaatgataaccaatatgtgaagagagcttattggcacttagccattcattggtcctgatggagttaagtgagacagcttacctcatctatcaagtgacactcatttccccactcctaggataccctttctgaggggctacatccttccaagtgtttacaatctagtctcaaaactttagtgttctctgtgagtgccaggttcattttagggtgagatatcatagactatgttatttagctaccataccgaaataggtatgtaacatattttggtgattttccaaatagcatacaaatgtaacattttggtggttttccaaatagcagttttcaaaaatatttgctttagtggttaatatatgattctcttgtgtctctgttatcaataatgggcatgataaaaaatccagaatatgagagatattggcactctgaggatcatcttctgaatttgaaaaggatttttcaatattgttctggattttcattcaactcctgtaaaggaacaagtacatcattcaggtcctg

SEQ ID NO: 128157 - DNA, 2175 bp, Homo sapiens
atatgacttccacttatgaagaagcattgatatgtgagacaatggcaaacaatgtaaaaatagtatataattataatctacaatttatgatggagtatattgaagtatgtgatgaggacataaatgtattcatgtttacagaaggaagaatagtgaggaaaaagagagtgctcaggaaaacttaatgaagaaggtggtatttgaactagactttaaagaattactacaatctgaacgggcctagggaatagaagcatggtgaaaggggaatggagaaacaacagatataaagggaataaacagatataaagggaatgaagatgttaggtttagaagctagtgaagaaaggtttatctaacttaagaactaccatgtgtaaaaccagattatggagagtcttggaattgaggccagaatttagacttaaaggtctttaagcagattactaacttgatgaaaatggctttaaagaaaaaatcaattagcagtgaaatacagatggattgacagaaaatttagggtgaagaaggccaacctaggatgttgttggtagtgaaaactgagagaggcagtgaagacaagttcaagtgctagaagtatggaaaagggatagatattcataaagcgtaaaagaaaaaaatgaacagtattattaatcagttgaggataaagctgagaagtgactttaaaaataatgcaaaggcagccgggtgcggtggttcacgcatgtaatcccagcactttgggaggctgaggcgggcagatcacgaggtcaggagttcgagaccagcctggccaacatggtgaaaccctgtctctactaaagatacaaaaaaaaaaaaattagctgggcatgatggcacacacctgtaatcccagctactcaggaggctgaggcaggagaatcacttgaacctgggaggtggaggttgcagtgagctgagatcgcaccattgcactccagcctgggtgacaggtgagattctgtctcaaaaaaataaaaataatgcaaaggcgtcatttaagcttcatagtaggaaataaaaaggaagacacaataaagatgagttaagtgggtatcagtttactttggaacatttctcgaactcctggcctcaggtgatcttcctgcctcagcctcccaaactgctagaattacaggcgtgagacactgcacctaattagctttggaacatttctgacacaggtctgtgtactctttcacattgaatttggggcagcgttatttaggctgcgtctggaagcacatgctttaaaaaaaaaaaaaaaaaaaaaggccgggcgcggtggctcactcctgtaatcccagcactttgggaggccgaggcaggcggatcacgaggtcgggagatcatgaccatcctggctaacacagtgaaaccccgtctctactaaaaatacaaaaacaaaattagccgggcgtggtggcgggtgcctgtagtcccagctactcaggagtcaggaggatggcgtgaacccaggaggtggagcttgtagcgggccgagatcacgtcactgcattccagcctgggtgacagagcaagactccgtctcaaaaaaaagaaaaaaaaagtccccatacagcattctgtcctagaatattcctgagatgttaagattagaaatatttattgtcagttttaaccctacttcctcccactcttcacagtgtaatgccatttcttcagatttctacctagagaaatcttttcaaaatcagttgacattttcagtacaactttgtaatttttacaaagccaacctttctggtgatctcatgggttagaaaattttgcaaaagaattttgtcttaagcagtgagtatacttacctatttggaacactggaaaatgcagccgttgtgttctcttgtcaggttgtagcagttatctcttctagtggagtcattttattcccgttggctctatcactacttgtgtgcagctgtgttttttttagatggtcaaatcaaaatgttattatttggttggtttttaattaatcttttggttataatattttctcctgacagattctgtagaccatgatgcctttctaatggcaggtcccagttctgtgagcagttataaaacaccctaatgaaattagcttggcctctctgaaggtttataatggtaatgatccaggacatt

SEQ ID NO: 128158 - DNA, 1828 bp, Homo sapiens
ctattgggtgcctttgtaactttaatatatgcctttcttgttccgtcaacaccagtcggcatttcttaacctcccttctttgtatgataattaaagtataggcttcttcctttcacctctgtttcctcctccttttcatgtctacttttacttttatgttgtcaagcttgaaatcagttgccagccttttactcatttctcattttttaacttctgggtttttaagttagatagtggggtgggaaataaatatgtgtagtccatctattatcttgaacccccggttttcattttataatagtactttagtatgtgagtttcatgatataaatatattacaactttgttattttaaacaagagagtagatacgtcagtttctagaaagttttcttgtgagtttttgaaatctctgtgattttttactttgcaggtacgaaaaacgtttttcaccttagcattttgtgacttttgtcgaaagctgcttttccagggtttccgctgtcaaacatgtggttataaatttcaccagcgttgtagtacagaagttccactgatgtgtgttaattatgaccaacttgagtaagtaatccaaaaatatctcttttctacctaccattttacacttaaattttcttaatgtgaagctacgatgtctaaaagtctgtgagggtttttcttccatacgattgttatagagaattttttttaagtgtagttagagaataatatgtggaatggacagtatttctctcccaaattgtaatgctggttcagctatacagttaatttatattttatattatcgtttaattaatcaagacccctaacccatagaaaccatttttggatagtttctaggaggagagggagagttgtttcaattaaattaagcattatgattttgtaccacagatcaggtagtctgattctgttagctattttgtaaattacgtttatattcttcctctctctccttcatccccattcagctcccttcccccaatttatttgagtaagatgtaaaatttttgtatccagtatatatctctttctaaaatttctctttgctgtatgccagtttttctaatagattagactgagtctattatctctttttgtgtcattggtgctgctgctgttaaagtcttacttttcttgatcacctgagcaaataaaacttaactctgtactttaagtaaattataatgtcacctaatttacagtagatactttttattctcattctttaaccataaagcatgattttcatcttgtagtatgtagaaatttgctgaactgaatgattagttttaagttataagcatgcctttgaaagtgcaatacaattttttttaaaataagcctttagacaaaaatacaactaattgaattttaacagttgtttctgagaatggaatttgatctcagtttttttggttaactatgtattttggtatatgaagcttctgggttttgcacaagttaggtttgttttgttttgcctcacagtttgctgtttgtctccaagttctttgaacaccacccaataccacaggaagaggcgtccttagcagagactgccctaacatctggatcatccccttccgcacccgcctcggactctattgggtatggtttgacttctgctcttgggcgacatgctacttgaaccgctttcttttggatctcctggttaattagaaacctttccaatgtttaaattgttaaattaaggactttttccccaaataacttatcataccactcagatatttacatgcatttgatacaaataaatgggattaaagctgacatagactatttca

SEQ ID NO: 128159 - DNA, 2121 bp, Homo sapiens
ctttgaagttttcttaggatctttaccaaaacctagggaattgaaagtgtactttaggaaaaagtattaaaataatactaagttagcctgaagaaatactgtaggccatatgaggagttaaataattgtatatgactgtagggtttgttactttgatcaaatgattttatttggaatttgagattcttacaatttttgaaccattcagagtgtgatttatttggataatagactcttacccccctcccatttttaatacaaactcatagtttcacaaaaggtatatcaaaattaacattttatattgacctacttttctttcagaaagtgtctaacattgttccaagaccctcacattttgaatcctctttaaaaaaaaaaaaattattttgggggcatgttgtccctgtcccttgagtactctttttccttgaatggatagataagtccgtacctgtgattttttttttttttttttttttttttggaccccaggaacaatccattttctgctgttgtaggtcttttctggagctgacttgaagaaaagagtacatctctttaccctgctgtttgtccaagagtgatacatttatttggggtaaacttaaaattaatttattgccatttaaatttctaacgatggaatattagggagccaaacctccctcactgttactagcccctcgataaccaattttcatatcttcagcatgaggtatatgaatatttttaggtgtaataaccaagaaaggcttgtgtctacatttttcagagagaagaaaccaattggttgggacactgatatttcctggcttactggagaagaattgcatgtggaagtgttggagaatgttccacttacaacacacaactttgtatgtatctttacatttttttttgaaatgtcaaaaatgtttagattttaatgaatgaatttttatttagggaatgtgaaatatggatgagtaattttggaactgacattttacctgagttgaaatcagttgttttctttaaaaacttgtatttaaacaagagtttaattttaatctttatactttctttttaatttaaaaaagtaaaatgtatgcattgttaaaagataattttgaatagtgcagaagtatgtcaagtaaaaaaagtgaaaataccctcctagaggccaacatttgtttagattaacagattattgttctgtcttccaaacttttttctgtgtacacaaacgtgtgcttgtacctgtaagcctaaagttttttcctttctttttttctctctttccttcattactttcttttcttttccctttcttaaatcaaagtagagccatgctatgtgatattctttgccttatttttttttaattcaacaggatgtcacggacatcttttcatgtcagtatacctggctttattttagtatgactatgtaataattcgtaagaataggaattcattatatttaaccatttctctattgatagacatttaagtttttgtattataaaaaatctgttacatacagggctaaacaaggtctttctgcatatatcttgacacacttgtacacacccttgtgtttctgaaggataggttaatggaaatagaatggctggatattaaactctccatgaggcttttttctttgtctggtttttgcatttgctagaacctagcataagcctaagggtcaccagcataaggcccggaatgtgggacctttccaccttagagatgaggatctacatagaacttgagaacttatcccctaaaatggcaggcagaagccaaaagttgtctctgaatcaggaatacatttcttacttttctctatgtatggaattttggccagagttttttctaggtggataattactgctaccctttaggcgtcaagtgttttcccatgtgtcttggtgattaatccagctgggctcttaaagcagatgattgattagattatttcctttggggtttatgctttcaagcctccattagtagtgaataatgaaatcatgtttgtgtttctgtaaggcattttttgggagaagtgtaagatacacctaatgtcaatcaaattttactgtgcagcaaataattttttaacatgttgaatttt

SEQ ID NO: 128160 - DNA, 1050 bp, Homo sapiens
gatcacttgtgcccaggagttaaaagctacattgtgctatgtgcaccattgcactccagcctgggtgaaagagcaagaccctgtccacccccacaaaaagtcagatgtacacttagcatatcacacagcccttctactcctcggtatttacccaagagaaaagggagcatatgttcgtagaaagatttgtatacgaatgttcttagttgctttgtcatagccccaaactggaaataacccaaatgtccataaacaggtgaatggttggattgtggtgtatctataaaagggaatactactcagtagaaaggaatgaactgctaatgcacacaacatagatgaatctcaaagtaattatgctgagtgaaagaagtcagacaaaaaatgattacacgttttaaaattcagtttacataaaattctagaaaatgcaaactcttctatagtgacaacagatttgtatttgcctgggcacaggactatggcaggatggaagatttacataggagcacaaggaacctttcagaaagtgatgggtatgttcattatcttgaatgtgatgatggttgcatgggtatatacgtaatctcaaaatgtatcaaattgtgtactctaaatcattgcagtttattgtatgtcagttgtacctagataaatctgtttgtttgttttttaatagcctttaagaaagctgatagtactgtggaaatattatatgaaatagactttgggagaaagaattattattaaaatttttttttcaacttttattttagattcaggaggtacatgcacagctttgttatctgggtatattgcatgatgctgaggtttgatgtacaaatgatcccatcatccaagtactgagcatagtagccaatagtttttcaacctttgccctccccgctctagtagcctccggtttctgttattgctgtctttatgtccatgagtacccaaagtttagctcctacttagaaatgagaacatttgatatttggttttctcttcctgtgttaatttgcttaggataatggcttccagctgcat

SEQ ID NO: 128161 - DNA, 1092 bp, Homo sapiens
acatgatttggaaggtaaatataagtggaccagaaaattggaaatactgtgcttttttattattcatggaccatctagatatcacatatgtataggtcaaatttatcaggtgtaatatagtgtagtgtctaataacaaagaatttatcaatttaaaggtgaaagtattcatttatagtatttctggcacttattttgtaatttgaaacttaaaaccctatcaactggtgaaaagattataatcaaaggctaaaattttatattctcttttgttaatgtcaggacaaagtccggattgaatataagtctgctttattttataggcctatgaagaatacaccagcaagctagatgcactccaacaaagagaacaacagttattggaatctctggggaacggaactgatttttctgtttctagctctgcatcaatggataccgttacatcttcttcctcttctagcctttcagtgctaccttcatctctttcagtttttcaaaatcccacagatgtggcacggagcaaccccaagtcaccacaaaaacctatcgttagagtcttcctgcccaacaaacagaggacagtggtgagtcagttttaatatcaccattttgctgtttctttgtatttttcagacagatcagttgttgaaaattaatatattattacttcatactcagaggtcatgcaaatagaggcatccatgtcatacaggaatgaaaaatatgtaattatttggtggcaaagtctatattccttaactgaaataaatggtattgtctctagtgttggatttgacatttaaacctgtctgccaaacttgaaccacagtcatgtctaagcactagtttaaaataaatcaggattttaagacttgagcttgttcattatctaatgtgtgtcaggtaagactcattcttcacccttgagaaatctcctttctgagttatattatcagatgttgaacgttcagtgtgattgatatgtttcccctcatctacttcatttttggttgttgaatattagtattaaccattggaacagcgtaccctgtaagtaacatttgaagcatttaaagagaaatctgtggaa

SEQ ID NO: 128162 - DNA, 1027 bp, Homo sapiens
ccaaaatttgtatctggcaagctagttgataaaataacaagaattagcctgaaaatcttaagatatcaccaatggcattgttgtagttgtgagccgcaaagtatgtgaaggaagacaacaatggccaaatcttagcaactgtttgagagattaatgttgaccttgaacagattaatgtaatgagatagacatttaagaagttgggataagtatgtgtgccccaggggtgcgtgaggttctaaatcgagatcatttcatcatttttattgcttttgtaaagactgtgatgcttctccgggtcttaaaggtagaatggaaataaatgcttttagaggtgagaggtttagagaaatctatggcagtgttaaaagagtaattgaagttcatattgaatgcagcaagggcagtaggtaaaatgagccaggggccttggtagattgcagctttgaggatagggacagatggaataagtagatgttttgtacttaacaaaaggaaaagctattgatagatgtggtgaagtgatagtttataatctgtcatggagggatcagtatactttcaaaaattaaagctaacattttggtaaggaaatatgtttggaaaattgttcttttcattacttttcctaaggtttattttgtctagtaactgtacttgctcaggtgacagtaaataagaatattttatccatgcaggaggaacctttgtgttccagactgcatttatgtgatcttcaaagagtaggaattgtgtttgtcttatgtgtggttgtagtctgagccctaacagtgccaagcacatgtatcagtatatatttactgagtgattgaaggctcaataaataaattttattgagagaagtatgcttaagtaattaggccttggtactgaaagctaaaccaaattgtagctcagaaaatttggaatctatctgtttataatgccctcatctactatgaaacagggtctgggtagggcaactagcaggctgtaaacaaagaagaccttttgatgaagtttaaat

SEQ ID NO: 128163 - DNA, 1185 bp, Homo sapiens
gaagactgagtatgttaaaaatgttagtatttctcaaattgatagtggatttattgaaatccaaatgcaaattcctgtaggtttttctatggaacctaacaacctgattcaacaatttctgtggaagctttaaagaggcaagaatagccaaaatatactttaaaaacaataaggtaggaagacttctttaattcctttttccactcggcaaatttttaatgctctatggtaggcactgctcatcctggttattacctttgtgaatgtgagatctggctcccacccaaagctcacattcagatccacttgtagtggtatctagggttttgaatagaacacttcctgaaatacaggttaagtactgggactaccaacaaacaaacttacaacactaattttattatctcatatttgtatttacaatttttcttgatcatattttttcatacaaactttaattagtttctattaatttcttttaacataggaagcttagaaatagacacactttgcttataatagatctttaatattatgtcagttggactatggctttgttagaaaaggagaggagaatctactgctgagtgctgtccaaagagcagttacccaactgagcagagagggaggatgaccttgagggtctcacaggcatgggtttttaggcccagcctgtggagcgtctgagggacttataaaaggaaaagggacccaggtgcagtggctcatggctgtaatctcagcactttgggaggccaaggcggttggatcacttgaggccaggagttcgagaccagcctggccaacatggtgaaaccccgtctctactaaaaataccaaaattagctggctgtgatggtgcacgcctgtaatcccaggtactcgggaggttgaggcccaagaatcacttgaatccgggaggtgaaggttgtggtgagctgagattgtgccattgcattctagcctgggcaacagagcaagactcagtcttaaaaacaaacaaacaagcaaacagaaaacaacagaaagaggagatgaataacaaaatggcaggtaatactaaataatatggatgaattttatattcttacatatgggtaggtggagggacacctgctcttgtggcagattagttgggaaaggatacacttgctggaacaatgcctaccatattaaataaatgaa

SEQ ID NO: 128164 - DNA, 1195 bp, Homo sapiens
ctgcttttcttttaaaaaaattttcttcatcttttctgtatcaaatacttactggtttttctatgtagaataacataatctcatcattactttctttcaaacactctccaaatttgacttgtctttgctcatgtttttcctaccacctgaaatacagatttcctcccccatcccaccctccaaaccttccagacttacctcacctaccgtttattgtaggaagcttttcttaacctctttccaagtcctagtttgatgcctctgctttgtgcttttgtagaatcccagagtttaccttgttttactcactatatcgtattgtggggtttttttgttaataggtatttctttttcctctagacctgcactgttcagtcatactttctgtgatgatggaaatgttcagtgtcgtcttaatatggtagacagtagccgtatctatgtggctactgtgcacttcaaatttgcatagcaggactgaggaactaaattttatttcattttaattaatttaaaaataactagcctgatggctagtggctgctttaatcagtgcagttctagaccccttcaaagtcaagagtgtgtgggattcatacttattctctcgttgcttaacaataatactgtctaatacttaaatgactgaattctttttcggtactcttagtctgcatagttataactcacctagaatatggcagttttgttctctagatttctgtctttaaccatggcttttcagtttgttttcaagattatgttgatttacacagcactgagttcttcagtcctgcgaagttagcgttttggttggatgtggtggctggcatctgtaatcccagcaatatgggaggctgaggcgggacgactgcttgaagccaggactttgagatcagcctgggcaacatagcgagcccctgtctctacaaaaaattagctgagtgtggtggcatccacatgtagtcccagctacttgggaggctgagggcgggaggattgcttgaacccagttcacggctgcagtgagctatgatcacaccactgcactcctgcctgggtgacagagcaggagtcaccctctcaaaaaaaaagtgtattttttcccctttaggactgaaaaaattgggtgttacaagattacctcaaggactggtctgagaactggggatggtaaggaagaaactcaagtggc

SEQ ID NO: 128165 - DNA, 1276 bp, Homo sapiens
ctgtggttggccgggcgcagtggctcacgcctgtaatcccagcactttgaaaggccctggcgggtggatcatgaggtcaggagattgagaccatcctggccaacatggtgaaaccccgtctctactaaatatacaaaaaattagctgggcctggtggcatgtgcctgtaatcccagctactctggaggctgaggcaagagaatcgcttcaatcagggagtcggaggttgcagtgagccaagatcgcgccactgcactccagcctggctacagagcgagactctgtctcacaaaaaaaaaaaaaaaaaaaaaaaaaaaaaagctgtgattaacatttgctttgtcattcatccaaaactacattggtgacttttgtattgagtcatttcttagggcaacaggtattcatgtattcagtaaatatttgagtgcctactatatgccaggtagtgatctaggtgcttagtagtacacttgaaaacaaaacaaaggtctctacccttatgtagctgctgtccagtggaggggtgtgtgtgtattgggggatggggctgagaaaccttagacatacagaaaggaaattatgtagtatgttcaaaggtaataagtgctgtggagcaatgaaagttaaacagtttagggctgggatgggggtaggtagcaatttaaatagggaggtcagggtaggcctcacttgagaagggggtatttgaacaaaaatttgagaaaggaggaggaggcatttcagataaaccaattagttcaaagattctgtgtcgggaatgtgccttgcctatttaagaaacagcaggaggccaaagttgctggggcaaggtagagactaggggattagggaaggatctctttcagttatctaggccatattggtgatagcagaaatactgagaagtagtcagattttggatgttttgaaagtagattcatcggggcttggtggctcacgcctgtaatcccagcactttgggaggccgaggcgggcagatcacccgaggtgaggagttcgagaccagcctgaccaacatggtgaaaccctgtctctactaaaaatacaaaaattaggtgaaatattgaaggagatgttttgattgaagtgattttaagagagaagaggaggggaagtaaagatggtgaggaattatcctgtaaaggggaacagagaaatggggccagagctagtgaggaaagtggggtcaataaatttttaatgataagaaaaagaagagcgtatgatgataggaatgagccattagagagta

SEQ ID NO: 128166 - DNA, 1033 bp, Homo sapiens
tataggtcaaaattcagtaataaccattgggtaggcatttctgttaaatttgtggtttgaagagctggctttaatttaaaaaaaattgtaaatattattaatgagttatacagtaattcaggtttcataaaatggtgggtaaccctttcactggaaaactgtctcttgttatatatatatttatttaaaaacctgtaggaacccagtggtctatttcaaactgaaggtggcatttcttctccttgggtcagcagagttgttaacatttcaaagaaggacatttgtgctcctctgccagcagcatgcctgtatcagcttttattacacatatctttagtggtgtggtggctggctgggtgcttgtagatcaataagctgctaaaaagggagctgcatcagagaccataatggcttcttcataggagatagattgtctccaggtagtgaagtgcatttaggaataacaacaagaatatccctgcattgagatccttattatttagaagaaagaaatagatcctttcaaggtgatgagtcctagaatgtactttgttaatttttagagacggagtcttgctctgtctcccaggctggagtgcagcagcgtgatctcggctcactgaaacctctgcctcccaggctcaagtgattctcctgcctcaacctcctgagtagctgagactacgggcatgtgccaccatgcctggctaatttttgtatttttagtagagacaaggtttcaccatgttggccagactggcctcgaactcctgacctcaagtgatccacccacctcagcctcccaaagtgctgggattataagtgtgagctaccacaccccacctaatgtactttaacatgctaaagatacattccaggaggtcttgtgtccactgttatagctgaattccatacaaattcagcttctgttaatggaagaattcccagaccgagaaagacaggattagttcccttggcctcaaatatttcttgattatagtaattcttggttaccctaccaatttaaaaaaat

SEQ ID NO: 128167 - DNA, 1038 bp, Homo sapiens
aagcctggctaatttttgtatttttagtagaggtggggtttcaccatgtggccaggctggctttgaacttctgacctcaagtggtgtgcctgcctcaacctcccaaagtgctgagattacagggtgagccaccatgcctggccagcaaacagcatattttaagcagatttagtgaagaatgcaaaggtatagatatttgaaataatcatttatacatagatagtgaacactgaatgatttttttagtgttgtgaaattactgattattagaattacaaggaaaccatgggaaatcaaatcccagctaatcctttaattttacagactaagacatttgtaactcagattggggaagtgactttccctgggtttttaggttattagtgaccgtaactactgaaaccttatttttttctgaatataatactctttgatagatacaatagtacacattttcctttgtacaacacccttttaatgaaaaccaagtaaatataacaaatgcatcatttttaatatgtgagtctttggttcctgaaactcaaaatgtgaaattcacaaaattataatttgcagacgtattgctgtggtcagtaatctattccgaaatgtaaaatttcagaatgttatcattagagtgagataggcgagtcagtgtgacaatcagaaaaaacctgcattgcagtattttaccctgacttttatgggtgcaattatattaatgctgcaatgctggtttttggaattctcaccaaccagtgagacccagtggaggaagctggactgggacaggacttgggtttctgtgtttgctttgttgccggtgatgggacctgggcacatgtttcagctctttggttctgttactcatgtgaaaaatgacaatttggactagatggaatttaagaccaagtccaaggctaagattctaatttttatatcagtgatagaaattgcacaggttttcattctattgctgttattaacaaggattaggtttggctgcatttgacaggaaacccccaaataagtggctta

SEQ ID NO: 128168 - DNA, 1032 bp, Homo sapiens
gtttcaagaagtatattgtggctgcgtgtccagatgattgtcactaaatactcctggcctgaaatgatagagcaggtgccaatggatgagatagcattcaccgggctgtttcccctacaagatttatccattactagagacactaagcagcacatggggatggagagctaatgttcaaagaggattcccatgtgctggcattgagctaagcataccacatatttaatttcaatgttatatttgccttagagacactagtcatcagggttattaatttccttttcaaggtagacatgtgaggactaaaatgtagaaatatacaatagctgcttatttcccacaatgtattggtctaatatagtcccttcttaggagcctaaaagggatgttcaagattgataagtcctgtggattaaccattgaaatctaacttaagttatgggggtcgtaataggattcagaatctaagaaggaagaaattattgacatagcagcttgaattcaaattaactccatttaaccaaagttgctgtgtttctttttgtgccagtgaataccgaggccacagagggctctttagggagctctagttcaggggtggaggagggtgggggatggggagagacattcataatacaagtaattacaaggcaatgtgataattacaatatagtagaattgctttaagcaagtaagataatttggaaattttttagcaagaaggaaaattattttagtgtaaattgcacagatactcttcagggaaacctggtagaactcttttgactgcacacactgtagatacctggaattcaaagagattacctagggaggcatcgctggaaacatgtcacgaggcattggcaaagacagagaggagaggataatgccaagctttgtggggtcttctttgagccctgcgtgtctccaggttcttattcccaaactgtagtgctgtagggttctgcaaaatctagtgtgcagcctatgctgtgaactggggtgacagatctatttttaactgataaaagc

SEQ ID NO: 128169 - DNA, 1053 bp, Homo sapiens
ttctcttctgagaatcctctcctgcaaactctctcatttctgcaaatagtgctcatacgctttcacttgtccttaagctcaaatgcagccacatcgtatacataagccagctcccctgatggaactccacaggaattgggaatgcctatagatttttcagcggaaatagaggcaagagaattggcatgctgtgagtcgatcttcatccaaaccttttccaaatccatattcttttcgttgtgtaagtttgtccagtgaatttcattatggtccgtgatagaaatgttattgtgtggagacagatgtaaatccacttctgttatataaacaagtacttttggacctcactctggaaccaccgtcagactggaaaagggtttggaagtagggatgggagtagtagagtttgggaaatgatgcgatttttttttttcctgaattccaaccaaacctgtaaatttttaagatttctacaaacttaggaaaagcctgtttagcttaggcctatcacaactttttatttttgttcaaatttgtttctgaggggatgagtctgaataagaatcaggttgcttccagatcccagacagctactgaggaccagcagcaaatgtgtccattttttgttgatagttcatctctatggagccatgcttattttagttcacataaaaatgtattaccaaatatctattacttcttgagtaaaatgaaattgaaaaatacttacagagtaatgacccatttccccatgtggatgcaagtggcaaatcttttcattcatgatttcagcatgtatttatcaggttcagtacgatgtttctgagactacgaaagggtatttggagtaacgtccatcctctagggggttgtaacataggtagagagacaagaagatcttcaataaaatgatttaaaagtaatttggctaaatatgtaagacactttgtagcctatatgctaagaattcaaaataagtatttttttaaggggtagagaaaccagagatggcttcctggaggaggcggatcaagaactggatcatgtagagtt

SEQ ID NO: 128170 - DNA, 1107 bp, Homo sapiens
tgcagattaccctgtgagtcacccttcacctccttcaggtctttactcaaatgttaccttctcagtgggactgccttccatgcagcagttacattataaaatgcatatatctgcttacattctaggttcccaaagcccattgcctctctgatcagagtccatttcttctgcaaccccaggggacaatcacatagaacctccctcctcatctatatgggttttataagggacacaagagaagttgctggaagtgtctatgttcccatatagaatgtcagtttaattattttaaaattatgagcaaaacctcagagaactgctttgaaaatgcagagaactgctttgaaaactatgtgtagttctgaggatgtcttccgtaaatataagaacttggtgattagagttactattagagccagacttggaacccaaatgattagatgacttccacacatctgagccgtccaggcttgtgagaagactggaggcagcggtgatgaggaatggggtggggtgatgaaaactaaaagggatggaaaaaaggagagggaaatggcttagtgattaagagtattggttttagtgtcaagacagcctggagtccaccgctggctcagacacttagtagctgtgtgactttgggcaaattatttaatctctctgaaccttggtcactttatataaaaatagagttaattgggccttcccctcaggacttcaatgatgaaatgagatcttgcatatgaaatacctcttgcagttcacagcatattggaagtgctctggaaacaggaactctggtattcttgttgctgtggtgcaagctctgagaataggcagaggccagagcaaatggtgagagaaaggttacagatgagatgaagtctatgagatgtgatcctcggacccaaataaacaacaacaacagcaaacaacaacaacaacaaatcctgaggaccagtatggagccacagttggaagtgtacttgcagaaggttgggtttccctgggaaatacactacgagactgagatttgaatgcagggggcttctcaggggatgctcttgggaacgatgcctggaaggagtgaaggaagcaggactgctc

SEQ ID NO: 128171 - DNA, 1050 bp, Homo sapiens
ttgtcctgcaggcccagtacatagaagatacttgacacacattttatttatgaaagatggaacaaacaagagaatgaaaggatgagtgtgcagagggcaaatatcaaccttattgtctgaccattaggaattcacaaacctaggctgttgagtccttctgaaggaaattataccctaaattcataggttactctttcaatttctacaacatttattttgaaatactcatgaatttccttacccgctctatgttctctatacttattcttagacaacctaactcctagttcaaagagaatataaaaaacatgggcagttaccccagagtgcatattgatgttctgtctctctgtctcagtggctgaagctgccatcctcctgttcagcccctctgactctcatcccattgtttcacctcccattggttgtccatttcctcacttgtatctttagtctcagactttcagtttctctctcccctatttgtcagaatcttgctcatacatcttcactcaagtctgcattcccatgtgtttggtgacctgttctcatcttccattgacaccgtcctcagaagtgtacctcacacttgcagtcctacctccattttagaataagcttagtaaaatggcttgtatcccatcatctgattgaacctgctcttgatgaggtcattaatggcctcttagttgttaaattaaagggatacttttcatgccacatttgattttcttggcccatatccttttaggtatctttagatatcttcctgctttgtttgtgccttgaatgttggtgtccctcatgttccattctcattctacacactctgtaagggatcacaaccacacagttgttttcaggtatgatatatggattttggagtcatcatatttttgtagcccaggtactgcttctcttgacattttgtatgaatagaaaacaaatattttttggtaacagatttgtgaaaaattgcatattttaatttctttttatctgaccccttttgattactgctcttagtttgtcttttggtatcagatatta

SEQ ID NO: 128172 - DNA, 1029 bp, Homo sapiens
tttttactgtatttataattttttttctccattgagaattccacccccttctttttctcccttcccccaagtttcaaagaaaaaaaagtctgtgatatttttcccctctgcataatttcccctcagcaggttgcagcagttgacaagagcagcagggactgctctcaactggagaagagcaattgcagaggagaaaatgaccctgtttgctgaaagtaaagacagtttaaggattgctcattcctcttcaactgcttttaccaagctttccagcttccctggggaagattatgttccaggttgttcggtttatcatgtcagcagtttacctgcaatagtctgtcactcatttctggtccttttagtagcaaagagtctgctaataaaaagtagcataagaaaggaggcagtggagtataaaagttgtctctggagttggactgaactgacgcttcctagcagtgtgaccctgtgctctctaagccttaggttcttcatctgtaaaatggggataataataatatctcaatgggtcactgaaggattgattaagtgatataactggaaagctgttagcatcctgtctgctagatttaagggttgaataaatgctagtaattgtgagtaaacttgatataatacatactcagccctgtggaagttaaaaccaagtgctgctggtgactgggttgtgagtgacttgagagactgccagtgggaagggagatgtggatctgccaggtggtctaaggtctgagccttttatttatttcgcctttcatatgtaacaagacagcttggaaaagtatagtttcaagactgacccaacataactacaaaagaggcctgccatacatggttaaaagcagcaagccgtgtcggaagccttttccatctgatttgggctcagattattcctgcatcactggggaccttgtcctcgctcttcccagctctggtctgtctccgcatgattttggctggtgagctttggcacaactccccaactaactcccttggctgagcagt

SEQ ID NO: 128173 - DNA, 1075 bp, Homo sapiens
taatacatgagcatgggtgccaaaggcagggggtgtctctgctttgagttttgctgcttactagctatgtggcctttatcaagttacttaaccacctgaacctctgagcctcagtttccttataagtgtaatgggaataattacacctgtttggcaggttagttgcaaggattaaataggtgtgtcaagtgcctggtactgtgctcagcttatagttatccctcaataaatgctagttattattattactaggtagttgactgggcatatgattgaaggagaggaaggtagtagaaatgattttttggcttcaagactaggataattggtgatatagaaataagaaagttgccagggagaattggtttaaggaggagattttatattctgttttagatacgttgagtttgaaaccccgacaggctatgggggggggaaatgtgttggatgccggggtaaattatgcataagccacacttgactagactcatagatttacttttggtgcagattatggtttcaataatggtttgtgctccgtttttcagtatctttggggtttctgacaaagcagatgtcttaccttgacatcagttcagattagactctgactttgcagtcaatggtctggggcctggcggcttcatccacagctgaaggtagggaggtttttttccccctcatggcttttcctcattcagattctgctgacatttgaagaaagcagtttgttttgctttttagccatttcaaagtttatctttttctctctgtgcacaggctgatgctgaaattggggtattaatgggtgctatttaaagaagctcatttatgggcaattaaataacatgcctgtcagcccagatttgatagggaataggggaacatttttaaatttttattttaagtacaatgaagtttaattatatttcctttctttcaactcttttgttagattatccagaaagcagatttcttcttttaaaaaaaaaatctatatatttattttgcttcctcccctctctcttgggagtggtgggctgagatgggcagccagtatatttaatttatattc

SEQ ID NO: 128174 - DNA, 1032 bp, Homo sapiens
atagtgataaatcataaattgaggtgacgtaagtgtggcatttgccagtacatatggtggaacagtggacagcactttcttgattgcgtttttgtcatttgagaatgtctgtagagaacagaagagaagcagagtattgagggggaaaatgccatgttgagaagcaggagacttcagttctaggcctaagccttttagtaacttctgtccaagtgggcaaatcaccaggccagatgcttttacagactaggtcaattagttattttctgggagctctaaggagatgacagcatcctgcttaagtgaacataccagaatcacttggcacttagagacctgagcttatagaattacatgtgctctgtgtgtgtgcccaaatgagaattattgctgtattgaactttgttactaatgggatattgtcatatatttgtttcaggggtttcagggtgtgtagagaggttgacaagcattggactagataatttctaaggactcttccaatctgaaaaactaagatttccaggaaatggaaattgggcttagatgccttttacaaaggcctttttttttttttttttttttttttttttgggcctggctgcttctagggctttcaaactttcacagaaaataaaaataattatagtaaaaacagggattttagacctgaaaattgctgtaaatatttggaagccatggttaaacagtgggtaaattcatatctctggggtgaatcacaatctcatgtaatgaggtaaaacatattttggcaaaaggctgctgggaggattgactttattgagacacaagatgctgcagccctgtttgtgttggttcattcctcattccttggaatagctattttgtcaatttaaatgctgaattaaacaatgaacttgctaactatgaacttgacttcctcccttctttccttaatgcttccccacttcttggaacaaaaatgctcttggcttgctttctattaatattaaatatgttgatcgttgccttgttaaatataccactaac

SEQ ID NO: 128175 - DNA, 1118 bp, Homo sapiens
gcatgcccggctaatttttatatttttagtagagacggggtctcaccatgttggccaggctggtcacgaactcctgacctcaagtgatctgcccaccttgtcctcccaaagtgctaagattacaggtgtgagccactgtgccctgcggttcttaggtttcagatttcagattcacagcgtccatacttccctgtggatggtgttctcttagtgaagccgcctgctttgtgaacttcaggggttgttttgcagcctggctatggaatcactgagcagcagcctttgacagcaactctggcaaaaagcaaagcttgcttattgtttttcattcactgtaaatgtcaaatcacccagaagagcctgttgccttttgaattcctgtgaaaatgcaaaatttaaagttttcaatgttataaaaaaagtctagaaagagaatataagcaaaataaccttttttcaagtttttctataaattggttattgttcatcttttctgggtatttgatttcttaacttttgttaaccacattgaagttactatcttagcagtgccagcaatgtgcattagcacaagctcttagatgaagattctggagccccggaggtgactggagccatttaaaatgcttttatggtagaaacctattttagagaccttgacgttaaataggtgatcacattctgacagaatgctttcatttttggaagccaaaattttgcctcatgacaaaattctccatttatgatttattgtctgacagtgatataaaaaacaagtgatttagataagacagtagcagaagaaacttaatatcaaatttacttgtggcaaatgacctaatttccactgggtaagaaaaatgcaggatatgtatattagttttctgttgttaccttaacaaattaccacaaatttagtggttcaacacaccacaaatttcttgtcttgcattctgtgaattagaggcccaaagcagctctcactgggctaagacaaagtgtggcaagggctatgttccttctggaggctctaggggagaatccttttgcttttccagcttctagaggccaccacattccttgactctcttcagagccttcttccatcttcgcagctg

SEQ ID NO: 128176 - DNA, 1034 bp, Homo sapiens
tgtttgtttctggattggtcccaagaacacagaactggactggtagaagctctgggaatttgtttgtgtctgcagttgtctttgtagatttgtctaacccctgaatcatccctgatctgaataacccccaaggatatcagttcagagcaagtgttacctctaaaagtcaaatcttcttaaaattgttgattcatatttttaaagctcatctccaagttcaactgatccatatcatgtacactgttatattccatgagattttacttaaatattcatttatatggctaattatagctggattataatatttgtcctttcaaatataagacagcatttttgcccccccactgcaaaaatgtgcattataccttgcagatgaaattctgagactgagttgcctttttgttttatatcatttgagcttatgatgtcagaaataccaaaatagaaacatgaaaatcaaaagtggcaaatgtgtgaagcatttagtaataaaaataggtggcagacctcatgtttgtttctgaaatgttttaatggatgacagtgagaatagatactataaattaattcctctctttagcgattgttacaatagatactataaattaattcctctctttagcagttgttacagtatatactataattcctctttttagcgattgttatctagctgttctaaacctgtgttttacgaatttgattacttctttgtttaaatgtattatctttcatatggctctaagttgttttggaaatcaattcaaataaactttaatattaaattaaaggtgatccccgtcccaagccaatcattagcgactggaaaatcttcctggagtacagtggtgtgatgttggctcactgcaacctctgcctcctgggttcaagcgattctcctgcctcagcctcttgagtagctgggactacaggcacacaccaccatgtccagctaatttttgtatttttagtagagataggggttctccatgttggccaggatggtctccatctcaacctcgtgttccacc

SEQ ID NO: 128177 - DNA, 1051 bp, Homo sapiens
tagagtgagactctgtctcaaaaaaaaaaaaaaaaaaaaaaaaaaaaagaaagaagaaagaaaattagtaaatatgtattaaattggattctataagatctaagtcaagtgacattaaggtaataagaacaacaacaagaaagatagtttgggctgaattgtaagtggtaggcataatgttgtctggagtaaaacacagggtctctgaagtcagtttttctagtcatttcttgagaggcagtgagtgtgacttcacagacaggaggacacatcctgctttatttctttgtaattcagtggtttaattcagattgtctaaacagactattctgcctaactgaatcatatctgctgggctttgttagagccgcttccctcccccataaacgcaccagtcataatgcctattgatcatttttgtttaatatcaatactaaatcatgccaacaaatcaacaagccctaatataacacagtcaaaatacctaagataagtaaattgtcagtggtggcccgtggctgaagataacagagaactcagcctgggtctgggagtttgaggaatctggtctgtttactgttttgccacttactagctctatgatattgtgggagttaattcacttcttaaatccccagtttactcatctgtaaaatcagaaaggcaatagtacatactttaaaaattattatgtggaatagggacctttggtattaaatgagataatgcttattaggcactatttccatttcataataagcacacaatgtaagaaatataaactgctgaaattgttactcttgactatgggttaggttcagaacagtcttcacttcgctatcccatccttcccagaagctcttgtacctctccttcgacctacttcagtgtaactcttctattcctttagagacctaataaattaacaacctgctaatttctgatgaaacttatggcaatttgtttaagcaataaccagttattttgagttcctgcttctaagaggtatctacatttttaaaattaataagcaaatttttcagagcaattt

SEQ ID NO: 128178 - DNA, 1930 bp, Homo sapiens
caatttctaatattgtacacttccaggaaatcatagaagttaaaaaggatcatttagtctagtttaccatgcaatgttgaaccctcttttccaacttttctgtcatgattttccagttgtttgcccccgggggtaggagaaaggggaagaaaactaacatatttgagtacctgtaatgtggcaggtatgagagacccaagtatggttatgtgagactgatgtttgtttcttcaatgattggtgaaactcacagctaaaaccatctggatctggagctttccttgaggggagattttcttgtgtgtgtgtgtgtgtgtgtgtgtgtgtgtgtgtgtgtatgtagagacaggagctcactatgttgccaaggctggtcttgaactcctggactcaagtgatcccccccaccttggcttcccaaagtactgggattataggtgtaagctaccatgcccagccttttttaccttttttaaatttttaatgtacattaaatttctttaacagttctagaagtactcaggtttcattcttcacttaatttttgtaaggtaaattcttcaaggaatttgtttcatctaaattttcaaattaattgacatcaggttgttcataatatcttctatttaacttttaaatttctatagcatatgtaatgtctcattttcattctcaatattgtttatttgtaccctctctttttcccctcagtaatcttgtgagaggtttgtcaatttagcccttgccaagaaccgttttttggcttattgatcctctcatttatatgtttcattcatttctgatctttttttattgtttcattcattctactttttaaaaaaatttttctgctgtgctttttctgacattttaacttcattgcttatttcatttttaccttcctttcttattgtatgtatttaagctacagatccactctactgcttcagctgcatcctatactttttgatgcataatatttttattatttatttttaaatattttcaaattttccttgtgatttttcttgatctatgtgtttttgaatttccaaatctaaagtttttctgattgtctttgttaatgatttcagacttaattgcattttggccaaaaaatgtagtctataaaattctagtattttaaagtttgttgaaatttgttttatggtctaacatgtgctctgttttcataaatgttgtatctatgcctaaaaatagtatatatcagttattgggcactatattctatatatgttcattaagtcaagtctgttaattgtgtgggttcaaatcttctatgtccttactgattttttcttctgttttaactatataaattctcaagagggggtattagaaatctcccactgtaattgtggatttgtctatttcactacatagatttgtccatttttgcattttgtattttgagacttaggtcattagatgcactaaagtttcagattatttcatttttcttacatttcgaccctgtcatagaataactatttttagcacaaatactgccttttgtgatagtctatcttatctagtactattggtaatttatactagcttgcttatttttagtttttgcctggtatcatttttatatccctttatttttatcttttttctctcctgagattttagatgtattgttgataaaagcatgaaagcaggatattgtaaagcccattttctcatcttttgacttgactgtttaattcattccaacattctataccagttatctattgctacagaacaaaaggcctcactgtttttctgcttatgattccattggtcagtagtctcgcctgggctcatagtggcatggctgaggaagggtggtcttcgatggctttactcacgtctccaagttgatgctggctgtcccctggctcatgttgtctccactatgtat

SEQ ID NO: 128179 - DNA, 2458 bp, Homo sapiens
agttagtgcagactccaaggggttaagggctgagtttcacaagactgtccacacttcaggcgccagtctcacatcttggggaaatggtcacctgttcttctgacctgccaactacaaatccagggttctcccaacctcccctcaggttcggtaactcaaactcaggaaagcactttacttagtttaccagtatattataaaggatactactcgggaacaacaaatggaaagatacataggtcaaggtatgggggcagagggattggcatagagcttctatgccctctgtaggtgtgcctcctctcaacacttcagtgttgaggtatttgcttccagcctggaagctcctcacactccattgcttaggaaggttcccttaagcaggcatgatcaattaaatcattggccattggtgagttaactcaatctcaggcccctcgctcctccctggaggttaggggtggggctaaaagttccaaccctctaatcaccttgctgatctttctggtgaccagctcccatcttgaagctattcaggggcccaccaatcacctcattagcacaaactggcaagattgagagggccttgccatgaataacaaaagacatttttatcgctcaggaaattccaggggttttaggaactctttgccaggaaccaaggacagagaccagacatacatatgtatatatatgtacgtatgtatgggtttttttttgttttttttttttcctgagacagagtcttgctctgtcgcccaggctggagtgcagtggtgcaatctcagttcactgcaacctccacctcccaggttcaagcgattctcctgcctcagcttcctgagtagctaggattacaggcgtgcatcaccatgcctggataatttttgtatttttagtagagacggggtttcaccatgttggccaggctggtcttgatctcctgacctcgtgatccacctgccttggcctcccaaagtgctgggattacaggcgtgagccaccgcacctggcccagatatatatatatttttattatgccataggtgcttaagcccatctgaaatccagacatttaatttttgtctattagtatgtatagtgtgatatcagttggagggagtgtttcctattttaatattagttgcattatgtctattgaaatttagtgtttggttttagaagtatacatattattggtggcttaaatggttcattgaagtctatgtatgtatctgaaatcaaatggtatcaataaaaatggtaagtcttaggcattgttttgtgactactttgaatcctacctgtatttctttatgtatggtcataacaaaacaataataacctccttttatttagtgcaataccagttatgaacagttaccttaccagttgctttacatactgctttacaactggtttactgagaagttatcattattccctccctcaacacacataatttcagtgatgaggaaattaagatccatagaatttaaggtcactcagctaaaaagtagcagagttgagatttaatccaggtctcttgggctctgacatctgtgctcttgtcattacatctgcttcttcctatttgcatgtacacttgacttcctataaaggatgtaatagaatctgcacttgactggaaatgatgcccttgactagctagctgtgtaagagacaaattattgggtttgaattttattttcaaagtatggagctgactagatggtttctgaggtccctctggctctaaaagtgtaaaactgtaacgactatacataattgctttgatagctatttttttcatgtctatcagttatgtaaaatttacgaagacagtcaatgtaaaactttaaagaagatatcccacatttttaaacctttaaccttgtggctctaggttgataaactcaccaaaggcttccttggtatttcagacagattatgagggacaagccaagaaactcctggaactgatggaaaacacggatgtgatcattgttgcaggaggagatgggacactgcaggaggtatgactgtttttctctttgaagctattttgaaggtgagaaaaatggaaattaaatcctagagcaatggtatgttgtaatttaaagaaattttttattttaattcattattttaggattgttgctctctaaagctagtatagctttaaatttttctcctgcacttccatttcattgctttttgtaaaccctctacccagcacatagaaggatttttgtattatcatatttaagtttgataatattgaatataacagaagaaaaaatgatggtggatgggataatcttgttatattttgaagactcttatgaagtagccctgtttgtaatggaatcatagtttccatcaacaggtatgtttcttataaaataaacagatattcagctatccattctcatgtcatttccattacatataatat

SEQ ID NO: 128180 - DNA, 1003 bp, Homo sapiens
ctcagaaaccatctagtcagctccatactttgaaaataaaattcaaacccaataatttgtctcttacacagctagctagtcaagggcatcatttccagtcaagtgcagattctattacatcctttataggaagtcaagtgtacatgcaaataggaagaagcagatgtaatgacaagagcacagatgtcagagcccaagagacctggattaaatctcaactctgctactttttagctgagtgaccttaaattctatggatcttaatttcctcatcactgaaattatgtgtgttgagggagggaataatgataacttctcagtaaaccagttgtaaagcagtatgtaaagcaactggtaaggtaactgttcataactggtattgcactaaataaaaggaggttattattgttttgttatgaccatacataaagaaatacaggtaggattcaaagtagtcacaaaacaatgcctaagacttaccatttttattgataccatttgatttcagatacatacatagacttcaatgaaccatttaagccaccaataatatgtatacttctaaaaccaaacactaaatttcaatagacataatgcaactaatattaaaataggaaacactccctccaactgatatcacactatacatactaatagacaaaaattaaatgtctggatttcagatgggcttaagcacctatggcataataaaaatatatatatatctgggccaggtgcggtggctcacgcctgtaatcccagcactttgggaggccaaggcaggtggatcacgaggtcaggagatcaagaccagcctggccaacatggtgaaaccccgtctctactaaaaatacaaaaattatccaggcatggtgatgcacgcctgtaatcctagctactcaggaagctgaggcaggagaatcgcttgaacctgggaggtggaggttgcagtgaactgagattgcaccactgcactccagcctgggcgacagagcaagactct

SEQ ID NO: 128181 - DNA, 2295 bp, Homo sapiens
catggtggaattatgagaatttttttttgtatttaggtatttttcagtttttacagaatactatccttcttcatatttgtcaataagaacgatttgttaagtgcacactctctgagtgtagcaaagtgcttttttcctgtatatgtacttcatagtggtaaactagggttttctgtataattgatgtgtacatcatatttatacccattttatagaacttaaaacatatttttagtaatacaacttggagtttttataattattttatcttagcctttattgtattattgatcataggtcaaaaataaaatctaatttagctctgattctattggagaatactatatgttttaagatccagtgcatcttttaacagagcttctaagaagaaaacaggagtaagtttatggtctatgaaaattgaatccaattcttttattgtaaaggaaatacatattatttataacaatgttttattattacatttgtaggttgttactggtgttcttcgacgaacagatgaggtgagcattaaagagtaattgcattttaacttttatttttctgttcttttttattgcttttctttcttttactttttttttccattgtatattttaaaacgggtacaaattgtgctttcttgaattttagaaaagaaaatactgctacccatgtcatagaacacgtatattaacacatggggacttttctggtttggtaattgatggtatccaataactttgacaatggttatttaaaattttgttatggaatctttttttcaaagaactttttcataaaagaaattgtggcatattcatatagtgggaatcatctaacagttaaaatgaatgaactaaatgtataaatatctacatggctaaatctcaaaagttttgaataaaaaaaaaagcaggttgcccaggtatgttatgcatttctacagtgttttaaaattcagaaaacaatactatgtatggttaatggatgcttaaatatgtagcaaaagaataataatgtggatgaaaaggaatcacaccaacctcaggataatggtctcctctgggaagggagagaggagaatagttttagaagggactttcattgtatctctatcgttttatttcttgaaacatatgaagcaaaaaggtaaatgttaacatttgttaaatataggttgtgggcacatgggtgtttttgtaacattattttatgcacttttctacaatagctagaagatccttctcagtccctttggtaatagtacattgtgctcagaattgttttgaaccttacagtatctattgtatgtgtggcatttaattaactgctatgccagtaccatctattatttgaacttgtttattctctttgccttatttgtacttaagatagtttataaagcaccttcacctgtcattggtcactgtataaatggtagacatttttagttgaattttatctgcaactttatcaaatagtgtgacaatgttatacagtctctgttgcactagtgcattgatatattatcttcaaaaccctcattatcttaaccaaatttctttcaaacagttgtcattaatgagtactaaaatatttcttccaaattctgagtcattttgttttcattgactgccttgttttagaaattacccacctagctttatttgattactggtctaaggatgtggaaaggagatggggaggcagatacagggtcagttatttgtcatagtggacacacctgtgcttctccattaagcctgattttctgatcataacaataaaactttcctcttctttccccccccaggctaccttcagtaagattcccattggatttatcccactgggagagaccagtagtttgagtcataccctctttgccgaaagtggaaacaaagtccagtaggttgtcaatgtggggaattagcatttgtgggtgagcgagactgggaatgaaaaatttatgtgtatgctataactttcttgagttttgatagcctgaaacttcaaataattaagaggaggacctagatcagagttcagcctttcagttcattgggaagtctcccaacttggttgtgggactcttataataagtctccaggtcaggtagggaggtgaatacttgatgtccttttgtcagttatgaagataatatccctgacctaaaccgtttttgtgcttgtacattgtaagattctttagtgaagacatatttgtgctgctcatttgtttgctttaagtatatgcaatgacaaataacaagtcccttgtgaagactgaact

SEQ ID NO: 128182 - DNA, 1059 bp, Homo sapiens
atcttggctcactgcaacctccacctcccaggttcaagccattctcctgcctcagcctcctgagtaactgggactacaggcgcatgccaccacacccagctaatttttgtatttttagtagagacggagtttcaccatattggtcaggcttgtgttgaactcttggcctcctgatacacccacctcggcctctcaaagtgctgggattacaggcgtgagccaccgcacctggcctgtgcttatatttaaatgtctcttgtctcttttatgtttttctttgaaatatgctgattttgtgaattgatgaaaccagtatcaaatttaccacaggctctgtgtattgatgacacaacccaggaagaaaattctgaaaatcagttcctagaaaacgtggtacaacagtctctgctctggtttctgaggaacccaactaagttggatacattttctcttttttccttatttctgaaaattaatttcagaatatggggaaaaagattatagacaaagccttgtactataagcattatagataaagcctgataccacatttttcttcttttaaagaacaatccaaccctattaaacatatatctgacgattctccatagataaaagaaatagttcttggaaacaataatgccttatatttagctttttagattgttcaatctgtgttcacatttcacttgaatctcccactcagtgaggaagtcgaggtgagattcgtatcctcatttgacaggttagggaaaaaaagaatcctttgattatgacgagttgtgctggagatgtaactagaatttagattttctttctcatagtctgttggtttttccacttaagtgctttgtccaggtggcatcatagttggcaccattccatgatttttgaagggcagtttttcccatatagacatctatgatgcctgataacttgactttaaagtaattactgggaaggtttatagaattctttgtagctttttctttttgttttttcaactagattcttaagaccctgccaacccagaaccaaataaggcatagaggggagttc

SEQ ID NO: 128183 - DNA, 1082 bp, Homo sapiens
tatgagaaaatggaacaacaatagaagaaagagactagaaacatttacatgtatatagacatgatgtatggcagaggtttattgaagatcaatgggggaaaatggagatttcaataaatggcgcttggacaactggctttctatttggaaagaacataaaattggagctttacctccatcattcacaaaactcacttataagtgggggtatttcctttttaaagaaaaatggaactatgttgcaaatcttttcacctatttttcccatgtcaatagatagaaaataatacatatataaaatagatatgacttttaataaatgtaccaaaatttattcagtctgattagttcattgcaaatattttactattatacagtgagcatagttgtataagagatcctaattttcacacattctatactcctacagcttctttcatacactgaatgtgctgcttttaataagtgaacattttgagctattacacggcagctacactgcctttattgtattgcatttgcttttatttttataaagaactgtgcaaaaacgaaacaaatgaatttgctgctactagtgataagcggcacagtatcgtatacttttaaataggcacaaagataaaaagcacttggcattgtgagtgtggctaatcttgagcgcactcacatactcactgaactcaatccattcagtggtactcagtcatcagagaaaagaacaatggtaaagaacatgaataaaatactcggaatacatattattaaagacttggtataaaggagatgtataattagacattttatctttctcttttaaattcctctggaacagaatctatttttttttttttagcattcacatatccactttcaccagtgtttttcagatttccattatgtaaaaaaggactgcctacattatatattcatcaggttattccagtaggataaattcctagaaatacagttaatagggcagaaggtatgcatatattttagacactttatgtatactatgccaaattgctgagacaggatgttccaatctatattcccatcagaaacacacaccaccacta

SEQ ID NO: 128184 - DNA, 1115 bp, Homo sapiens
tcttagatatttaattttatcaagtactcttccagcatctattgagataataaagtttcctcatttaatctgtcaaagcaataaaatgaattgatttttgaatgttaatgtgagacttttggccaagatgtagcaaaaagcaccagctttataccttaaacaccttaaaaattggacaaaatctttgaaacaactatatgagacattggtatgagacaagcagcataggacagtgagtccagagagcaagaagttgaacacagtgagcctgatgcttgcccgaggtgactgctggagagaggccacagcctgcggagagggagcccacacagagcccatgccctacctcagttgaggggtctttgagaatttgagaaatcaaggcagctagaattgcaaggcaggatacaagagagccccatggagaggagagccgcacccagaaccaagctagaggtttacggaggtgtcctctggaatcttcagctgagtactgacaggtgcatgcatgtgagaaaccaccacccgagatagaggttgagttacctaccagtgagcaggcgggacagtctcaggagagtcagtcctctcacaaagccaggaatagttcgtgttcaaaccaattagagtagaaaatcctcttcagacatggggcattgggtagtgtcctcagaaaggtattgcctcagtagtgagtcaaaattaattctagactaaaggctgccctcttccctgttaacaaagctaaaggctcacctccaaagaaccacagtttctttctaggtaacttaattgtgcctccagaacaaagctttagaacaggggtcagcaaaggacagcccacaggcccgactatcctgctgcctgtatttgtacagccttgaagctaacaatattttttacatttttaaatcattgaaaaaaatcaaaagaagagtatttttccccgttacgtgtggaaattgtcttcaaatttcagtgtctttaagtcaaattttactggaacacaggcaggctaattcatttgagtatattctctggttgctttcagctactatggctgagttgaatagctgtgagagagacctcatggtctgcaagcctacagtgttcac

SEQ ID NO: 128185 - DNA, 1036 bp, Homo sapiens
ttattgatattactatgtgatgaactgagtatgcatatactgaaatggaaggaaattttaaaactattattctagaagaaatgggcagttttgtaatttggtggtggctgagaccccatagaagttttactatgtaaataatttggagagtgaataaggagattgtgctatgaaatcctgacagcgctctttaggaggcagacttgacagtcctaggaaggttgacataaaaataccaaccttcagtaaagctctagtacaaaaaagggtaaatgtcatcattcttatttttaggcctctttcttgagagaggtgggagtgggaggtagtgttataactggcactttaatttgtttttggaactagaatttaggggcagttggatgaaattgcaaatttagaaggggaataagaattttctagtgctatataaagaaatgatgatggagacaaaagccttgctttcctctttttagaatttattttcgatttttagcatactgtggggcttttagagctaatatgatctaaattcagaaaatttaattttcatagtaggccaggtgtgaattacttatgtttgctatagaatgcttatttagactaacaataaatttactttgctttctaaggccagtcagcgaatgtggggatgaggcaggatgttttaaatgagccagagatgatccacaaagtgaacagtcgacacagaggtctttgagttggatggttgcaaatatattgacattagagtgaaaactccttcctttgggtaaactaaagaaagataaagtatactaaaaaattttaagatggtgttatacaaaaaaaagtttgggtctaacgtgtccacaaagactgtcaagtgaagaatggtggagattcttggtgtttgagcagccaacctggatgagtgacttcagggacagagcagaggaaagcaaaatgaatttcctttatttacccaaaacttgttgactgaatttttgtataggtccgggaaaataagcctaaacaaatagttgtagccttagaa

SEQ ID NO: 128186 - DNA, 1029 bp, Homo sapiens
gtagtattaaaatatgataaaatgattctcagtgttctttttagggaaattccatcctaataaaaacacctttgaacataattgcctttgtatgattttctgtgaatcagactttcgtcagtttgacaaacttccctaaaaagtatctgaaatctgccatcttctcagaatagtcagacacagcttagaccatgggtttcctgtctagctcatgaacatttgtaaaagtgaactaagtgactacaagcaacctcctcccaactagttatttgttataggaggactatatttgttatagtaggactacctccttgtcaaaacttaaaatgcataggagccctgaaattggcgctatcatccatcttacattagtaatcattatatgaatatagtgatgatttttttcctttttaaaatataaatttgtctgaaggtctcttgtcatcactttgacataagagctgtaaatcactctggagtagagatggttggagaatagaaggctatagttggttgatgaaaatcttgactcaacagtttgtgtcatagtttggggtaagccaccgtggcagtttgcagaggcggtgtggcagcggggagtgcctatttttaatcactgctgttccagggccaaccataattagggatgtttcccttgctcagtgaagctatattttgctttttgttcattgattgatggaaattgtaggacactgagaaaataaagatgggctaagagggttttgtcgctttttattcctccctcaattagggcttttccggggctgcataacaaagtgccaaaactgagtggcttaaaacagcagaaacatactgtctcactgttctagaggctggaagcccaaagtcaaggtctcagcagtgtgagttccctctggggctatgcaggagaatccgttccaggactctccctgagctgctggtggatgctggcaatctttggggttccttggcttgtagatgcatcatcccagtctctgtcgtcacgttcacctgctgtttgctgta

SEQ ID NO: 128187 - DNA, 1023 bp, Homo sapiens
aataactttctatttggtaatatttctgataaatgaaacagacaccagaggacaattccacaaatctattcattttttaaaaagtcagaaagaccagcagtagaaagtaaaagccacaaaaaaacaaaacaaaacaaaacaccacatcatgattggccaggtgcagtggctcacgcctgtaatcccagcactttgggaggccacggcaggcagatcacaaggtcaagagatcaagaccatcctggccaacatggtgaaaccctgtctctactaaaaatacaaaaattagccaggtgtagtggtgcgcgcctgtagtcccagctactcaggaggctgaagcaggagaatcacttgaacccaggaggtggagattgcagtgagccaagatcacaccactgcactctagcctggtgacagaaaacaaacaaacaaacaaaaacacatcatgatctaaaatgatcgtgttgtattttaggaagtaacatctctgagctggaaaactcagaaaggttatgaatatgagataacatataatgtggggtgattttaaaacacaaatgatttttaatgacatcggtgctttaatttaaaataatttgacaagaaacaactctccaaatctaagtttatatttttagtgcatttcaaaggtactcactcatttgataattctgtaaaagttttcatagagcgctttattgcataaacacatccatccagcctcttaatgcacttgtagactgtaccaaattcgccaaccccaattttttcaacctccaagaattctttttcatagcgggaagccatgttggtttctcgtaaaacacatctctaaagtattttaataaaaaggaaattagagtaattctaccatgttgtaagcaataaaattaaacagtattacagtcctaagttgctccaagttttcaaaaagacttttgaggtgactgcaatgaattctacttgggtcaatattcatggtagcaagaatctccccaattgctgactatcttctttgttttc

SEQ ID NO: 128188 - DNA, 1318 bp, Homo sapiens
tccgcccgcgcacaaagagaagatcgcggaacttcagagttaaggggagccgtttcccgcagcgctagccggcagtatttccaaggcgcaagttgcggagtttctgtttcctttttcctctggcgagctttgcgttccctgtgcgccggaagtgatcccctgcgtggctgggctgctcgggttagatcgtcaggtgagggaggaagggatagccagcgcgaaggaagtgctggagtcgtgtgttttggctgcgcgtgatcctgcgtgggtcgggaggtgtttctgtgtaggtgtctggccctttcatcagtcgtgcggaggaccgcgtgatttccttccagttctcctcggttttcaggtggtggcgccatcttcggtaaagggtgtccacctctccctatggtgtggctggctagcccgggggtctctacgctgcttggtctttgttaacggagatgaaggcagtaatttttcagtaacaggtttcagatataagtcccttggtgatgctaatatttatggaggccttactatgcattaagaacttttttagaagtttagaaaatggcagtgaataaagcagatacaaatctctgctctaagggagcttgcatagtaatgaaatttgagaagacagtggattggaagtgggattaactcagaatcaaaattttgtcgatgggttggaggaagaggaagttatttgggaccaaaaagacatacaggtgtgagtttatttgggagggaggaaggaatcctcatcagatgtgcaggaatgttggtacgttgtggtcacaaaattggagtgcataaaaattatgaatatagttaggaatttaggactggtgagttgtacttttgccataagaggtaatgtttttttcttattttgtttttttccttcaggaaaagcctaaagattagactgtaagaaaagaaaatagaagccatgtttcgaagacctgtattacaggtagtcacttgtctgtattaatactgagatgtattactatcagccacagtgatcagaagacttctttaggcttttaactacaggggcaaaagacctttgagctcacccacccacctctatactcatttgatatggaggattggggacgattttgccagtgtaaattatgttcactaaaacaaaaaaaaagttcaggtttattcacacgtaataggaatcattaatttttaaaatgtgtgtgtgttgcttgaatttaaccagtgagaggacattaaaggtctttagtgacctaaagactgtaggaatcattgttccaacttttttcttaaggcatgtagttgcttt

SEQ ID NO: 128189 - DNA, 1822 bp, Homo sapiens
gagcatctcaagtctcagtggtcaccagagatttcactatgtagaaaatgccttctcattccacttagtatgggtcctcacttttccagacactagcccaccttgagccagcttagactaccatttttcctcacttaccacattcgggcaccagctcctgtagattcttctttggctctcctactccccatcctcctgtgaagaccaatgaagaaccagttcctccatgactctgtcattttccccaccttaatcctatattcttggatccccactttaacctgtatgtatctttaatctatttttttctgtattgaaatgtgaaacatgaaaaagttattgcttcttaacactaacgttacagtattaaaatgtctttaaataagagttaaaagtttaatttaaaaaattatccaagttaaataatcctttcctaatcttctccagtagatttttgtgtgccccaaatgagacattgttattataaatctctgtgtaagatttatgaggtctagcttgtctgagcactcaaatgacatttccagaatcatgacacaggttctcattagcagtttgattctatagtatgttgtactcatatctttattttcttatctgccctctgctcctaagtttagtgataggattagatagccaacagcaccctggggattggtgtttatttgattggtggacttctgctttttatattaacagtactgccacttcaaaaatgtttctctgatagaatggctagctctctgagctctgaattcagtgatgtgtactcccatctttacaggagctcttgaaattaaggaggcagcagagggcttcgggaaagcagtagcattggtgtcaagggccctgggtccttgagatcacttgccacatacttcctgcaggagcttgggcaggtgatgcagtctctctgaggtgttttctcagccctaaatgggaataattttacataacttgtagatttagttttagaattgataatagataaatcccttagctgatattcagtaatgattgctgctattatgtggtagtgactacctttgctgacagtgatgtgactttgacttggacagtcgagtctttgtgtttaatcaaagaaccaaatttattagaccttttttgatgcactaaaaacaggaaatttcctatgaaatatttataaaaactgtattaggctaagctcactactgaagctgtttaatttttgcaatagccttgtgaagtaggtattatgtatcataatttttgcttattttaaaatgaaacactttagattagtcatattaggtatcctaattccttttaaggtctgaaggagcaaccaggggaaggcagtttcatagacacagggaatctgactttggaatatgttcctgttgctgtgtcagaaagtcattcatgtgattagttttagaatgtattgttttgttggaatgtaacctatctctcgttctctaaaccagcagaccccaacctttttggcactgataactggtttcatggaagacaatttttccatggaggaggggggtgccgtggggatggtttcaagatgaaactgttccacctcagatcatcaggcattagttagattctcataaggagtgcacaccctagatccctcgcatgagcggtttataatggggttctgctcctgtgagaatctaatgccactgctgatctgacaggaggcggatcttggtcagtaatgcttgctcgctgcttgctgctcacctcctgctgtgcagccaggttcctaacaggccacagaactctactagtcctcagccctggaggt

SEQ ID NO: 128190 - DNA, 1022 bp, Homo sapiens
atggattaaatcagtacccatgttggatctaaatttcttaatttctaaagtctactgtaaccaaaatacagtagtaatataccagttgtttatactaaaaaaaaaaattagaggatgtatatattgaatatatgtagtactttttgtctctttttgtctttccagctaatgaaagctggattttgaaaatacttggcagcaactcttaggtacaggttggatttacaaatattatcatactctgtaatgttaaagtgatactattttgatttttccttttgtgtgcaaacacagaagtgccataatcaaggagatgtcgcaaaataaatgggagtactataacttaactttgagcatgccttctagtaccttccttctacctttgggcttctgcattaggctgctcttgaagtgtttgccggggccttctggcactctgttgggagaacatgagaagagcttctcttctcttctggaattttcaggaactactgactatatggtgaatgaacgtgagtaattcttctgtttgcatttgcctttcctaaaaaattaaagccatgttattcatttgttcttctttaggtacttcgtcagtttgtaagacatgagtccgaaacaactaccagtttggttcttgaaagatgtaagtagctaatttccaagtttaaaatgttatttttagtaatttgccaatctcaaatgtgttgtagaagaggtatgctgcttgggttaaccatgttgccattgtgcttttagctcatgtttgctcttcagatcttagccttgacacatcaggctgtggagacatagtataaactgagcccctgttctccttatcagccagttactactcattcttgtcaacactgtcctgcataagaatttccttgagtcatatttggttatctgagtcttcccgggttatgttgtattaggctgagattgtaaaagatattgtttcttcacagaaatattcccttgtgtttataaagattttcagatctcagatttgttctttt

SEQ ID NO: 128191 - DNA, 3386 bp, Homo sapiens
tctctcctgaccttgtgatccgcccgccttggcctcccaaagtgctgggattacaggcgtgagccaccgcgcccagccaggtgtggatttctttaatggtcagcttagaggctgctataaaaaaataccatagaccaggtggcttcaccaacagcatttatttctcacagttctagaggctaaaaatccaagattcgtgtgccagtatgattgagctcttggcgagggctgtcttcctggcttgcagatggttgccttctcaccgtgtcttcatatggtagagacagaaagttctgaactcttcctgttcctatagggacacctcaccctcatgacgtcatctaagcctaattaccttttaaggatcccacttccaaataccattacattgagggttagagcttcaacatacaaattttgggggaaggggcacaactattcagtctatagcaggttgtctcatttggtcttgatgttgtgtttcagccctgaatcgtgtgcacttacttgggcgagtgggtcaggaccctgtcttgagacaggtggaaggaaaaaatccagtcacaatattttctctagcaactaatgagatgtggcgatcaggggatagtgaagtttaccaactgggtgagtacaaaagactggggttttaattttatcagcaataaatagatattatttattgccagttatctaatttagagataaaccactttaaacaagatctgtctttcattctgtttgttctcttagaaatcgtgacattggttttcctgggcatgttgtctgttggcatttgtaaccaatttcctatttttatgatttaggtgatgtcagtcaaaagacaacatggcacagaatatcagtattccggccaggcctcagagacgtggcatatcaatatgtgaaaaaggggtaagttgaagagggaaggatcttatgaattgaatgatttaaagaaccgataagaagtgttctcatggcaaggagtgtgtagtctcttaaatccctgagtactactaatgactgtattaatttaagaggtatttactaagtccttgatactatatgcatggcatgttgccatgtgtgactaatttgaagatatataaaacatagttttagctttctaagaacttacagtttagggcaaacagggtgtgtacataaatagaaatagatgaggcaggagagaaggcaaagtgtatcaagtggcatttgagcaagtcaaacatctgctttgaggaattcctgtgcctctgtggccggggatgctgagggtggcttcttgcctgttggctgccacatggtatttccagcagaggatctggaatgtctgaagcctgacatgccaacttcatcttcgtggcagttattttatatttgatgattttctgtaggcttaatagttcccttttggaaggcttggattgagtatgtataaaaagtatgttttccaaactcatagaaggacaaaacggtgtgtgtaacagcagttgtattgatagttaatatgtttagaaatgtacttgttttgtagaaagaaaacatattttatgaaaaataatttagcaatcactaaaatttttcttttcaataactgtatagcttttcttcctatgtatcttcattgccctttatgtatgtttatgaatatgtgcacatacacacacaaacacatataaggtatttcaagggaagtgtctgcactcccacttactgattgatgggtgtgtgtgtggggtggggagcacctgatgtttcactaatctttctgtgttgtacttttttggtggtggtagactctcaaaactggtactattgtcatctttccactcttgaaaatcacgattaggtttgttatctagtttagcctctagatagtgtagaaatagtcttagtaattacctctaagtggtatactaagctgatacagtgtagaaatagtcttagtaattaactcagggtaatattatactaaactaactacaaatccatattttgaattttaatcatctaagtttctaaggtcatagaaaataattgataaataagtgaaaatcaagtctgttagggactccaaaatcaaaggtcaaggaaaatgatacattggaaattattcctagagatttaaatgttgccactaaatttccctttgaactgttttgttttattttttaacttccgtaagagaaatagctgacagatgaaaacattgtctgttttacctagatgttaccaagtctgtttggacactctgtttcagtactcctaatcctgaaccttgagaagtggtagcaaaaattagcttatatatgattatatatttcatccttgtcatatactcagtaccaccctgacctgactcttataaagcatattaagatctcaactaaaaactgtacattttatttatatcaggtctcgaatttatttggaagggaaaatagactatggtgaatacatggataaaaataatgtgaggcgacaagcaacaacaatcatagctggtaagaagcttgtgaaaatagctgtttttttctttttctccttttcttttttaaaagcttggctacactgtaactaactagggttaagagtaccagtacttatgagttaaggcaactcactagaagatgtccataactcttatttctctacttgctaagagtttgtacatttatcccttcctttaaaaaattatttttatacttacagttttagtcacaagtaacttttgaataaagcctaaaactgaattatccatcccagtacttattgttgagaattacaaaaactctgaatgtattgtcttttggaaggatctagccctaaccaggaagaagcgtatgccaagataagaattacactaatgtgagtgtgcagatttattcggaacctctttggtacttagtatgtgaaatttctatttgaaattaagatttttttaattttattttttttgagccagaatctcactctgtcacccaggctggagtgcaatggcacaatctcggctcattgcaacctctgtctcctggattcaagtgattctcctgcctcagcctcctgagtagctaggattataggtgcgtgccacaccacctggctaatttttgtaattttcgtagaggcggggtttcaccatgttggtcaggctggtcttgaactcctgacctcaggtgatccatccacctcggcctcccaaagttgtgagattacaggcatgagccactgtgcccagccaagaagtttttaattttctctttttttgtttttgttttgagacagggtctccctctgtcaaccaggctggagtgcaatggtgtgatcacagcttactgcagcctctacctccccaggctcaggtgatcttcccacctcag

SEQ ID NO: 128192 - DNA, 1499 bp, Homo sapiens
tcctgacctcgtgatctgcccacttcagcctcccaaagtgctgggattacaggcgtgagccaccgtgcccggctagataatattttttaaaaattgatttttgggctggatgcagtggctcacgcctgtaatcccaggcctttgggaggctgaggtgggtggatcatttgaagtcaagagttcaagaccagcctgggaacatggtgaaaccctgtctctacacaaaatgcaaaaagtagccgggtctagtaatgcgtgtctgtagtcccagctactcaggaggctgagtcatgagaattgcttgaacccaggaggcagtgtttgtagcgaattgagatcacaccactgcactccagcctgggcaatagaggaagactctctcaaaaaaaaaaaaaaaaaaaaaatttttttttttttactatggaaaatgtcaaacatgtataagagcagaaaaaatggtaaaatgaactcctaccatttcgcttcagtgtcagctgatggacagtgttatatccatgcctccagcgacttgacctacacctggattattttgaaacagattctagacataagtttattcataaatttccatagggatctctaaaagataaggtgtctttttgaaaatgtaactaccgtgctattatcacacctaatattaataaattactgttaatttttttactaaatatcgtagtgttcaaatttccttgataacttcataaacattcatacattatattacatgatttctaccttaagtctcttagatttgccttttatctttcttctttcctttgctccagagttcatgtcttaaccaccataccttattaataatttataatttgtatagaatgctcacatggtttcttactgctaagtttctttgaaagtgtattaaccttgaaaagcagtgtaggtattttcctaccctcctgtgggtcccaatataaaccacaagtgtgggcaaactttagattgttcggattattgagttgttactaataagccaaacggaagcatttcagatgatatgctgttttgttttttttccttgtcactaggttccactagcacagtcagtttactttaggtttatgtctaatggtaaaattgaagagctcttcagtgacatttgaattgaagaaaatagagtttattggttgatctgttttattggtgatttttttttctcctagggatcctatctgtaactaaaaaaccaccaccagtggatggcactcttggctttttccacagtgatattaattcgagtagtttgttctgaagtaaccgttctggaccaaaacattctagtttttggaagactatggtcatgaacaaatattcagtccttggtggataattttatagttacaagaatcttttggaattataaaggaaatgcagtcattcctccatgtcccttgtttctgcatctgtggattcaaccaagcacagattgaatatatgtgaaaaaaagaaaccaataaaaa

SEQ ID NO: 128193 - DNA, 1807 bp, Homo sapiens
aaaagttagccaggcatggtggtgcacacctataatcccagctactggagaggctgaggcaggagaatcgcttgaacccaggaggcagaggttgcagtaagctgagattgcaccacttcactccagcctgggtgacagagactccatctccaaaggaaaaacaaaaagttattctgtattgtaatttaaaaataaaatttcttctatttgaatttttaaagttaaaaacgtaagtaaatcctgtcattgctaacagggccacatatggactcttactctttcctctagacccccagagtgtagaatgtgatacacttttgtccttttctctgaggatgtgctgcctagtgtcgtggaatctgcctgaccattgcaagcatccaattttgtgaccagttcttttgcaggaaattgtttctgagaagactggaagacaagaaatatcccacctcttctaacaagatctgaattgttcgaaaagcagccagtgcctaacttgtagctccacttatgccaactgtatatatacctctcgtgagcatagcaagtgatttaatattttgaaaagatggctaaaatccttttaatgaacagcactaaagttatatgtattagaggagaattattgaatgagatggagaaagagttctgaaattaatatttacattttggcttttttacagataatattatatttctgagtgaccagacgaaagagaaggagtagaaaggatgattcttctttggccatcatttggtacagtctcatttccaagtcatgtataatctttatggcttccaaggacaagaattaaaatactcttttacgtaaaatgagtaataatcttttttctgactgtcgttctcgctctcctttttgtggtataatcttggtagctactatctgttatggcatttactagttgtttattcttctaagggtggtttctatgtacaggtatacaaaatagtaaactttcaggctcatttgtgttatggcaaagggataaatatgctttgggaaggtctcctggtttttgtatacacttttattacaatattgatttgtccaatcagtgaatttactgagcatcactgtatgtgagacatttatcccatatttgtaaatattgattttcttaacgttttgctctgtagacatgaaggcaaggactgaatcttctgtttgcctgcactttaaaccatgctttacatagaatagccactcagtaagcattgatagatgaatcatcccaatgggattctaagcttcagctcaaattgaagggagttgctgagcagtggttagtgtctaacctaaacatctttaagactaacctaccttcttcatatcttttgtttttggacagtttcattagtagcattgatgaaacatagtttaccagcaataaggacctgaataattagagatgaaatcgttcatctccaggtgatgccacaggagctgtagttctgttctttctctgcccctgttatctgtggggaaaagaaagagagatcagactgttacagtgtctatgtagaaagaagtagacatgagagactccattttgttctgtactaagaaaaattcttttgccttgagatgctgttaatctgtaaccctacccccaaccctgtgctcgtagaaacaagtgctgtgtgctgtgtcgactcaaggtttaatggatttagggctatgtaggatgtgctttgttaaacaaatgcttgaaggcagaatgcttgttaaaagtcatcaccactccttaatctcaagtaccaagagacacaaaacactgcagaaggc

SEQ ID NO: 128194 - DNA, 2059 bp, Homo sapiens
cttttgtttttggacagtttcattactagcattgatgaaacatagtttaccagcaataaggacctgaaatataactagagatgaaatcgttcatctccaggtgatgccacaggagctgtggttctattctatctttctctgcccctcttatctatccttttagagtcttcttcagaactcttggggaaggtagaagaggatcctcttaacaacctctgtcagtgcctcccttagagccttaggtcctacattttccttttatttttccacatgaatcattatgtacatcatgtaatcttactttttattacaagattcaggaaattttagaatactaataatttgccaataaagatgaaatagtaactcagtttttcagtgcatcttttgctctttaaagtttacatcagccctcccgaggtctgcctgccagtttgctgctgtatcccagaggttggctgccactgtgcaggttgttttgttcaaatggtagaagtctctcgtactgtctaggccactctgtctccagtttggcctctgacccagcctatatatttgcttcccagcctacatgttctgtcctctctgcctgagagtacgagtacagtgctaactgtagcttaggtcatattggactttattaggttcagaattcccaagctatgttataggtctgtgacttttttgttttaaggtattttctgcacacttgagtagctttttttatacctacaatgcattttggttgaggaaagatggaattttttagctttatcctctccttgctcaggaacagtagaaaattcattgctgttttctcctgccagccatctttctttttcctgcagctgggacagttaatcagcatattaactctgctctcttaagttcacacattaaaactgcctggtgatgtagtctttattccttcatgccacattccttaagcaaaattgggcagtatataaaatttatctttttagcaactctttcttctatcagcacagcagcttttatactccttaagtgttgtgagaaattatgcagattaacagtcctgtttaagcagggtaataaatctctgctttgggaaaatgacatggtgaacagaagagcttaattaccaacctggagcagtttctcagccctgaatgcaggggtggaagaggatgctgtgctggatcattgtgagccgaggggctctgctttaaactctcccctggaggttgcctcttctctccatgcctctgaaaggctgtggagctgaagcagtggtgctttatcagacttaggtgtgtagcatgcagtcttcagcatgcgtatgattctagcagaatgattctcgcctcaagtcagtcagacttgctagggaaactttgcctacccctgggaagccctatctgctgagaaactttctcctgctccctagctggtctaggaagagcgcatttggaaatatgatagcagtaaatagcagtaaaagactaggggtcttctaacccaagttttgggtcttgcatttccctttttgatgtgatagtgtcagggaataaacctcagaaaactgcactgtgacctcgatttggagtttcctgttaaatggtaagatgaatagtatacctagaagaatgggagaaaaagtttcaaacagtatgtctggggtatcccatttttgaaaaagaagttgtaatgaagataggcttaatgtctggagggagaaacatgaggatgttattatctctagagagggtgattatgcgtgattttccttgtttctttacagttttttaaatatatattttagcattgaacatatattacttttataataaaaaaataaaactttttatctggggaaaaaaacctttccattatttctgagccagactaatttactcattcacttttagtgagtaccactttactggatatgaatgagaaaatcttttatatattttcccccactatctgtattttagcatctcatgcttttataattcattcatctgttaatacgtgtacacagcccaaaatgatttactttgaataccaacctagc

SEQ ID NO: 128195 - DNA, 1084 bp, Homo sapiens
gtactccagcctgggcggcagagccagactccatctcaaaaacaaaacgaacaaacaaacaaaaaaaccaacctatatgagatctactgtttgctgcctttacagttctcaaagaatcaatcatttcttaaaacacactggacattttattcaaagatgatccaaaaacaccaaagatatatttctgtggcagttttggcaatagagtatacatttctttaggaattacttgtcattgcaatgtggattacagcctaacttttgcagccaagttaggagaaattagtgctgttttccctttgttccctaatgagatcatggcaattcttgaaggcagggttttcttttactaaaaccaccctttttccccaatctaactcagcctcacacagtgacatggagattgataaatgtttgtcattcggttaggtgggacttgaaaagaaaatgagggcaggatcaccttgctatttttctgttagagtttgcataatattctgtgaagatttgtgggagtaacagcaagaaaatcgttgtggaaaatgagaggcaagtccaaggttaatgaattacagggaaatctcttaaagatgtaacaataatcatattaatgactgtcatttctcttctggttactatgtaccgagctaagctaagtactttttatcattgtctcatttagccattatcctaagaagaaggtacaataatcccattttacaggtgaggaaacccaaaactgggagaggttaaataacttgtcaaagtcatgcatcttccaggatgcacacctggaggttgaactcaggtatgtgaagtttgcattttgctttctgcccaatgcctgcctccacttgcattcattctccactggccctccgtatccacagattcccgcaaccaactgtatttgtctgttttcacactgctatgaagatactacgtgagactgggtaatttataaacgagaggtttaattaactcacagttccgcatggctggggaggcttcaggaaatttatggtcgtggcaaaaggtgaaggggaagcaggcaccttcttcacaaggcagcaggagagagagg

SEQ ID NO: 128196 - DNA, 1029 bp, Homo sapiens
tttgacatgccctagagacattttccccattgtcttgactattaacattcggctccttgttacttatgcaaatttcttcagccagcttgaattcctcctcagaaagttggtttttcttttctaccacatggtcaggctgcacattttccaaaccattatgctctccttctcttaaatataaggttcagttgggcatcttctatatatcatgcacccatataggacctgaatgtagggatgtatataacaggattcctgcactgaaggaattcacaattaagcttatgaggggttagggaggataagcagaaacttttatagctaactgtgatagggtgtgaggagtagcttagaagagaatggataggtgagctttcagcagaggaaacagcatgagcaaagatccagaaacaaaagtttatgaaacaaaggtgaggcatggaaagtgggttggggctagatagtaaagggccttgaaagctttcagagaactttggcaatggggagcaatagaaggtttgaaaacaaggacatcttatcagaattgtgcgttaggagaacaacaaagacagagtgaagggctagaaggagaaagcctagaggcagttaggaagctctaataagcctagaaaggttagcaagaatggggatgagaggtgacttgaggggcgtttgggattcaagttgatttgacaaatagtaattgtgtaccaattttgtgctggaccctgtgctaggctctgtgttagagatactgcagagaatcacttatagcttctgcccaagatctagtggtgacacaaccactattgctaagaggaaatgcaattcagaggtggttctgaggttcctgcatggagatgtgtggatagtagcacttcatttctgagtttatggaacatggatgtgggagcagagttgagagggggaaagataatgagcttagttttgaatatggtttatctgtagactttctaatggctccttggcagggtattaattatattagtctggagctccgaggagaag

SEQ ID NO: 128197 - DNA, 1146 bp, Homo sapiens
ttctacctaagcaaaggaggtagatgggaggggcagtgtggattcaggattggctggtttgcttatcaaaggagttttctcaggcaagttggctaactccaggaattagctaaccttgggagggcatgccctctctgggtctgcaaggcccaaaagtgtcaaagcataaaatacagaaaataaacatgattaatgcactacccagtatctattgtcccttctgtatttatagaacccagatgtgacagggtgcacagcacatgtactgcattcctgttcttttcagttaggggttgccaaggggctataggcagaagtcacttggtgatgctctcagggaactttctatatgagttactcttgggaggcgtatcctgtgtgcttccccagactctcgtcctacagcattttcttttttgtctgaaatgtggacatttcatggctggatttccagttgccatcttggaccatgaggcagtcttcagaatggaaggtagaagaagctgggatctgcaatcactatgcaaccaccataccagcctggacagtttgcctctggactgctttgggagacaaaaatatacctctcctctaagccatttacttgtgttgtgtacttaaacctaattctttcttattcatatattgttgactttatctccgtatacatgagcaactctttactcttatctttctcttacatgacctttcacggcaagtagaagtaaaatcttttctttattcccacaatcctttaggttttaaactaatgtctcattaaatttagggaagggagtaggacataaaaagtatacaaaccttagcaattagctttaaaaagagtcaacataagcatactttaatacaaactacgtactgcttaattctgcatatagtcctgaatgaagatccttaattaatagccgcttgttaaatagaggagctcttaggttaagaacagaagtattgttcttatgcctccctggacagtattatagcagactagcaatccagagtgggtctgagacttcccactgcaagtccaagttcgggatgtaagcttggccactttctggtgaggcttctcttgctagcttatagcttacagccatctctctgcatgtaagccaggctccaaggggcatg

SEQ ID NO: 128198 - DNA, 1087 bp, Homo sapiens
tatttccatctacctcactggtgctccaacctcttaacatcagtagttcccaagttttagtcttggacatctcttttctatctatacccacttccttagtaatttttatcagtcttatagtttcatttatttggggaggcgcagagagagcaagtttatttggtaaaagctgaccaaacattatccaagaaagacaagatgggaaaggtgctgtgacaaaagagcctagaaagccttcaggctagatacgaagtctcacacagggaaaggcacgggctctggggagactgggaaggtccttagccatttggcaccccatggacaagctcttcacagttgatgcaaccattgctgtccttatgccctgcactagcatctttacttcttcttctatcatcttctcacccagtgtgacaaggacttgctagatttcagtgcccatgatggtgccattccccttcttgtcaaatacccaaagtccttcaacataatcctcataggctctggtccctgttcttggccacagcctgcaacatgggcaggaagtgcccaaagtccagcaccgtcacattcatctcatcacttttggggatctccaggacttgcatcacctcagcatcggtggggttctgacccaggaccctcatcacatccccacactgactatacaggatcttaccatcacctgttcagtcaaacagctagaaaacctccttgaattctgtggtctggtcctcagtgaagtcacacaccttgactgctcagctctgcagcaccttttcctacattaatggcccagtcttacagttttaaatatcatatttagtctaaatactcccaaatatttacctccagtttagatttttcccttcacttccagtctcacatatataactgatctaatctaatctatatatggttagttaactattagttaaacctaatatattaaaaattaataataaaatataaaaatatattaataaaaattaatattttaactattttaaaattagttaaatctaatatattagattttatatatatatatatctcaaacttagcatgttcaaaaatgaactctaaa

SEQ ID NO: 128199 - DNA, 1075 bp, Homo sapiens
tgcagtggattccatttttatccccatttagcacatgaattaatgggggcacataggagtaattcactcagggtgatatagtaagtagtggagcccttcactacattttaatgttgtgttctttaatgtagtggagaggaagaggatgcatgtcaaggaaatgtaattttctcgcctatctaactgaacaatgtccattttggtggagaccagagaataaataacctagttctgggtgtctcctgtttggttccctagctgatgcactaacagtcctattccattctgctctgcacctttggaaggggacatatatggatttaatcagtgggctctcttgtcctctggcttccttctattggccaataggaagcaccagaaagtaactggaggaagaagagtgagattggagtacttatcctcccaggtccctccctgcagttttgtcacagagtggctgtgctccttgactaggggttacaatccttatcaggctgtctcctcacacaggtctcgctttttctctatctctccttgcctcctttgaaattatcttctcctcttgcctttttaggcctagaggtggtaactgcattttcttaatacaaaccctggtggtatggaactattcttaatattgtccctttaatgtctccatacctttgcaattggttccttcttaaaactcacctcaattgacccaatttgagtgcatcatcagttacctgctagatctttaagtgataaaatgcattcatactgccagtaaaaaaaaaaaaagaaaaaaacttatgagagtctgaggaggcataacatgtaacacagggttcctcaacagtggcactattgctgttctgggctggacaaatctttattgtggggactgtgctgtgaattgtaggatgttaaacagcatctttgctctagcctctccccattagatgccaatagcactgccccctggttgtgacaaccaaaaatatcttcagacattgccaagtgtaccctgtagagaagttacccttatatgagaaccactgatctagaatgaacagtagctgttttggggatgggg

SEQ ID NO: 128200 - DNA, 1001 bp, Homo sapiens
tcttgaggatggtggagatgatgtaggtgtaggagacaatcgtagggatcaaaagaaccaatgataatgaaaacagccattagaaaaagaataaactctgtgaaaagagtgtcctcacaggataccttgagcaattgtcctcagtcacagtaaaaatgatctaacacatttgatttgcagaaagtaagctgaaaagtggcataaactggccagatttgaaaaaggaacccaaacacccatgatacaatgaccatccagacacatgtgctgctgttcataatgatgttgtacctcaaagggttacacacagccacataatggtccacagccatcactcccattaatgccaactccgaggtacccaaagaaaggtatatagctgtgcagcacaggctgtcaaagacatgatctgggtgcttggaagcagcaaccccccagcataaaaggggcagcggtggatgtgatcaggatctccaggacacagaggtggcccaggaaaaaatacatgggggactgcagatgtttatcaacacagacagtgacgatgatgaccgtgtttcccatcactgtcactgcgtacaagaagaagaagttcacaaaaaggatacggcgtacttcttgggagccagggaagcctaagagaaaaaattcagtggcgctagagtaattccccaacatttacttctgagtgcttttaactcatgaaatctagaaaacaaaagagagttaatacggcttctcatcttaacagaattagaaactgttctgcaatccccctcctgttcacaggccacacaccatgactagaatggtaggcatttgtcttctactattcctgtatatggtcagtggcaatttttctaaatatgtacaatgtgtgaggaaaattgagttggtcatgaagatgatcccagtccccagtgccataccttagacatgagagcctataccctgcccagcatgcaccattgcacccccaatgctcacttcacctgcctccc

SEQ ID NO: 128201 - DNA, 1070 bp, Homo sapiens
gatcttgctagggaaggccaccttgtatgccgtgctggtcagtgccctcgtgctgatggccatggtaaggaggagggtgggatagggcagatgatgggggcaggggatggaacatcacacatgggcataaaggaatctcagagccagagcacagcctaatatatcctatcacctcaatgaaaccataatgaagccagactggggagaaaatgcagggaatatcacagaatgcatcatgggaggatggagacaaccagcgagccctactcaaattaggcctcagagcccgcctcccctgccctactcctgctgtgccatagcccctgaaaccctgaaaatgttctctcttccacaggtcaagagaaaggattccagaggctagctccaaaaccatcccaggtcattcttcatcctcacccaggattctcctgtacctgctcccaatctgtgttcctaaaagtgattctcactctgcttctcatctcctacttacatgaatacttctctcttttttctgtttccctgaagattgagctcccaacccccaagtacgaaataggctaaaccaataaaaaattgtgtgttgggcctggttgcatttcaggagtgtctgtggagttctgctcatcactgacctatcttctgatttagggaaagcagcattcccttggacatctgaagtgacagccctctttctctccacccaatgctgctttctcctgttcatcctgatggaagtcctcaaacaccatttccatacccaggcattctgggtccccactggagggttagtctgaagggcaatggctgggctttggaaaaccagcaagatgaggacagagaggaaggcacacagcaaaccataagcccttacccagtgcaggacagaggatgcgggcagacctatgggttacaatgtctggtcatttcccaattccagattaaactgtcacctgttttacctttagttttattagtttgtagtcttaacacctccagcttctcttgtttcaggatttgggcttaaaattgagtgctactctgcatgtctagtttgaaatactagagaa

SEQ ID NO: 128202 - DNA, 1546 bp, Homo sapiens
ttcattttatctgcaaaaggtcaggaataagccatcttaggaaaggaccctgattttccctaattttatttcttaaagcactcaaacttactatcacccactcatctgaaatttctggaatcttctggagcctttcacagcaattgccttttcctaagtcttcaggcctgagaagcgatggagaccaaaaggagtttagctccagctccagggttactatggaatagagtcctttggttcccattcgcccttctgttgggagggtccctgcctcgctgggccaggtgacagggacgcaggtagaggaaggcagtggatggcagctagggagaatgactgcagcagcaggcctccgcagagggagcttatgcaataagctgggaacacccacatctggcactgggcctgtctgtaacccccactgcacctcactttctccatccatggaaatgcaattctgtcccagcaattggcagaagaaatctctgcctgagggaagagagggtggggttcagtcttggaagaaaaggagaaccagctctggggaagagaaggctgcgaggatacctgcctgctgtgtgttgggagctcagggtgggtggacagagcgagtgtgacgcccccactctcctctgcctcctcagcctgcccacgggggctctataagtcttctgctgggaatgctccctgctcaccatgccctgcccgcagtcacgctcccaacccagcagcccccgtttgcccctgcctggagggcttctaccgggccagttccgacccaccagaggccccctgcactggtgagttcctcacccagccctgcaatgggaaagagacttggagaggggccagaagtgggggtagcaggcaacactgggggctctttgcatttggagtgacttgtttttcccctattttcttggcttcctcccctccctgtccccacccccttctctccctgacccatccttccctgggcccacatcctgcctctctgggctacccccaccccacgctcttctgtctccttccctctcggccacccaccctcccctggctccttccttcctcaatcacccccactgctgccctcttggcccttggactgccatatcctccggccccccaggtcctccatcggctccccaggagctttggtttgaggtgcaaggctcagcactcatgctacactggcgcctgcctcgggagctggggggtcgaggggacctgctcttcaatgtcgtgtgcaaggagtgtgaaggccgccaggaacctgccagcggtggtgggggcacttgtcaccgctgcagggatgaggtccacttcgaccctcgccagagaggcctgactgagagccgagtgttagtggggggactccgggcacacgtaccctacatcttagaggtgcaggctgttaatggggtgtctgagctcagccctgaccctcctcaggctgcagccatcaatgtcagcaccagccatgaaggtgagctcttttccttggccttcaggatcccctgcctccgctcctttgagcccccttccc

SEQ ID NO: 128203 - DNA, 2228 bp, Homo sapiens
gcccgctcttgggttctcttgaagattcttcatcctttcctctggctcccttatgagggaaactataaaaagaccatactctgtctccttaaaaatcgacgagaccttctgcagacctcggtgctctgcctgatgtgcatttgatttgtatcgattgtatcatgatctgcatggctttgcatagaatgaccagattttcaaagaagtcaatacagggtttggaaattgagtacttttggcagaacaagggggttcctgtggctccgagtgtccatgcctctgccccggtcattccatttcatggcagtcatcacccaggagaacattgtaatgcctcctgctcgagactgaagattaaggtcttcgcaaagggaacctgcagaaggacacagaattaagacgtaggaactccgtggtgcccttcgcccctcctccccttccagttgtgtcctgaaattctaaatgattggaaacttttataatgttcacgtttaagactctcatactacagagtagaggaaggagcgggtgtgcagagggggtgatgcttcagattaaaactaaagagttgattgaaaattcaagtctggaactcgagagagttaagaactataagtcagtaagttgcaagtatgggtgagattgtctagggaaaggctctttgaaggggcgtccctaatggaatatcaatattaagggcaggccaaaggccctctaaagaaaacaggaactgggtaggcagagagaagactcccaaagaatgctgtcatggaaaccagaggaagagaacgatttaaggagcgaatactactggtaaactaatggaagaaatctgctgcaccactggttagtatcccagctgcagtgttatatgtgatcgttattactgctttgacgtattcgaaagtgattcattcttaaataggtttttttatttgtatagctctttttcttgtagccagtttttcctgaaagtcttgggtaatggaaatattacagtaaaaagaagaaaaaatggagtttcagactcatttttccaaacctcagattcattggctgcttccaacccacttcatctgttttaggatcccacctgctatcttagttctcccagttcttccaggacccagctcttccctcttctaactataaatctctcacccaatagcatctgcaagccaagtgcatccattccatagatgtgtggtatttcactgactctaagatacacattttttccctccctttttttttttttttttttttttggacggagtctttgctgtgtcacccaggctggagtgcagtggaatgatctcagctcactgcaacctccatctccaaggttcaagcgattctcctgtctcagcctcccgagtagctaggactacaggcatgcagcaccacactcggctaattttttgtatttttagtagagacagggtttcaccatgttggccaggctggtcttgaactcctgacctcaggtgatctgcccaccttagcctcccaaagtgcagggattacaggcatgagccaccgtgcccggcctcccctcatgttttaacaccttagaaatcagaatgcattttagagtaggtttttaagttataaatggaagttattgtattttcactgctatcaggtgccacccttcctgctgttacatatgtggaaaatgtgacggggcaggctagagaactctggatttatgtaaactaggcatgtagatgacatattggcaataggattattttagtttataagcagaagctgatctctttgcaagcctgtagcaaaattagctggaggtgacagcacatgcctgtagtcccaactacttgggaggctgaggcaggtggatcgcttgagtccaggagttctgggctatagtgtgctatgccagtcacgtgtccacattaagttcagcatcagtgtggtgatgtcctgggagtcagggtccaccaggttgcctaaggaagggtgaacccgcccaggtcaaaaatggagcaagtcaaaactcctgtgctgctctgtaatgggatcatacctgtgaatagccactgcactccagcctgggtggcacagtgagactcttttaaagtaaatagataaatacctatccactgtgactttctgtcatactttctgcttatccacatcttaacaggattcgccattttgtcactggaacttaaaagttttaaaaaacatgtaattatatgttt

SEQ ID NO: 128204 - DNA, 1193 bp, Homo sapiens
gtgtgtgtgttttcttagaggttttggtctagccatgtcttttactagaaatctattatgtcatggtttttcaagttgtatgcagctgataaaggatcttacatgtctaatagttaaagataaaatactgagtcactaagtcaactatatatactgctgttttctcagagactgtcagatttggtgagtttatgagctcacttcataaatagcatttccatttatggtaagcctgatgcatattcagtgacctattggattctaattctttggttgaattgctctgtaactggaattgcagtagagttgaacttcaagcaccttataatgggggactatgtgagctgccacagattttaaagatcagatgagggagttttgacatcagcataaaaggaagtgtgtcctcttatattcctaacgaccaaacaagattagagaaaaaatcttctgtcatagctaagaagaagaagcgcctaggtagatatgatcagaaggataagtggaggaggcagaacttaagctggccttgaaggatagaagttactgaagcagagaggagtggtgaagccaccctaggcagggagaacagtatgtggacaagaaatgtgtgtgttataaaccaggtagttgcaatgggtgtcataatttggtacactgggcatctgcacagaatgctctcttcctggtgggatctccctagagagtcaactcgtttatcatatagctatttggcaagcaaagaaacagaaccaaaaaaaaaaaaaagatccttttttctttccctatcaaatctttcttacttaagagaggaattccatttaaaaacaggaaatagtataattagtcttagagactcctcttcccctgatagtgctgcagtgaacatgggtattctcactgcccagatgttttcacttttctctttgttattaagtttttattgcatctacttcatgaggttactagttctagaattatgatttaccctatgttaggaaacgtactcttcaaagtggaaatttccttttaccatgtggtattgtttttttagcttgcatttgggtcacaaactgctttgaaaatgtaaggacaagctatgggttatccctggaaaatgcagctgcccatataatttagcatataatttcagagggttcacaagttactctcttcacatgtcccccaacccc

SEQ ID NO: 128205 - DNA, 1022 bp, Homo sapiens
gtcaagtgatggctactgttgcatgtgtaggacttaggaggccccgctgaatgcttaacctctcttcttccttctttctttctggcagctccaagaggtttttcagctctttgacaacgccaactgcccaagcctacagaacaaaccaaaaatgttcttcatccaggcctgccgtggaggtgagtgccctagcagaccagcacctgggtggtggctcctgggcagcctcccaccagctctcactttcctgtttgctcctctcaggtgctattggatcccttgggcacctccttctgttcactgctgccaccgcctctcttgctctgtaagtgtctcccaatgcatggggtgtgctgggacttgggcagcccatggctctcaggctggtcagctctccgtgcaccaccatatcctgttttcaggtctcttatcccgtgtctttgccttcctttctgagaactcttactcttttctgtgcttcattaactctggtgccctttttttggttactcattccagttacggatttttgatctgtctttttcctgtccttcttattttatctcctttctttcactctttgttcttttcacttgttccatatacttccctgtttacctacacttccatgcttgcctcctttcttctttcttcttaccattcttgggtcatgcaggatagcagaacagaatccgtgttggcctttgactcttccttttccgtgagctgctgctgcccctctttctctcatgcagtctgttttactcctttaagagccaggactgcaggacgaggattaaaagacacataggtgtgcttctcatcctggaggaaaataatagtaattaagagccctaactttggagtcaaattctgacttcaccatttactagtaacgtgaagttaaagaagttaaatggcatccctccatctcagtttcctcaatataaaatgaaaatagtccttgtacctacttcataaggtgcttgtgatggttaaatgagattatgcatttaagggct

SEQ ID NO: 128206 - DNA, 1062 bp, Homo sapiens
cttgctataatttatcttatgaaattaataaacatagtgcttcgaagatatcaaaaccaccttggaaacaactgatcatacttagttttattattttttgatacatagttcgaggttgtgatttttatatagcatacatatggtaaccgtatttgttatttattaccttgttttttcttgtttatgtaattaaatatatcaatattttattatgtattgcaataaaaagcactgtgactcccaggcatattgttaattgaacaagtgagttgtggacttagatgattttcagttccatttacaaggagtatttgatttggcattttccctgtcttacacagaatgggaactgctccaaccgcatagatgtgcatgtgcttgagcgtggtgcccggtgtgtatgaggcatcccctgagtaacagatgcatgctgagagagtaataattttttttttttttttttagtttatcagccataggttggaggcaacagctggaaatggctcttccccttcaaggttgtagggaacgtgggcttgcctgtgacaggcccaagagagataggaagaagtaacatcattgtccattctgtctgcctttgttacagatgagactgatcgtggggttgaccaacaagatggaaagaaccacgcaggatcccctgggtgcgaggagagtgatgccggtaaagaaaagttgccgaagatgagactgcccacgcgctcagacatgatatgcggctatgcctgcctcaaaggtactttgagttccaaaagagttgagtcatacctcattttgttgcactttgctttattgtgctttgcaggtacaggttgagtatcccttatctgaagtgttggaaccagaagtgtttcagattttggatttttttgtttttttggattttggaatatttgcgttatacttactagttgagtatcccgtatccaaatattctaaatttaaaacactcccatgagcaccttctttgagcatcatattggcacttggaaagtttcagattttgaagcatttcagattttttggatttgggatgctcag

SEQ ID NO: 128207 - DNA, 4104 bp, Homo sapiens
tcctagacttagattcttcatgctgggttctctgactagggagggtgcaggtgtcatggccgagtctagtttgggaagtgcagctgtgtgatggcattcacactgtgattaatgcccttttggttgcagggactgccgccatgcggaacaccaaacgaggttcctggtacatcgaggctcttgctcaagtgttttctgagcgggcttgtgatatgcacgtggccgacatgctggttaaggtgagccagcgggctccgtgacccctgtgtgtctccacagtgctctactttcctcctctcttgaatgctctttcatagtccgtctccccttcccgtttgctgctctcctgaagcccgagattctcagacttgggcctattggttctgcccctccaggtgaacgcacttatcaaggatcgggaaggttatgctcctggcacagaattccaccggtgcaaggagatgtctgaatactgcagcactctgtgccgccacctctacctgttcccaggacaccctcccacatgatgtcacctccccatcatccacgccaagtggaagccactggaccacaggaggtgtgatagagcctttgatcttcaggatgcacggtttctgttctgccccctcagggatgtgggaatctcccagacttgtttcctgtgcccatcatctctgcctttgagtgtgggactccaggccagctccttttctgtgaagccctttgcctgtagagccagccttggttggacctattgccaggaatgtttcagctgcagttgaagagcctgacaagtgaagttgtaaacacagtgtggttatggggagagggcatataaattccccatatttgtgttcagttccagcttttgtagatggcactttagtgattgcttttattacattagttaagatgtctgagagaccatctcctatcttttatttcattcatatcctccgccctttttgtcctagagtgagagtttggaaggtgtccaaatttaatgtagacattatcttttggctctgaagaagcaaacatgactagagacgcaccttgctgcagtgtccagaagcggcctgtgcgttcccttcagtactgcagcgccacccagtggaaggacactcttggctcgtttgggctcaaggcaccgcagcctgtcagccaacattgccttgcatttgtaccttattgatctttgcccatggaagtctcaaagatctttcgttggttgtttctctgagctttgttactgaaatgagcctcgtggggagcatcagagaaggccaggaagaatggtgtgtttccctagactctgtaaccacctctctgtctttttccttcctgagaaacgtccatctctctcccttactattcccactttcattcaatcaacctgcacttcatatctagatttctagaaaagcttcctagcttatctccctgcttcatatctctcccttctttaccttcatttcatcctgttggctgctgccaccaaatctgtctagaatcctgctttacaggatcatgtaaatgctcaaagatgtaatgtagttctttgttcctgctttctctttcagtattaaactctcctttgatattatgtggcttttatttcagtgccatacatgttattgttttcaacctagaaacctttatccctgcttatctgaaacttcccaacttccctgttctttaagactttttttttttttttttttttttttgagacagagtctcgctctgtcgcccaggctggagggcagtggcacgatctcagctcactgcaagctccaactcccgggttcacgccattctcctgcctcagccttccaagtagctgggactacaggtgcccgccaccgtgcccggctaatttttttgtatttttagtagagacagggtttcaccatgttagccgggatggtcttgatctcctgacctcatgatccacccacctcagcctcccaaagtgttgggattacaggcgtgagccactgcgcccgggcaagacctttttttaaaaaaaaaaaaaaaaaaacttccattctttcttcctccagtctgttctcacataacagagtagttttggtttttaattttttttggttgtttgctgttttttgttttttaaggtgagttctcactatgtttctcagactggtctcgaactcctggcctcaagccatcttcccgcctcagcctctcaaatagctgggcttacaggcatgagccaccacacctggccaggatttggttgtttaaatataaatctgatcacccccctgcttagaacccttctgctttctattacccctcatttaaaatgtaaactcttcaccttggtttatgagaactggttcttgccttccccttgaacctcattaaatggtgatttcttgctaagctccagcccgagtggtctcctctcagcttctaattttgtgctctttcctgcccttttcctgggccttctcagctctccacccccaccactcttgactcaggtggtgtccttcttcctcaagtcttgacaattcccgggcccttcagtccctgagcagtctacttctgtgtctgtcaccacatcttgtcttttcccctcattgcatttattgcagtttatatatatgctacttttacttgttcatttctgtctcccctaccaggctgtaaatgagggcagaaaccttgtttgttttattcaccatcatgtaccaagtgcttggcacatagtgggccttcattaaatgtttgttgaataaaagagggaagaaggcaagccaaccttagctacaatcctaccttttgataaaatgttccttttgacaatatacacggattattatttgtactttgtttttccatgtgttttgcttttatccactggcatttttagctccttgaagacatatcatgtgtgagataacttccttcacatctcccatggtccctagcaaaatgctaggcctgtagtagtcaaggtgctcaataaatatttgtttgggtggtttgtgagccttgctgccaagtcctgcctttgggtcgacatagtatggaagtatttgagagagagaacctttccactcccactgccaggattttgtattgccatcgggtgccaaataaatgctcatatttattactgatgtgtgctcaatatctgtttctgtagatactcagtcctctgaagcccacagatttcgtttccttagccccttacactgcagcattccttaccacctcacaaggcatacccagacctgaaaacccttcttattttgctgctgtgatcctgtaaatatatgcaggtgtgggcccatctcagtttgcgtagtcctgggatttctcacagatgaaatggaagttattagcaaacagtgctggttcttgattatttagactatgagatgtaggctgccataacagattgggctggaatagaaggatgggagagtgaagatagtaaaattccatttcttacctggttgcatttaaggtcttctagagtgggcatagattgtaagagaattctagtgcagcatagaagagatcaaagcaatgaatttgtgtaagttgggatattttgggggtgcattgtatctaaaggatatgcctgagaggtaagtgcaggtgcagatgggccatggaatttggcaagagatggaatgttctgtaggaactttgtacagaagttttggtaggaaacaaaacttttttttttaaatacgggatttcaccatgttggccaggctggtctctaactcctggcctcaagtgatcagcccgcttcggcctcccaaagtgctaggattataggtatgagccacctataacaaaccagaaacaaaacttttttgtttggtaggaaacagctgtgggagctggaaatattgttgagtcatacagagaagggtatggcagtctaggaagagcagaaggggattgaggtgagctgaagcacctcggcagatagagcagaatttggtacagaacactggagacaaaagggcatgaaaaatggactgaaactggttggttgtactgcaagaaaaacaaccatgggatagcctcaagggaaggatacaaaatctaggacag

SEQ ID NO: 128208 - DNA, 1207 bp, Homo sapiens
taatcccaacactttgggaggccaaagcgggcagattacctgaggtcaggagttcaagaccagcctggccaacatggtgagaaacccatctctacaaaaatacaaaaattagccgggcatgaccgtaagtgcctgtaatcccagctactcgggaggctgaggtgacagaatcgctcaaacccgggagacggaggttgcagtgagcagagatcgcgccattgcactccagcctgggtgacagtgagacaccatctcaaaaaataaataaataaaataaataaaacccgaaagaatatatatcatttatgcatgcttatgaatttgcttccacattcaggagccttacaggaatccctagaagcccatctttgtgcctccaaataagaacctaagctactaagcccagcgggatgatggagtgaggagtgggcatggtttacattttcttttcttgttctcttgcagggatttaaacccatgggatttaaactattcctaatttcaaacacaggatatttactctcaaacccttgcccaccagcactggcagtctgtacatgtctttgaccctcctaatttcagaatctggttttaagaatcgcagttggtgctttccttctagaccacacgcttccactcagcttggctggatgtgagcacttccctactccactggtctctgccttcaaatctcagagtccatgactaggctgctctgttttagggccctgtctttctcagaaatagtaagaaagtcataattgtatctcatatcttgctgcttatatttatcaagtttctacagcaactgatcactttcaggaaagctatactcctcaaatgggagaatcttgtttctgaagtcctccaaggaatgcagtgttaccttggcactctatttttttgtgtgtgcaacaatgtcttttattatgtatgcggttttaaaattatttcttgaatctctccatacacaggcaaaaaataagtgtgctacttaacatactggaacttgcctaacttaatcattgcccagagaagggaaaattatcaccaaaatgtgcttaaccaggaggccaatgcatctgccaacctccaagaacatggagatgaacttgacagacagactgtccaccatctgaacctttattcaccaccatttgataacccttattcaggcccaaatcagcagcacatttcttgccaacaa

SEQ ID NO: 128209 - DNA, 1040 bp, Homo sapiens
ttcatattgttactgacaagcttcaattgtacctaatcataagaaacatttgtgcggcctccaacaatgtacaacttgatgtgttgatatatgtgtacattgtgaatgatcatcacaatcaagccggttaacatatccatcacctcacatagttgctttgggggtgcagggaggtgagaacattcaagatctaccctcttagcaaatttcaagtatgtggtattactacctatagttaccatgcacattagatctccaggactttctcatcttgtataagtgaaccttgtatcctttgaccaaatttccccattctcccaccccctactccagcccagcccctggcaactaccctctactttctgcttctatgagtttgactattttagattccacatacaagtgcaatcatgcagtatttttctttctgtgtctgcaatgtttgacttagcgtaatgtcctccaagttcatccatgttgtcacaagtggcaggattttcttctttgtcagggttgaatagtattccattatatatatttatatacacatgacattattcatctgttagtggacacttaggttgtttccatttctaggctattgtgaataatgctgtaatgaacatgggagtgcagatacctctttgagatactgatttcctttcccttggatgtatgggagttgctgagtcatatggcagttctgtttttaccttttgaggaacttttatactgtttttcataatgactataccagtttacattcccaccaacagtgcacaagggttcccttttctctgcattctcactaacatttatctcatctttttatttaatttttttttgagacataatctcactctgtagaccaggatggattgcagtggtgccttcccagctcactgcagcctccacctcccgggcttcagtgatcctcctgtctcagcctcccaagtagctgggactacaggcgtgcaccaccacacatggctgatttttataatttttatagagacagggtctccccatgttgccaggtt

SEQ ID NO: 128210 - DNA, 1050 bp, Homo sapiens
gatggagccagtgtgggcactccacagtccaaatggaagctcagtccctccgggttggcagtgtggctgacacctaacagtctgggaagtgggagaaattctagaacccaaggctattaccgaccctcgacttcccacttcccataagtgttccacacccagtgagtgataaggatgggatcaggggatgcccccaagctgttattagcagcctctggcagacagaagggcaaagagctagagaagaacgctggacatgggatgggctggcagagctggccagacagaaccctgggtggacacagagttgggaacaagctggccaggagatgtggcagagaggcaccagttactttcccaggtgagttaatgtgccagtgtttccagaacttcgagtcgcttcatctttatccagcacccacccctcaccttccgcatcctgaagaagagagatgggcaactggagggcttccatgcagatccggctctacacataggtttgagagcatactcagcagtttctcatcctggtccaggcgatatttatagagggaccagtgacatggagctggaagcctactactggtgactaagaagggggacaatgccactggctcagcagagggaattccctgtggggctgtccctcaggttctcatcccaacccccacccccacactgcactcacacctgcttcgaccccaagcagatcagatgtggcagtggggggtcatgtgacggagaggggtctataaatagctggaggtgggcatgctgccccagacgccttggggacagcaagagcagaggcttaaggagctacactgggggaaggacaggggcaagcaggccaaggcctggccggggctcggggggagggaatatggagcaatcccggtcacagcagcgtgggggtgaacaaagctggtggggtagtgacccccagtaccagtatatgccctttgaacactgcaccagctacggactgccctctgagaatgggggcctccagcacaggctccggaaggatgcaggcccccgccacaacgt

SEQ ID NO: 128211 - DNA, 2255 bp, Homo sapiens
tgaagccccaagtacccaccagttgtcaatattttgtcactattgttccatctattcttcccttccccaccctcaccactctacacaccatggaatactttttttttgttttttgttttttgttttttgtttttgagatggagtttcgctcttgttgcccaggctggaatgcaatggcgcgatctcagctcaccgcaatctccgcctccctggttcaagcaattctcctgcctccgcctcccaggtagctgagattacaggcatgcgccaccatgcctggctaatttttgtatttttagtagagacgaggtttctccatgttggtcaggctggtcttgatctcctgacctcaggtaacctgcccatctcaggctcctaaagtgctggggttacaggggtgagccactgagccttgcttccaccttggaatactttttaacaaatcccagacattgtatcacttgtagacttgagttttgacttctcccttgccctcccctcaccctgccctgcatgggaccagccagaacagatctggccctttaagtgttttcccagcccaggtatgatgatatgaagcaacccccttccttgtctccactggcctggggccttgaggagctgagacagcctcagctgtctgacttccactgggaagtatgttctctctctgggtcccacgcagggtttggaaggaaacactgcctccctcggtcactgacccagaagacaaacagccatgagcagggcaattcatgtgcgtgcttgttcaggactgcggtgtaaaatgctgctcatattgtgaaatcagatctcttctactcaggctctcccagaatccagcaacatggcctggcctgaccctggccccagaggacagttagtgtagtgggagtggggcaggctaaaagtggttggagctcttgtataccccacacagacacacgtgctctgcctcaggatggaagcggagggccaccagacctgggggagctgctctgtcctcttcacatgtggggcaggtaggggtctaattatctagctgtgggaagaagtagatggacctgccttttcgggctagttcttgtgtgtgcatacaagcactgggagatgaagtggatggtcttgaagcttgatagaggacctgaggtgcctcaggtaaggctagacacaccaaggcaaagtgcaaccaagactgccctgctagttagcccagtctgtcctcaccctgttcatgttaggagaaaagtcaatgcaagtggtctggggaaattgtgggacatacagaaagcgcagtgacacaaaacacctgattgatatggccacctgggttcagcacagttctgtacctctgcttcaaagcaaaaactggcctccttgataaaggctaccctggatcaaggtgagtacaggttggagaatgggtgtagagaaggtaggatgaatgaacaagggaaagggtgggaagtgtgggaatggagggtggagagtagagggcagggatgaccacaaagtcaccctgcatgcagtcaacacccagaattcaaaaagctgttgttcttttcttctgtgagtctgtctgctggcctctgtctattatttttttagtcttccacaaggcagacactgatcattctctctctgtccagatttatggccatcacaaagaacaattctcagacagggagcaggacatagggatgcccaagaagacaggctccagttctaccgtggacagcaaggatgaggatcactattctaaatgtcaaggtgatggggactgaggaataaagaaatctggagtagaaacaggtacagggattaggagaataacttgggcatcccattgcacgtacgtactccctgccctgctacaaaaactctcctctaattgtttttaagagacagggtctcactctgtcattcagactgaagtgcagtggagtgatcatagctcactgcagcctagaactcctgggctcaagtgatcctcctgcctcagcctctccagtagctgagactataggcacatgccaccatgcccagctaattttaaaactttttttgtaaggatgctgaggctggtcttgaactcctggcatcaagcaatcctcccgccttagcctcccaaattcctgggattagaggcgtgagccaccatgcttggcccctctaagtattaaggaaaaggcacctctcttcacctccttcgcactttgcctattccctgttattcctcccacaactccaagaaa

SEQ ID NO: 128212 - DNA, 1140 bp, Homo sapiens
gttcctggtctgggtcaccttcccactagtcctcatcctcttcagcgccctcttctgccacctcatctctccccaggctgttggtgagaacttgccaccagactcggcctgagctgggtggcctgagaggggccctgtctgtctcccccatcatccagccccacccacagccctgtgctgccttgccccatcctccccaccactgcctcttcagccctctccaattcccattcccatattctggacattcatctcccttttcaccttcaccttgaccctgcacataatctttcaacgcttttaggctctggaatccccgaaatgaagacaatacttcgtggggttgtcctgaaggaatacctcacaatgaaagcctttgtggccaaggttgtcgccctgactgcgggcctgggcagtggcatccccgtggggaaagaggtaggcctggcatgactgaagccagagctgggaggggccctcaggagccagggtggcaccaactctagagggagctctgggagtggaagtggatcaggggacaggaccaaggccagggccaggggacactaggaaggggaaatgctttggaagttcctccaactgaggtccaatgacaaaaaccacacagcttggggagcttggagcaggctcttagcctggacacccctgacatttggggctggaaaactctgtgctgtggggaggctgttctgtgcagtggaggggacttagcagcattgctggcctctgacccttcctagatgcccagctgcatcgcccagttgtgacaccagcatgtcctcagacattgccatatggaccctggaggacaaaatctcccctggttgagaacactgtcttagagatcatccagaccaattctcttgcttgaatctgagaaaactaggactgagaaagaggctgtgctattttcaaggttgctcggtgggttgcagcctccttccgttctctgctggtgttcatctttgccccctactgccatattccacccagcagccagaggcatcttttaaaaatgggatcagtctcatctgacccctggtcaaaaacttcttaaggctttccatgcctcttaaaacaaaattgaaagttttgttgttgttgttgttgagacagtgt

SEQ ID NO: 128213 - DNA, 1079 bp, Homo sapiens
tctgtgtaactcccgtatttccagcccctggcacagtgcctggagtaaggaatattattagtccagtgagtgctgcagagcctccatctggcctctgacccccgccccctcgctccccctctcccagggccccttcgtccacattgccagcatctgtgctgctgtcctcagcaaattcatgtctgtgttctgcggggtatatgaggtaaggttgagacagtgaaatgagctggggccaggtggtagaaggagtccggctgtgtgtccagggtgttgggagggctgcctctgctctgggctggctgtggtgctgaagcagcatcgcactaatccacgctcccttcctcgtctccctgtctgcctaccctggccacgtgatgcctctgtttagcctgtgcctgtcctccaaatgtccacccctctttcacctgtggccccacatggaggtctggtctgtcgtctgctcccatgctctccctgctagtccataccaccccctctgtgttagtttccctccacgtttccctcgtgtgctcccccatccctttgtagctcccaatccctcaccctacctcttacatacgtcccgcctgccccacccctccacccccttgtcccgcgtgcttctctgttgcagaccgtgcctgggcagcttgacctcctggtgtcggcctgtgcagtgggcgtgggatgctgctttgcagcccctgtcggaggcaagttgcacttcctccctatcccggttgcctaagcaagacttagaagggggttttgggtggctgccacaagctttggagtgggcatccagggaatgactgtggatcacagcccctgcggtccagatacctatattttttcagcaaagggctgtgtattattttgagactgcttgctgtttggtgcaggatttattagtactgctttctggagttcttgctgtctcttttctgcttatcatttattgatttacgtgcctggcatatatttgcctaacttttatttcattttctaccttctatttcattttgacactgtgctatgaggttaattcctttttgccaaactcactgagtttctct

SEQ ID NO: 128214 - DNA, 1054 bp, Homo sapiens
gtgctggggttacaggcatgggccacctgcctagcatcccggtgattaattttgtgtggggtaaaagagaggagggatctaggctaacacccagatttcctacaagggcaattgggtcgatagtggtgttagtaaccaagactgggtatatgggaagtgaaacagatctggtggggggagctagctgatacatttcactttgagtgtattgaatttgatgttcctgtgacatatctaggtgagaccatttttgcagcggggttgacgagtctgaagctcaggaacatggctttgctaatcagcagcatataggtgtagttgtggcatgagcatacatgaaattgagagagaaagtgtgtctatgagtaggaggagcaggagaccaaggacaaaggctggggttgggcagagggacaggagcagcagagaaggtagagagggaatccagggtgggagaagagagcaatgttccagaacctgagcagagagcttccgaaagctgtttttgtttttaatgctttgtttcctcttagctgcacattttatgtctggctcaggctaatattaaaattagctctcattccggagcatacagtgacagactgctagggaaagtgtcccagaaccacgtcgtaggaaagaaaacctagcccaggatttcaaaaaattgttgtaaaatattcatcagttggatagtttacacccaggcaaatcaaagctgactgcttttgttactggtatagaaaaggagagagactcactctacctggttcctgctgtgtcaaatcctccttttaggccccagaggcagctgcttacctgatgtgatgtgaagagcagggcagaaggggtgattggccaagcaagctctgtctgccccacattgcccattgcctttctctgtttcctgaaattctgttctcttctgttctcttctttcctcatcctgtcctttcctctcctcccctgctcatccagagaatagacattcagccctgattattcaccaggcactgtactaggtgctggttttcaaggaattttctttctttct

SEQ ID NO: 128215 - DNA, 1726 bp, Homo sapiens
ttacaggcgtgagccaccgcctggcccaggttttttaaatgatgaaatgtcagatacaaaagaaagagttcccttgtttccctttttccagggagagatataatgtttgtattgcttatagacttctttcaaagcgtgttcacgtctcagcttatttgaatggcttctcatgtttctttttatttggacagcattgattagcctccttaattatcagctcacctatctgaagtctatataaggcctcatcaaaataagtacaaattagcccaattagtgctctaccaattggccccgtacctgctaaatggatgaaataaaagggattgagtgaggttaatcttggaggattcttaaaatgagtttccaggaagctgagaaagatgtggggacgccgggcagggtggcgcctctcctgttccttctcaggagtgcggagcgcggtggtgcgagagggcttggagggggcgctcaggcagggcgtgggtttccctcagattcaatgatcctgctgggctcggtggagcggtcggaactgcaggccctcctgcagcgccacctgtgtcctgagcgcaggctgcgcgcagcccaagagatggcgcggaagttgtcggagctgccttacgacgggaaggcgcggctggctggggaggggctccccggcgcgcctccaggccggcccgagtccttcgcctttgtggatgaggatgaggacgaagacctctctggcaagagcgaggtgaccgcgccgggaagggctagggagtgggatagatcaggagcaaagggaaaagcgtcgtctgggctgggctgggctgggctgggacaggcgtagtttccctgaaagtagtgggaagagggaggggagagtctggtaactgagaaagccagaaattctggatcaggtaccatagagaccagtgcctctgggtccagggactaaagaagataaggttgcagatgatggtatcctcgacaattcaaagggatataggaatttctgaactggggggaagaatagagttcgctttcccagaacatccaccaactggtaaaggcagtgaaggcccaggcagtctctgctcccaggctgagacttcttactcttccttacagcttcctccttcccttgctctccacccctctactactgcccctctgtccccagaagagcccaatgggcctctgcctggccacaaacagcagccggaagcaccagagcctgcaggtgacgctcttccctcatgcaccccaactcaccccttgtgggttctctctggtcactaggacctgaccttgacctgcatgcaattcctatgcggggtggggtggggggtgaggctgggggattgagggaggacagggttcttattcatcaattctccttgttactgtcccagggagtgggagcagagggtgatttaggagggtagaagagagggtgaggtacctgggaagtgcagctctttggaggcaaatgttaggcactgggtggggcccctggccgtttcctgttgctttgtgtccatttccatccactcacctgtcctctcaggtcaaagaccctccatcttccagtccctgcttcactgcttgctgggcagagctcgccccacaaagaagaaaacaacccaggtgagaggagatgtgtttggggatacaggggaaagggagcctgcccttgaagagtgagaaacccacggttcttaaatcaggaaggcagaga

SEQ ID NO: 128216 - DNA, 1752 bp, Homo sapiens
ccaggggataggagagttggagcctagaagagggaggggtgttctgggtacctgggggttgcagggtaggttgggggcctgatgaggaagggcagagaggctctgtcccctgggaagaaggaggaggtcctctgatctgggggatctatgatcagttcttgcatgttcccagattctgggcagcggctaggagggccgtttggggtcaaaatcaggtatctggggtgaaaggaggctctgtgattttcgtgactttcctcctctggctgacagattgaggcctgggagcaggagcagctgagccagcctgtctgttttgattcctgctgtattgaccagtctcccttccagctggtggagcagacaaccctgcacaaggtgagtcttttgctgactgctcagggctgtggggaaggcaggagagctgtggggcaaggaacatgcactgacctgtgctcttcatcctcagactcataccctgttttcactccttggcctccacctcgcttacgtgaccagcatggggaagctcaggggcgtcctggccctggaggaggtaatcacgatgtgtcccatttgagcagcaggagggaggctgggcataggataaggggatgcagtggggacagaaggaatattagcatctcagaagtcccctcagattcccttctctatttctttcttttttttttttttgagacagagtttcactcttgtcgcccaggctggagtgcagtggcgtgatctcagctcactgcaacctccgcctcccgggttcaagtgattctcctgcctcagcctcccaagtagctgggattacaggcgcccgctaccacacccgctaattttttgtatttttagtagagacggggttttgccatgttgggcaggctagtctcaaactcctgacctcaggtgatccgcccgcctcggcttcccaaaatgctgcgattctaggcatgagccaccatgcctggcacccctctgtatttcttatgcagagattggagggggtagagcaagcagccagctgaggtagaggagactacgaagcctgttatggccacagccctgaagggaatggaattctccaccccagatggggcccacgtgatcttctgtagatagtgtgggtttgagatgggggttccaggcatgagtcacagtttctcggggatgcgctttgaggaaagctgcggaaaaaaggcagtggggggatgtggctgcaggtggtcactaggaaggaagaggtcacccaagggtctgagtctgggcaggtggatcttttgtcatgccccttttcttgtcctttttctgttttctttctctgattgttccttgttttctgtttctctttctccccgttttgccactctatatctttcctgttcttttttcctttcattgtacctgttcttttctgtgtctctcactgcccccgtcttttttctttttccaactttttaccctcttttcctttcccactgctcttcagctacagaaggccattgaggggcacaccaagtctggggtgcagctccgccctccccttgccagcttccggaacacgacttcaactcgaaagagtaccggggcacctccatcttctgcagagaactggaacctgcctgaggacaggcctggggccactggaacaggggatgtgattgctgcctccccagagacccctgtgccatctccttccccagagccccctctctccctggccccaggcaaggtagagggcgagtt

SEQ ID NO: 128217 - DNA, 1110 bp, Homo sapiens
gagagtcacatcttcaccctccccaaatcagcagcaggaagcctggctatgcactccattagcgtgctttctctacaaagagaggccaggtgctgtgagcatccccaaacccttgctccgtacccaaggtttttctccccagcctgccatcccgtatgccgttcttaattctaccattgtgcccccgctccgacattctcctcctttgcctcccctgttcccagtctcctccatcccccaaataagacactcacagtcagaggatgccaccacattctgtttagtgtcattgaacacagcctgtagccttctccagcatcacatccctcccacttccccaggccaagagagatgctgaagcctgggtgggggactggcagtgggcatttgagcccatgcccttgtgtacataatctctaatatttatatatattgatatagaattctctctataatatatgtcatagaatctctcttgggcctggcgtgggaatgtgacattaagaaaacatgctaagactggccagaaaaatggatatttcccagacctggaggatggtgtgtgggatgtataggtgaggtcgtggagaagataataaactcattccccaagataccctcttcaacacaaggacaagaaggaaggtgtgtggtgggggaggggacaatggagggggaggagtggaagatttggattttcatttaataaagtcaattgaaaatgaaagtgcaccccccctccaaaaaaagaaaatcatttagcaagagcagtttcattcacaagaatataaaaacagccctgttccaggactgctgtaaaacgtgctgcacagccttaaccccaaaggaaaagcaaccctttcccaccccgaaacagcctcttcctgcacatgcccctccccaccccctgaaatagacgataagcaacccccatgcaccctgcccccagcaccagaagagtcctaagatggtcccaggccagctcctcagtctccctcttcagagcgagtaggagctccttgcagaagacagacccccacctgacttccatctgcagcaatatgccagcaccctggggaaagcaggttcatgtatgaaccctgctagagt

SEQ ID NO: 128218 - DNA, 1027 bp, Homo sapiens
gcgcccggcctttcctgacctggtactcccagggcgccctgcgcccctcctttgcttccccacacgctctgggacccctgagagagttcttgggttaggggttagagcggttaactgaggggagcttgggtgaggggtagagggaccccggccgacgtctttctccttcctaccccagactttcccctgcctccacctccccttgctggggatggcgacgatgcagagggtgctctgggaggtgccttcccgccgccccctcccccgatcgaggaatcatttccccctgcgcctctggaggaggagatcttcccttccccgccgcctcctccggaggaggagggagggcctgaggcccccataccgcccccaccacaggtacggaggcctgggaggggcggctgcactggacacccccaaggagaggagaagagggccctttcttcttacctcccctgcacctctgccttgggggtggggggatagaggcatggaataggtgctctgacctctgaccctctagcccagggagaaggtgagcagtattgatttggagatcgactctctgtcctcactgctggatgacatgaccaagaatgatcctttcaaagcccgggtaagggaccggagagtaggaaaagcagggctcagggccagagagactgggcatagaactaaggaggatggtgtcctcctgactgcatctctcttccctctcccaccccttgcaggtgtcatctggatatgtgcccccaccagtggccactccattcagttccaagtccagtaccaagcctgcagccgggggcacagcacccctgcctccttggaagtccccttccagctcccagcctctgccccaggttccggctccggctcagagccagacacagttccatgttcagccccagccccagcccaagcctcaggtccaactccatgtccagtcccagacccagcctgtgtctttggctaacacccagccccgagggcccccagcctcatctccggctccagcccctaagtt

SEQ ID NO: 128219 - DNA, 1015 bp, Homo sapiens
cttttccagacatagaaaagacccacccagtgcacttgctcctgtgggcgtgtctcccggcagtgctgatgcaggtcagacagcccttcccggagttctcagggttacctctcagggttactggcagcgctgtccttaacatccaccccccactccagtccccgggatcccctaaatgggaaggttgggctggcctagggggtggcctttggaccttctctgaggctgctggggagggacctgagtgaggtagttcagaggcccctcactcgagggacagggtctctgtgtgggggtggggctgggttcttgcagacagctcagtgggtttaacctgcaattcctgcctgtgttgtatcctcacgctgacaggggctgctcagcagcaggcaggccgggtaggtgtgtgtgcgcgtgtgtgcacgccattgcgtgcccctgtcccatgggggcgatgtccgagcatgctctgtggagttgatgcgtggccctggagtgtccggtgcttcagtgacccgagctgctgtgtgcgtggcctccgtccgcccagtcattctggcctgtctgtgactgctcagggggtttgggcagagtgggtggaaatgtcttgctgtacgagatccaggcttaggtcccttcccctgttatttgtgtggtgctggggatggcgggggtagggggacgagggagaagctttaagggtcaagcctgagcatctgggacacgagctgggagctaagcctcatcggaagaagccgggtaggctggcctgggaaggttcttggaggcagcagccctctagagtgtgaggaaaatgttgggattgcaggtgcgctcccctggggccccagggcccctgactctgaaggaggtggaggagctggagcagctgacccagcagctaatgcaggacatggagcatcctcagaggcagaatgtggctgtcaacggtgagcccaccccaccgggacacccccaccctgcccccacatcacggtgggggccagggctgtgg

SEQ ID NO: 128220 - DNA, 1223 bp, Homo sapiens
tctcagacaggagacttccatgtcttaaccagccctcagtcaggtgcccagaaccggccactccagcaggagaccggctggtgatccccttctgttggggcttcccaggacagtcccttcctataggcctgtcgacatagcaggactgtcagccagtccactgttgtgagcacaccaggaaacaggccaggaagtgggctcagagataatggtggggtcaatccacagtctagatgatctctgtgcccagacaccgaacttcagtgctggctgctgatgctcagaggccaaggccaaccagatcagcccatgtacccgctgtgactgacatgcccatgtcccacaggatgactcttcgcctgcccagcctgagtggctcagatgggatcccatatcgaaccgtctctgagtggctcgagtccatacgcatgaaacgctacatcctgcacttccactcggctgggctggacaccatggagtgtgtgctggagctgaccgctgagtaaggagctggagctgtctgggcaggggagggctgcgggggtggagcctccggactcatgcccccacccttccttgcccacagggacctgacgcagatgggaatcacactgcccgggcaccagaagcgcattctttgcagtattcagggattcaaggactgatccctcctctcaccccatgcccaatcagggtgcaaggagcaaggacggggccaaggtcgctcatggtcactccctgcgccccttcccacaacctgccagactaggctatcggtgctgcttctgcccactttcaggagaaccctgctctgcaccccagaaaacctctttgttttaaaagggaggtgggggtagaagtaaaaggatgatcatgggagggagctgaggggttaatatatatacatacatacacatatatatatttttgtaaataaacaggaactgattttctgcctccatcccacccatgagggctgcaggcactacaaaagagctgactactgagaattctggaaaacaaggtttttttttatttgtagctatagctacaacttggcagcatgggggagggtgggaatgtcctggagggtctcccagccctccgcaagcagagtacaaaggctgctcggggggccggccgagggcgcgggtgcagcagtgaaagcagcagcactaaacctggtgcccccctcaggtggggtgtctggaagacggtgggca

SEQ ID NO: 128221 - DNA, 1056 bp, Homo sapiens
gtagcgtttcatgcgtatggactcgagccactcagagacggttcgatatgggatcccatctgagccactcaggctgggcaggcgaagagtcatcctgtgggacatgggcatgtcagtcacagcgggtacatgggctgatctggttggccttggcctctgagcatcagcagccagcactgaagttcggtgtctgggcacagagatcatctagactgtggattgaccccaccattatctctgagcccacttcctggcctgtttcctggtgtgctcacaacagtggactggctgacagtcctgctatgtcgacaggcctataggaagggactgtcctgggaagccccaacagaaggggatcaccagccggtctcctgctggagtggccggttctgggcacctgactgagggctggttaagacatggaagtctcctgtctgagaggaagctgaaagtaggagaacagaggcctggcacctgggcgtggtcctgcctttttccatagtggctgcttgagttccgggagcagtccttcctcaccaccttcagcttcggctgttattcttgcactctgacacccacaatacaatgagtgttcctgtactaaagctcgccagagccaaaaaccattagcaaagtaaatctgctgggggaaaaaatatccagcattccagaaagattagcacacgcagtctccagtgtatgagggagttgcgctccaaaagatagtttcaaaagttggaacttagagcatgttttctcccagaaacaaggttatatatggtggttggatacagaggccagttggccaggctggctacccaataaagcacttgaagaacagccttgcctgcttccccaacctgagcgctcccccacccccccatcagttcattctctacactcaggccatatttttggtaaaatgcagctctgaccatgtccccccatcctgtggacagcttttaagaattggttctccaggccaggcgaggtggcccacgcctgtaatcccagcactttgggaggccgaggtgggcggatcatgaggtcaggagt

SEQ ID NO: 128222 - DNA, 1552 bp, Homo sapiens
gcgtcgtcacaaagcgtacgatgagtggtctccctcagctgggggcgggaaatgcaggaaagaggggtgaaaccactggaagtggagggaggatgtgtggccaagggcaggaagcccggttctgagtgtgatatgtgtgtctgtgtctcaggaaagccgatcatgatcatcacagaatttatggagaatggagccctggatgccttcctgagggtgaggagggcagaggactagctggggagggggatgcaccatggtaccctgggcactgggaggagacctggcccatcccctgactcacccactcaccctgctgcaggagcgggaggaccagctggtccctgggcagctagtggccatgctgcagggcatagcatctggcatgaactacctcagtaatcacaattatgtccaccgggacctggctgccagaaacatcttggtgaatcaaaacctgtgctgcaaggtgtctgactttggcctgactcgcctcctggatgactttgatggcacatacgaaacccaggttagaggccggtacaaacccagtgcacattcacattgccccgtaacatgccattcatacagtcacatgtatataggcacaaagacttggccaggcacggtggctcacacctgtaatcccagcactttgggaggccgaggcaggtggatcacaaggtcaggagatcgagaccagcctggcgaacatggtgaaaccccgtctctactaaaaatacaaaaaattagctgggcatggtggcaggcgcctgtagtcccagctactcaggaggctgaggcaggagaatcgcttgaacctgggaggtggaggttgcagtgagccgagattgcgccactgcactgcagcctagcaacagagcgagactttgtctcaaaaaaaataaaataaaaatacaataaaagaagcagaaagactcgtgctcaggtggacaccataactttccgtccctgacccatgtgccttcttagggaggaaagatccctatccgttggacagcccctgaagccattgcccatcggatcttcaccacagccagcgatgtgtggagctttgggattgtgatgtgggaggtgctgagctttggggacaagccttatggggagatgagcaatcaggaggtgagcccagaatattcttcctcatcttgtctccaattcacacctcttatttcctcccaaggtcctcccatggccttttcctgcaaatatctttatttattcatgaccttcagtttttctgtactcctggctcctctggttcttcacctcatgccctgctctctttactcctcccaccctgatcctcccactgtgatcgtcccaccctggtcctcccacctcctcccatcctaggatctccactgcaattatcttgtgtgaccgtcggtttctcatgggcctccaggttagcttgctactctagagcatcctcctgtcccgccgtgcaggttatgaagagcattgaggatgggtaccggttgccccctcctgtggactgccctgcccctctgtatgagctcatgaagaactg

SEQ ID NO: 128223 - DNA, 1096 bp, Homo sapiens
ctagcggctcctaccggatggacatggacacaccccattgtctcacgtgcccccagcagagcactgctgagtctgagggggccaccatctgtacctgtgagagcggccattacagagctcccggggagggcccccaggtggcatgcacaggtgagtccagggggtggggcgtggccatctggagggaggggctggatctttgctgagactttgtcagggttggatttttccagagcttgtcagatattggagatggtccagggtgtcaggcacttttagcccctgccctggcaccctgctctccctagaagaatgcagagatgtagtcaaacccagtagaaatcaaatctccccaagaggacttcagaggacatcgagaattgggtggtggtggaggccggggatcagcagctcgggtgacagcgaggtcggcttctactgatggctcctcttctcccacaggtcccccctcggccccccgaaacctgagcttctctgcctcagggactcagctctccctgcgttgggaacccccagcagatacggggggacgccaggatgtcagatacagtgtgaggtgttcccagtgtcagggcacagcacaggacggggggccctgccagccctgtggggtgggcgtgcacttctcgccgggggcccgggggctcaccacacctgcagtgcatgtcaatggccttgaaccttatgccaactacacctttaatgtggaagcccaaaatggagtgtcagggctgggcagctctggccatgccagcacctcagtcagcatcagcatggggcatgcaggtgagaggctgagaggggctgggacagggacctggtggagacagaagggcttaagaccacagaacaaactgatgggcaggaagccatagaaaagttactaaggttatttcctttttccttacatatccaaccttatccctctggacccccagagtcactgtcaggcctgtctctgagactggtgaagaaagaaccgaggcaactagagctgacctgggcggggtcccggccccgaagccctggggcgaacctgacctatgagctgcacgtgctgaaccaggtcaggatg

SEQ ID NO: 128224 - DNA, 1023 bp, Homo sapiens
ttccaaagagaaaatgttgtaaaatttgttactagtaataaattgataacgatatgctctataactcatcatgttattggcactgagtttgggaatgcctctgaatagcagaaattgtatggactgtagagtcccaatgcctggattccagtcctagccccatgatgtggtagctgtgtgatcttatacaaggtctttatcttctattagccttggtttcctcatctattaaatagagacaataagccatcctacctcataagaggattgcatgagctaaatagcataatgcacataaaatgcttagcctggcacctcacacatacaaggctcagtgttcatggttgtggaaagtattaagcaaacgattgtttctgttatgtgggaaagaagcaggactttgccattgctcccctttcttccccaccttctacccaggtaaccacggtggctgcagaccagagcttcaccattcgagaccttgtgtctggctccgtgaagctgaatgtggagcgctgctctctgggccgcctgacccgccgtggcctctacctcgctttccacaacccgggtgcctgtgtggccctggtgtctgtccgggtcttctaccagcgctgtcctgagaccctgaatggcttggcccaattcccagacactctgcctggccccgctgggttggtggaagtggcggggacctgcttgccccacgcgcgggccagccccaggccctcaggtgcaccccgcatgcactgcagccctgatggcgagtggctggtgcctgtaggacggtgccactgtgagcctggctatgaggaaggtggcagtggcgaagcatgtgttggtaagaacggaggcggtgagaacctgaggaaccactcgggaggattgcaggagtaccccggcagagaaggaggccagtgctccgcctcagtgggtttttaacctgagtgtcccagagcagcggacacacacatgcagagatgtttccagtagaagggattggggcaggaaggggtggtggtg

SEQ ID NO: 128225 - DNA, 1117 bp, Homo sapiens
atttgacattttctggttagtttgtcatgagaggaggcacatcttcaagtttagtctctgttcttaactagcagtacaacttttgtcaaattatttatgttctctggaccatggtttcagtttccctagacctagatgatttctgaggctatattcagggatggtctcagaaaataaaaagctagcaggattttgagtcaggagactttggccagttcccttagccataatgtgcctcagtttccttagctataaaatgagattaatcacgtccaccccacagagtcagtgtaatgatcaaaagaggagaaagtgctttatgaactgtaaggtactgagcaaatgttaattggctaggagaatggtggaggctaggaattgctggagttctcctgcaggcctcccagcttgctcccagagcagaacaacctcaattactaagacatcattatttttccattccaaaatcaactttactgagggacaacttgcataaaataagttgcagccattccaagtgtacggttcaatgggctctcacaaatgtatatgcaccaccacctcagtcaagatgcagagcagtttcagcatctaaaaacattcactggtgctcctgtgaatcaatcccacctccagccttagggtttctgtccatttgggtgagttttatcctttccagaattttatgccgtctctggactctgggtctttctctttagtatgatgctcccaagatccatccttctaagactcatccttctaagatccatctttcttgttgcctccatcaacagtttctctttttcgatgctgggcagtattccctatagagatgccctaagacatcatttaaaattacaaaatcaaaccccaaaactcctccttttttttggtcccctaggaaccacaggcctcgtagcagacagggcctcccagagggacacctctttccccttctggcgtctggccctgttctcattctgcagtcagaaaggaaagcctgcagagtccctgcagcccaggctgtggcttgttcttacaaacttgacgttaacactaccctgttcatattattccccttctactccctacccagctcctttctgactgaggataa

SEQ ID NO: 128226 - DNA, 1050 bp, Homo sapiens
gaaattagctgcaatttcctgcaatttataaataagactccttataaggaaaaaaaaacatgatttcccatttttttatatgtattgtttagagggttgaaataaccatgaactaaaatctggagtatttaagacatggtactggataaacacagcagggctccctttgcaatttccattggagaatttgtgctctaagaatgagcagagcagaattaatgctgagtccctctgccacccctccaacaagtctccatacccagtgaggtcagagctgtccattttgttctcccaactttcccctaagaactaaaaataacaatattagcaaagctaacacatctatagcgctcactgtatgccatccactgttctaacagctttatatagaactgtacctctaataaagaatgcatgtgtcttttgcagttgtgaagatgacctctccgacgacagagaagagcttctgcatgggatttcagagctggacatcagcaactcggattgtttcccatcccagctgctagtgcatggggctttagcctttcctctagggttagattcctaccatggctgtgttatagcggctgcccgctatggccggggccgggtggttgtgactggccataaggtattattcactgttggtaaactgggcccctttctgctcaatgctgtccgctggctggatgggggccgcagaggcaaggttgtggtgcagacagagctgagaaccctgagtggcctcctcgcagtggggggcatagacaccagcatcgagcccaatctgaccagtgatgcaagtgtctactgctttgaacccgtgagtgaagtgggggtcaaggaactgcaggagtttgtagcagagggtggcgggctatttgttggagcccaagcctggtggtgggccttcaagaaccccggagtgtcccctttggctcgattcccaggaaacctcctcctcaacccctttggcatcagcattacaagccaaagcctcaatccagggccctttcgtactcctaaagcagggataaggacctatcactt

SEQ ID NO: 128227 - DNA, 1110 bp, Homo sapiens
gtgggaagaatagcccagctactggaagagtgaactgctctatttgtttctttgtttatccattcttcgctaagctgagcctttgctttcttctctgcagaaaccaatagagccatggcgactccctctgctgccttcgaggcccttatgaatggtgtgacaagctgggatgtacccgaagatgctgttccatgtgaactgcttcttattggagaggcttcatttcctgtgatggtgaatgacatgggccaggtcctcattgctgcctcctcctatggccgtggccgcctggtggtcgtgtcccatgaggactacttggtggaagcccagctcacgccctttctcctgaacgcagtggggtggctttgctcttcccctggggctcccattggtgtacacccatccctggcacctttggccaaaatcctcgagggctctggagtggatgcaaaggttgagccagaagtgaaagactccctgggggtttactgtattgatgcctacaatgaaaccatgacagaaaagctggtcaagttcatgaaatgtggtggcggcttgctcataggaggacaagcctgggattgggccaaccagggggaggatgaaagggttctgttcacgttccctgggaacctcgtgaccagtgtggctggcatttactttactgacaacaaaggggacacgagtttctttaaagtctccaagaagatgcccaagatcccagtgttggttaggtgagtatgttaccccactggggagttggctccagggttgaaaagcagacccagttcttatcttcaggttgctccaaggctaacagaagagtgctcccaggcactcagatatggaatcactacatatcaactagattttttaaatgccctgagacataggaggggcaaggtcctcactgcccctgtcttcccaaaccagaccatttagctctttgataatttgaacttaatggtggctatggtcccagtgtcttgcttaatcaaaactgtgctgttggccccaacagttggcatagttaatccagatggtttataggagaggttgctttcaacaggaatgtgaagaaaaggaaaacaggcatgaaggaccccatga

SEQ ID NO: 128228 - DNA, 1028 bp, Homo sapiens
tgggtctaaagataggcacacctttgaagccaagtaggcaccataaaattgtttttgaaaaagagcgcagacattctccgtcattcctgccgattgtgatggtcttttaagtattaaacattattagcctttcaaatattaaactttactagccacctttgtcttcttcatcttcatctccttccccttcttctcctcctccactttctcctagaaagaagtatcatcttttttaacaatattatgagcaacacatgatatattttccattacttgactactagtgagattgagcattttttccacacaagtggccatttatattttcttttctgtgccatatcttctcttagaaggacaggatttccgtagatagaaagatttgggagagggaacagaatggaaagagattaggaagataatctaaaatgaaaacagggcatgtccaagggcgcctggcagacgggatgctgcagggagaaaggcagcaggagaaaaggcaggaaaagccagggagcagccagctctgcaggcagtccacaccaggaggcagtagatggtccccagagaccaaggtggagctttgagattaaataacatgattagagtggttttagaaaagtaaaggtgggaagaggtcttggtaacttagaaattgggtcggttgagtccaggcatgaattactaaggacctaaactaggttaatggcagtgtgattggaaaccatgaacaaggacattaataggacttgtgaccagctggatatggcagcagcagggagaagagacatactgtgacactgtgcactttgctatcctgattatttgtgggcatcaggaggagcagggaagagacaagcttcttgcttaccaaatgttcatatcagtatcttctcaatagtcccctgaggtaggtaggtcattaatgcttctgtttaactactagaaacgttgagcttatgtaatttgccttaaaagagctcacttagagggaaattaataaattcaagacttttttagtttagaga

SEQ ID NO: 128229 - DNA, 1049 bp, Homo sapiens
ttgaggccagcctggccaaacatggcgaaaccccttctctactgaaaatacaaaaattagctgggcttggtggtgggcacgtattcccagctacttgggaggctgaggcaggagaattgcttgaacccaggaggcagaggctgcagtgagctgagattgcaccactgcactccagcctgggtgacagagtgagactctgtctaaaaaatacaaaaaaaaaaaaaattgttgacctctggcatatttcatgctgcctactgggggtgggcaatggggtcagaggtaccagaactgcctcctgaaccagcctggctattctttctgcttccctccagcttcagttggttctccttgattacagcgctctctctctctctctctctctctctctctcttttctcatcaactcgacctcctcttgttctgccagctctgacttgtcagcatatttttttttgaagtcacaaccctggattcttgtgcgcttgtccagagagttagcacacaaggcttttcctgacttttcaactagtaggaaagttacaaccgaccatttagggagtttgctcttcccatcaagactgttcctgtctgcagggtgtatttgcatgtggaggtcactctagctctcccaggtattcttcctttcactttgcagactatggttctcagcattttattattttttttctttttcatttcttactgcgtggtcttggtgactgggtttcttaatcaagcctgtcatcccatcctgagattttgatattttatttgggcctatatttcctctataaaggcctagagaggagagagaatgatgccatggaaagagaatgagatttagattcagacaggggtaaatttgaatcctgcattccatttacttaatgtgaaatcttgggcatattcaccttcctgtgctttctctgaatcttcctacgtttcatttccctaatgtcttaattggggataataatatgtaatgatacctacgtcactggattgttgtggtgattcaatactgtaatatatagaaatcaccttag

SEQ ID NO: 128230 - DNA, 1032 bp, Homo sapiens
tacagcaaatgatgtgcttgcttttggaacattggtcagtacttccaatacctacgacgggtctggtgttgtgactgtggaaactgaccacccactcctctggaccatggccatcaaaagctaacctgttgactggcatccataagtgtgcctctgccttatctcatttctcaacagttcattgctcaacaagaacgattcacctgggtttgcaagaatctaaacctctctaggggaagcccactgggtttaaagatgttagtgtttagataatacaggtaacattataaatgacagatctcaattttatagtagtgggaaagatacatgctaagaaagcaaataagctctattatattcggttggaacctaatgggaatcattccactatacaattcagtactgattattcttcttacattattaatcattccatttatcctagaaaattgtttttaatttgaatcagagaaaactgttgaggttcctcttggagtctagaacatccttaaatgtctaacaacaagggctacctctgagtaccttttagtattagttttctgtatatgatatatattatcttatactgaaaaaaaattcctttcagattggggtgttagaagtgcaccaggtcactctgaccttattactgtctttggtattgtcttaaataaatcaagaatcattgacctaattgttaaatttaaaaataggtagttagcaataggtggaaagagaaatgatgtgaaagataaatgatgattcgtggagccctactcacacattaacccccaaattcaaaagtaagaatgcaaaagtctagagggggtaacagtctgcatcatcatcacaacctaaatggagaaagctgtgcagaggaaacttaagcataaaaattgaattcgtttctgacataccttagactgaaaaactgttggttcatccagaagtgtattcatattaccagaaaatgagtttgtctatggggatacatgaacttcatatactaaggagcctaactccaaagcctgc

SEQ ID NO: 128231 - DNA, 1044 bp, Homo sapiens
catgggggcgaacttcccccttagtgttctccacatagagttctcacaagatctggttgtttgaaagtgtgtagcacttccccctttgttctctctgttactgccatgtgacaaaggtgcttgcttcccgtttgcccttctgccatgattgtacatttcctgaggcctcccagccatgtttcctatatatcctgcagaactttgagtcaattaaacctcttttctttataaactacccagtctcaggtagttctttatagcaatgtgagaatggaccaatatacttgaaagtggaacttcaggccagatctctcagaccaatggactagaagatagagacttaagaaataagtgacttgcttgggcttggacttgaacccagtgctcattcattttcattgacctgagaagtaaccattacatcaatcatgttgaaaatttctttatcaaatttggaattggaaagtttgagtaatgcaaaacatcgacctaaacgcttcattaattactccacagagctgtctaaaaccataataaacttacctgttgttcattgtagctgtttacaggcttaagaaagtttaaggagaatgtaaccttataaatgtttaaccataagggatgataaatgttaggattaatggtatgtcagagtgtgcatatttttaggattctatgttgagattggagaaattcccgttactataaaatatttgaggggcaatttacctgataagagaaacaagggtgtattaccattgattgattatatagtaaacccttaccttgtctctcttcacataatgaatttcttttttccttacagcctgataagaaaatttaatgggatgcttccatcagtaataaaaccactgagccatatagaaagtggtttttgcatctttcccaaagtgtgggaaataccttgatatcagctggaaagagtcattacttccacattaaagttgtgctaaagtgaaagcttaacaagcacttagtttatcagaaacacagtagcattttccaaagctccatccatggatg

SEQ ID NO: 128232 - DNA, 1100 bp, Homo sapiens
catggaagggagtataaggatgttctgtcttcagggttatgatttgtggaattacttggttgttcccaacaaacaaaattgcaaacgtctcttctccttgtgggatgtggtaagacttcatttctgtaatatattctgtgctgttgttctgaccaaacctgatgacccaacgatcttttgtttaaggtgaagtgatgtattttaaagtccagatgtaccacaaatgaagttctttagacattagaaaaatgtcacaattacatactcaccaactactcacccacctgactgcattttacactgcctgttactgttgctagaaggattatgcttacaggtagaattcacagagcacctacgtgaaatgagttagtatgtacttatgtaggtactaactgttcaatgatgcttctttaagaagatatatcctgtaataaactgaaaagcaggatcttcaagaactttcagtatgaaatattttccatccactgttatgcttctagtgattaacttgccttattaatagctctgtgagatgtttttctaatcagtgcacacgagctgtcatcaaaactagaattcctaattctgagccaaaacagttggagaccaaccaaatcaggacctttaataaggcttataaggaaaaaccatcaatcattcattccctctccctggctttgcatacattattgaaaaattttatcaaagtttttatactaaaaagccttttatgacatttgaatgttatacatattagcatgtagtattatctaatcaaaatttgatttgcaagggtgaatcagctaatgtattcataattttaatcctgttaacaactctgaaattggctgataattaccttaggattagagactctaatttgtacattggtaatgtgtttccagtcaccagctaatgtaataacaataataaattatacttctatcttcattgagagtgtgatggacagctgaattaggatatttccactggaactgaatatcaaacttttcccctaaatattaaagccttgtaaagtttctgaacattcaaggccacgtttagcgctgtgctagtcaaggcttatcatgttccca

SEQ ID NO: 128233 - DNA, 1048 bp, Homo sapiens
cactttgatgatgattcattagccgtgttgagatcccccggccgctccagcgccagcgtcacacttgggctgtcttctcatcttaattgcaaggtttcacttctggagaagcacagcagcctttgccactcacctattttctggacacatttaatttcaaattaacaagttttccctcgcaactatctatctctaaatccggtttttcgtgtgtgtgtgtgtgtgtgtgtgtgtgtcttaatgtgcttaggaaaaagggaaaaacgtgtttaggaaaaaagtgtgtgtgtgtgtgtcttcatgtgcttaggaaaaaagaatgctttcagactctcttttcttaaacaactacagatgataactaatttttatcttaacctttaagaaattagttatgtgcagtgtacaagtggaaagtctgccaggagagagaaacaaattgtggacaattgaaatctgacatacaattaagaaaaatgtaaattgaaacttgtggtgttttcactaacttgtatcccaccaaatgctgattttctagagataacagtgaagagatgccatttcctgctgccatggtacatgccaactaccatataaatttaataaatgaggctcattccctataggtgggtgcagtaccaaagggaggagaagtctggcttgtgcttgtaggacaaagtgaatgaggacagagctagctctggcagccttctcctcctcatcccctgctgctgcaatggtgatataaatatgcgctctgttctcccctatccttactatgtagctctctttctttaaaatgagtaactttgaactaaactatctcaaaatctttttcatctctagcattagtctttcttctttattctcagtaatagaattgtactattttatcctctcctcctgagagcctattaaaagcatttgaggtccaacacatattccattttccccataatacatgacctcaccccctggtattctcagaatgtgttctccctttaacgtctccccctgcacaaatgttactcatctacaagggccattt

SEQ ID NO: 128234 - DNA, 1038 bp, Homo sapiens
cttcaaggaaaatcaaggcataggttacatggagagcaggtaaattcccaagctaaaggggtgcgtcagggaattatacagtattttctttccattccagagaaaagagtaggattgaactagcaagagagggtaaagatcctctggctttgagaatattataagagccaaaaacaagaacaaatccatgcctttttaattttttttgttttttgacttctagctttagggttcatggcaggtttgctctctagataaattacatgttggggggtttgctatacatattattttgtcatccaggtagtaagtatggtacccgataggcagtttttcaatcctcaccctcctcccacccgcctcccacccgcctcccaccctctgccctcaagtaggcccgatgtctctggttcccttctttgtgtccgtgtgtactcagtgttagctcccactcaaatcagtgctttaaacatcttgacaaaaaaaaatctctggagattattgcataatatataacttaccttctctgtatgtaatttataccttgactgttccttaaaatgtagcagaaacaaagtatgtatctgtttacttcaattcataatgaggagggaagatgacaatagggttcaaagtctgactctgtaactaatgaattaaatggtactacaagtaacatggattcttcatatatacaaagaggactgattgtatatatgatgatagatggtatccaaggtttcttttggtttgaaaaccatggtcgctgaagccacagagaagcgcgtgagtccagatcctaaatgtcaggagcttgatattctaaggaggcatccctctcctccttacattcctgtgtggcagcaatgaacggtccccatgagaagctgtaataggatgagactcaggggacttttgcttggaagctgtgttgggatgacatcgcgttgtgcatacccgtctcttgtcggttttatgagatgtagttcactgtatgacagtggctttgaacattgtggaagaagacgtcctatggca

SEQ ID NO: 128235 - DNA, 2120 bp, Homo sapiens
acaaaaatgccttgtattgctttgctgaggactcataaaaatgactggtggtgctttcaggcatcattcatcaggtttacattttagagaaagaaaaaatctcattatccactccgtactcatttaacttttaagtgcttagaagatttgtcataacctagactcaagctctgaaatggtaaatcttgacacatctcaattttagcaactcatcttagcagtgctgaaacgctgagtgctcataggtacaggagctttatattctattttgccctaattctttcacattttttatacatcactcctaactttataatgttgttagcttttacaccttcctttattttaaaactggattagtctaaaagtttcctattcagtaagaagtaccaaatgaactattgagcacgatgcataagcattaacacatttaatcgtggagggcaagtgaagagtacaattcaaatgggtcaagagaactagatttctatgaggtcattaagcattctatttaccttaattttgtgctcttatgacactgccctttgccataccatgcagacttcttatgcagcagaaactgtagaagtttaggctaggggagaagggactgagaacctatatgtttttgttcattagtatctgaaaagtgatgagttaaaatgtgtggctacttatcttaaaagtgtatatatatatatatatcatacatatcattcttttacttgcaaaagtacattatttatgataacatttagatactaactttcctcatttgaggaagtagtagtaaaatgtgtggctacttatcttaaaagtgtatatatattatatatatatatgtcatacatatcattcttttacttgcaaaagtacattatttatgataacgtttggatactaactttcctcgtttgaggaagtagcagcactctttcccttcagaatacttttttttataacttgcttaaattgaatgaggtcatttattaatactcaaagctaataaggcatcatcctgtaactttcagaagacgaatataagtagaaactatttaataggggaaaaactgcctggtttttaaaactttccttttatactttgtaatgtcagattttttttcttaacaaaaagaaagttggataagacaactccttcaaaatgaatcctaatttatctctattggatgcatgtgcaaacctagctcctgttccaccagtgtccaaaggttataaaaaattgaacagctaatttttaagtagtatttaaaattcattgagaatgtaaaatgaccacaaaattatatttttccgataacttcttatatccactgtgatgtccaacttagagtcagaatgtaagggttcacattttaatttctacttggacagtatgcccaaactctgtactgtgaatgtatgtcatttatggagatgctaggatgtaaaagcattcaaattacggtgcttttaagacaaacagcaatttggtattattggttattctttctcctacactaggcactatacccatttatttggtctatgttttcacaacagccttgagattttcggaaagtgacctaacaatcctgtatagactggtcttaggatggggaccaaggctgaacctgggtaatatggacagaggtgaatttgtagtaatgtgtttcatgtaaaagcaatgcatacaagttttgacccatcttctgctttttgttttttttctattggcttgtctggcaaaattagagaataattaaaggtgaaaaacaaagcctccttcctcatacagcatacctgtttaaaaatggaagactataaaactaatttcactcatcataacaagaaatatatctatgatagtaattgaaatagtgtgcagcttgatctctcattaatactttggtaatttataagaaaataacagtatcaagaaaatgtgaggtccatattatcttatgttttttcactgcttcccctcccaaaaacataccatattagaagtcaaattataatcagagggctgatggtcaagaaggaattagcgtgataggagtgagaggaaaccgatgtatgatagtatcagattttaggaaaattgatgtgctcattctcat

SEQ ID NO: 128236 - DNA, 1582 bp, Homo sapiens
gaatgtgaacttctttttgccataggttttggaaagtcattaaaagattttggttagcagtacagatatgctttttagatttcttatcaatttatatgtttgttaaatacccatagactcccaacagcttctgaagtttgaaacttactactattgtgaagcaatgagctttgttctattgcactgaattgatggtatgactgctaaagtattcagtcataacttgtctctgtatagatgctctggtcaatatattactagttaaagatgcagtacaatactttttaaaattataattggcagattcactgatagaaaaagccacatctaaaatatgaattctacattaaggtatttttactgttttgggtttctgtgttttccctataattggtataattatgagctttctgaaatgcatttggcttgggattcattggattttcttccatctatagattgttgtctgtcatcatttctggaaaactctcaatcattatgttttcaaatattgccctattctttttctcttttcttctgtacctccaattaaatgtatttaagatcctctacttgtatcatatatatctcagcactttcatattttctatgtcttaatctctctgggcttcattctgaagttcttcaccacctctgtgttctgttcactgtcccgcttcagctctacctatctgccgctagacccaccctctgcgtttttaattcctgccatgattattctttcttacacgcttgccctttactcacattttcaaggggctctttcttaaaacataattatcaaactggttttatagtctagaataattctaatgtaagccagctgccttttgtgttcacttttgctttcacatttcgtgacctcaattccttctctgttttatgatttttggcaggacctcacatttctgagaactttaagtgtgggaattatttgaggtgtgggttaaaagtaaatccaaggagaatttacatttgcttttgcctggctgctgagtggacttgtagcccagttctgtgggagcactaagtacttaggacattttgtctgagactattttggaccacgttgtcagtgtagactctgaatgtaacactgctgagaatctgatgtctggttacaaatgctcaggggagacttttctcatcttctcagttatggagtgccaaagtttggttggccacttttcctagcagaccagtgggagtgttgttcatattcatcttgatattttggatctctgctttacgtggtacagcatccttttagacgtcaaccttgggcaggccttgggctttgtcttctgacaaccttccctagttgggggctttagaaactgaagctcaggttcatctgatttgctaaacactctccagatgaaagttagccttggccttctttttatatcaaaatgtagtttttggcttctgggcaaaattcttatttctttccttttctttcttttttttttttttttttttggagacagagtctccctctgttgcccaggctggagtgcagtggcgtgatctaggcttactgcagcctctgcctcctaga

SEQ ID NO: 128237 - DNA, 1105 bp, Homo sapiens
atgaccagagtacctgaaattaaagtgctttcagagattctttgaagcaatctgagggtaaacagaacacacctatgataaaagcactgcatccattgtagctagggagtgctctaaaggaggagaaatgtcacagcagtcacagatttaggttgtttggggtcaacatatgaagaatctttaatttctagataagaaatttgaaccttgatctatatagataatggtaagctattaaaaaattttgaacagaaaatcataaggcaatttagaaaaataatgtaatggttgtatgcaagctgcattgaaggatggaaaatctaatgacagtaatgaaccaattacagtgttctttgaagaacaatactttagtcattttctccatcaagaatttgagaaaggaatagagacctcagaaattagccttaaagtatatacttggtgctgattgatcttttctgacaaaattgaaagctcaaaactataactattcagctaaacaaacatctattttgcatgtgccaggcactctgctaagtattatagattgagaaatgcaaactgaatgagacccagtttctgactctaagactgtcctgtctttgggggtggatgcacttgtaatcagattatctggatacactgtcagtagtgctacagtagaagtctgatagggtgggtgagaagcccattgaagcaaacgttttccagcctagagtgttcaaagactccttcctagtggaggtggtcagtctgctgagtcttgaaggtatagtaagggctaaccagaataaggggagtgtttattttgagtattcaaagttaaaggtaaaccccttaattctggaatgtcaaagaataggcagtcctgagagaatgtaataatcacacatacaccctgggttcaggcaatatttacatttgcttcctttaacaagctagcagagaacttcactgggattggtcattctctcctggactcttctcctgctggttcctatcttagtgtgtcagggacctctgccagcaagactttcttcttccacttatgcaaggaagttggagtcccttggctgagctctccagagaggtacaggggcatcag

SEQ ID NO: 128238 - DNA, 1106 bp, Homo sapiens
taattactcagcagcataaaaagatgtgactcattgggttgcaggaaaaaccatgatagtaccccaagagatatctttccaggtactctggtgtctcagtacagcctgctttcatgaactggtatctttggcatgatctaaaggaaaatatatgtgtgtgtatgtgtaaaaatgtattctgaaaaggaaaaaatctttatagtggagaatcctggcagataccacattaatcaagtgaaaaacattaataacatcgttatatcatactagtaatgccctcctacatggatataagttgagaagggcacttgtggagttcttctctaaaatccacaattccactttaacctttaaagtagtcaaagaactccaagttgaagaatattccatcaaatgcctgaccaacatttttaaggccaacagagaaagactgagaaattgttatggccagaggagatgaagaagacatgacaactaactgcagtatggtaacctgatttctgttgtgtagtggaaaaataggacattagggaaagctgttgaaatctgaataagcttgaaagtttagttaatagtagtgaccaatgtcagtcttagttgtatcctatgtactgtgtttagacaagatgttaacactgctgaaaactggatgaagagtatactccttgtactatttttggaactttttagtaaatctaaaattattccaaaacacaacatttcattgagaaaatatattcactgtttcaaatatgctattaccctagaacaggtgtaatcttttagtgaatggctcacagtaatatagaataaaggcaagtgcttcttagtacttaggcaaaaaaacaaaaaacaaaaaacaaaaaaaaaacaatgccttttgtggactctcccacctttaaaatatttcctcaggaaattttaaattgtgagtttctgatgcatatttagacaactgttttacatgaaaattatgcctggtagaaaatcttaggtagacatttgatggtctttaaactatggagacagcccagatgctctcaactttcccactttcccaagggataaatttcaaaatatggtaagactctatcaaaggtagaact

SEQ ID NO: 128239 - DNA, 1261 bp, Homo sapiens
gcgacttcaacaaaatggcagaactagtgagagacagctttaggatcaatgtccatattttctataaaaagaatgttgttagaactgggactgggtcactgctactgcttctcaacaggtaaagcctttggcctatggggtaagacagttgttccttgcgctggatatgtagcatccctgggaatgaatgctaccatcactgtcagtgtgacataacgtcaacgacataatcaaatactttacattgtgtttctggtatgtccctctaaacctttgattttgaggtagcaagggtaaaggtgcaatagttggaccagaccaggaaagagcaaaaccttataaactgataaattgttaaattacctattaacaacagctacttacaagatattggattgagccaagatagaacactgaagaatcagagtgatttggtaatatgaaattagcaagggtataggcaaatttttagtatgtctttccttgtgttaccaatgagtattttgccattccagaaggtgttgctatcaacacaaggccatgttctagatggtatgatgaaaacaaccctagcataagtcaggaataggactgtaggtccaagttctgattttatcttctctgttaatccttcaaagtcttagaagaacatagcatcaagaatattgcaacaaggtgcccaaagactcattgtaactgtgtttatgaagacaagcttggttaagggaaacattgaaccgctgtatatatggtgaatgaggctagcagaaagggtgagtcgatgctgaaccacagattttctattacagagataataagataattccaggtcccctgataattctagcactataaactggaggaatggagaaagaaacataggcagatttttgtctcctgtctttcatcgtatctttttccctcttgggaaagataagggttttttttaaagcaaattgcatgaattattgaagaatatatcttataaaaccaatattttttatagtattttcccattgtcattgaatacttgcatggccatacccaaatttttgaagagtgctctcgatgggcaggggtagtgtatctaatctttaaaaaccaatgctcccttttataaatataaaatgctataaatgttagttgcagtagcagaaaatgtctcatcattttacatttcatcataatggctattacctgtataaatgtgtttcagttacattttagggaattggggatttgggtttaaatataactttct

SEQ ID NO: 128240 - DNA, 1113 bp, Homo sapiens
aatttacttcctatgatataggtgtttctctttttatacactgctcaagaaatatcaatttaaaggtggatgttggaaataacaggcattagcgttttttctattgtaaaagtaacaatgatcttagctgaactggatttattattagcagttttacacatttgcccgctgaaattcatttcttctttccttgtcttcctcttgcattttggtgacttctttacagccctcaccacagtctacagtgcattgcatgtatttgcttctgttttcgtgtttttcactataatatgaacccagagaactagatctgtttattgttcatctttttatcttatgtaagcctagcacataataggaatacacgttgaattcaaccgatctttgcaaaatggtgtaatgtgaaaaattggcaagtcattctatttgataatccttgaccattaaaaactactatttctgagattttcatattactttagtgaatcggttattacataaaaatattccatacacttgttagttttgtttacagagaattgttttatattctctaaagataattaccgatagtttaccatctgtttctattaacgagtcctttctatctccctaatcacttgttttgtgctatattttatacgtgaaatgatctctgttttttagcttttgatggttttgatacttaggaaatgtgcgatatcttctgtgatcttctgcaagttatatttgtgacataatttgaatttgagtgtcactccttactaggaaatgtgtgttggtaatttgtaaaatgagacatcccttttagatgtctttataaaaactcttatttttgttttttattttctaagtagataaggcttttcttttccagaaacacaatcttttcagatttttttttcattctgacaaaaatggaaaaagaggactcaatgtttattgaatgcttattgtattcttgtatcgtaatgagcactatatataatcattaagtaattacttaataaccttattccataagtaatatgcttatttactggtgagtaagctacagagaaaatgaatatttttttttccacttcgcctctgctttatttctcatgtaccata

SEQ ID NO: 128241 - DNA, 1013 bp, Homo sapiens
ccttgacataaagacctttccctgatgctttcttggatttggtatgttcctataccttccatgaattgctattgcaaggaagatttgaccaaggttattcaaactttaaaagtaacaatatatctcataacagataatatactaatacatataagatctaacgtttttgttggtagtaaaataggaccatggtatattttatcagtattcagctgtgggcagtataagtttgctattagtttttcatgattacacatactgtcacagcaaatatccttgtacatatttccttgtaattttgggcaagtatttatgcaagctacatagaatttctggataaaaaggtaaacacctttaaattttttataaatctgccaaactgtccctcaacgttatagtctcatcaacagcgtgtgagataatgtttcctcctgcaccttccttctacttttatttatgttgtctctctctagtccctgaatttttgtgtgtgtgattttggtaggatatacaaaatgatcttgattttgcactaaaatcagaatgcttaggattagctcaacatcataggactaagtggctgatctagactagcactgtctgtctctcgtattctttgagttaactgaaactgcagaatctattttgttttattctcctactttaatatttggaactaatttataatctactttgcagaaagtgaagttatttcaactcaactttattccaaagaaatagggaactatttgaaatagggaactaacctctgcttgtgcctgaagctcttcattatttgtcagtaatgttaacttatgccaagtaaaaaaaaaaaaaagttaaagatgtatttcacctacttacgggttctactaaaatataaagttgctgtagaggtttttaatatattttagtcttcatctgtttatcagcctgttgcatggtaagtaattgctcaaccattgaagttatggtatgtgacaaatctgcagaaattttgctgtataagccaa

SEQ ID NO: 128242 - DNA, 1035 bp, Homo sapiens
aggtctgattccccaagttaacctattatcaccgcttagatttaatgatcactgtttaagagaatagatgtgtttgctagaaactcctactcagtaaattgtgttgatatttttgtaaatatatcaaaggtaccaggataggtggagatataagctgattaggtacttttttccttctacctctacagagtaagataaaggttaagtatcacatttttgtgtaacaaagtatctgattttgatgtgctttcacttttgatatatgcaacaatgaatctctcatttgaaatatgacttgtatatgagttctgggatctgtgaccactgatccagaaaagatgaagagaaaaggaattctggtgacaaagaaacaggcaaggaggcgaaacagttccaagcttttccaccttcttctacattcattatgtaatatggttgcagcaacagttattttaatttaaaagctttacttaaatacttttacttttgctgactggaccaaccactattattacccatttcttttattccaacgcttcttggtagttatatatattttactattttgctcattcatagatatctgccacatttcattattttgacactgccactttactgatgtttttacattatgaagttaactgatccaatagaaattgtcacttttggtgctcattctctgtggtggtgatacatgtggtatgttttctttcttttttttcttctttttcttttttttttgaaacagtctctctgtgtcacccaggctggagtgcagtggtgcaatctcagctcactgcaacctctgcttcctggattccagcaattctcctgcctcagcctcccgagtggctgggattataggcatgcgccaccatgcctggctaatttttgtattttttatttttttaggagagatggggtttcaccatgttggccaggctggtctcgaactcgtggcctcaagtgatccgcctgcctcagcctcccaaagtgctgggattacaggcgtgagccactgtgcccagccgg

SEQ ID NO: 128243 - DNA, 1047 bp, Homo sapiens
ataaaccaataacatggtcatttattgtcattatcaagtattatgtgctgtacataattgaatgtgttatacttttatatgactggtagcacagtagatttgtttataccagtatcaccacaaacacataagtagcacatgacattatgtgccatgacattgcaatggctgtgacatcactgggtgataggaatttttcagctccattataatcttttgggtctactttcatatatgcaatctgttgctgactaaaatgtcattatgtgatcatgactatatgtactattgaaaaaatgttttatatttccataaggaggcctataaatgataattgcagctttttaaaaaatcatgaaaacatgtaagtcaccttacatctattattgggagatgagataattttgacacattcattagctctgtacagaaatcaaatgaatctagtgaactagatttgtatttctaaatggaaagcccttgaaaacatagtgttgaatgatataataagcatgttttggaacacctttctaaaaaattaaaaataacacatcacacaatattacatattgctcattgatgcaaatacatgccatataaaagtaaacaaaacaaccacagctaagccataagggtaaagctagaatagtatatactactggtaaggggtgtgggagtgggttgggggcattagagaggactctagggcctaaaaacttctctagttttactgcatgacaaagcactgaatgatagcaactggcaattttaggtggaggtcacagaggtgttatattattctttgatgtattttggatttaatttataagatacattttatgcattctcagagacccagaggatttcccttgggtctgtacaatgtattttgaaagtaaaaatttaggattaaaaatagtagggatattttttcattttagtccttttacaaattatttcagttctttgctgaaaaagggtgcacagatggagcagtagcccttttgatgtacacaagtacaaaagtgcattttataaacaaattta

SEQ ID NO: 128244 - DNA, 1046 bp, Homo sapiens
ttatataacttactctttcattcaccagatgagttaatcaaaattttaattttgcattctttttgtttcacaatttaaaaagcatagagtaaaaagacaaaaagcctatggcctctaaaacagagaaaagctagctataacataatgcatttttgaactgctaaaacgtgaagattctattattctccatagatttgagtcaagacctgtgcaaaagccctggaggttaaaataattcctcagcttcatcttttgtggtgtaagtttacatgcacaatgggtgttattctaaagctgcttatcctttagattcggtgattcttatcatatacgacagtattatgtagataaatggtcaaaaattactttctgcttatttgatgttttttgttcagttgtctaaagttgcttttttaagggaagaaataatacagaaacaatgattattgttattattcgcccaaggttacaagagcaaactaatcaagcctagttttgactaatctagctagtttttgctctcttttgcctctgggcctctgcccggaataatttcattcccttcatcttttctcacttagttaactcaagctttttaagtaataataaaacttcttaccattttgattacttacggtctcagtttctgtggtttgctttctttcgtgcttatagctgaattggctttgtcctttctgcatgcccctatagagctttgtacttacccaccttaggaatcatctcactgtatgattctacttgtctctcctatcttcttgaccagaaatatattttacatttataaaatattaggtgaaccacatacgtaaaattaaatcttgctgtagccatgttaaaaaagtaaaaggataaattcatactgtcttattttctaacctaccatattcagaatattatcattttagcaaataactaatataaaattattaatgatatattttatattctttttgtactaagtcttcaaaatctattgttttacacttaccgcacatctaagttggtatgatctgcatttcagatgc

SEQ ID NO: 128245 - DNA, 1028 bp, Homo sapiens
cagtcttggtggctcatgcctgttatcccagcactttgggaggctgaggcaggtggatcacctggggtcaggagttcaagaccagcctgaccaatatggtgaaaccccgtctctactaaaattacaaaaattagtcgggtgtggtggtgtggtggtgcatgcctgtaatcccagctactcaggaggctgaggcatgagaattgcttgaatccgggaggcggaggttgcagtgagccaagattgcgccattgcactccagcctgggtgacagagcaagactctatctcaaaaaaaaaaaaaaaaaaaaaaaaaaaagaaattataagtgtcttcagtgatttttttctgattacattttccctcctgttgtggttaggaagggcaatttctcggaatctcagatctctcattctgagagattgcccttcctctcaccatatctttgtagtaaagacagtgtttaattcatcccacttacatttctgttcttatattcagtttattcctcaagatgaccctttcataaccacatctttttctgtttaccaacattaacctttaggctgctgtcctgaatgccctttctgtgttttgggtcatactcattcttgcctctgctctgcctgccctctcctcagtttataaatctgtcctctttttgatctatagtctacctttccatcaaagtccagcatattttcttcctttcctgtcaaatccatcttgatgactccaagctacgcgtatctttcccttttcagaatttccacaagtgtgaatagttgatgctgtgaaatgggatctttggttttgcttttgtcttgtattatcttccagttgttgatggatttttgtgtctaatttggataaataccttcttgggtgcagggacttttcaaaacaaagttggccatcttttctttgttgcattttcttttgatcattaacgccagttgataacctttcatttcttatacaggtgaacaaagaaggagaggagttaatatccttacatagttctcatcctc

SEQ ID NO: 128246 - DNA, 1024 bp, Homo sapiens
ctgtgttggcacttattattcagatgctaatggataaattctttggcttttatacttgggagcagatttaacgtgtcttcttagatttcattcataatcttattcacaagttctttttagcttctttgagaagtctgtaattttagaagccttagctcctgaatcataatgtgggagaacatgagttgattagcaaaaataatgttaagagtgatttcattttaattctagtgtgtcaaatctaaagaagacattgacaatgttagggctatatgtagcaccttgacattgctctaagcaataaggccagtaatagccatatcaaaatggagatttaaaaaaaatcatttatttgagtcttccagctgaaattgatggggagagggagctggtgatcattacttaaaatggcctaaaatatattttactgtgtggccaccacctctctcctaggttttctgctgtcattacctctttttccccattcacagtattggccacttttcatgcgttttgactctttgcatatggtgttttctccgggactatcctacctcctccacatagggcactgtaactcagcctccagtactgctagaatgactcttctatgactccttccccattcccctgggacagcttccccttccctgtgatctcattgcgtttggcacattgggtgttttcttcagtctgttgttcttcacactatttttgggcctgtgttcttcattggatccaaagcattaataacaatatcatttgctttttcatgacattataaggaaatcatggtttttaaatattataaacattagcttttgttagaaaagcagagaacatgttgattattctttgttaatatttgatatcttttatcctagtatcttaattccacaaattttgatttatttataaacctcattacaactcacaaatattcatgatattggtgtaaaataataaaaataataagtatagcttaaatactggtttaaattgcatccttgatgccattaattat

SEQ ID NO: 128247 - DNA, 1053 bp, Homo sapiens
ataaaagccatcacaatcgctgcaattgtatgtagagatgtattattaaagtaaaagacttaaaagaagtttcatgtaaggctggagatttttcagtgatttcaggatttgaaatgaagtcttatttttaaaatgtgaaatttcatgataatatacaggggaagaaaagtagctttcctctgctactacgtgctacatatagaggaataaatgaaatttgctataaaaatatttttatttggaacctccagtgagtatttatatatatttgtgtagaatccattttacatttgttacacatttaactaaggaacacagaaatgaaacttaaatttcaggaggataaattattttaatagaatgccataaccacaagggtaaatactagcttaccattttttatagtcagaattttcattactacacagtatcacttaaagaaagagccttgcataaatttaatttgttgtttattaacaaatccagaagcatgaactcgttcaacttattgaggaaagagaatctgagtagttacctgtttctcaaatttgatgatgtttatttaggaatatcatgctgatattcagtatatacaaatgtgtatgtttttggaattactttagaactatttcctttatagtaagttaaaatggaataatctcatgcttgaaaaatgaactttgaaattaaagtcttttttctttaaatttttattagaattgaaattttgtattgcaatttgcataacgctgattaggaggggttggagatgaaaatgtaaattggattttcaatcaaagactggtacgacttgattttttttctccctgagcttacaagtttgacctatgaaaacgtgggaagtaaagaatatattagtttaagaaaacttgcagaggagaaaatagcgtattttaaaactccatattgtaatatgatttttgtatagtataattttgaaataaatgtgaagctaatgtagctgtttgtatttttgaagagggggcatatttttggatatgtccaaaactaactgtaagcaagtaatttgat

SEQ ID NO: 128248 - DNA, 1064 bp, Homo sapiens
caaaccagtgagtgttggagtcaactctaaaaatattgtcctctccttcaaattttaaacttctaaaattataactaaaatttggaaatagaatagaatatatttaggtttgatgagatatccaaggaatggaaagtaaaagaagctggcctaaactgaagtacaaggctaggaatgtttatataggaacatcaggcatatattaggactgagaaaaataagatggtaatgggaatttacaagtaggtgtccaatacccaaagctctaaagtagcttacaaaaccagagtagttagggtgtgggaagcctggtggaatgtttatactgttttgttcaaaactgtaaaatagtttccttgtttattttttgctgtctgtcttgatccaggttactattatcataggaacaattggtttctgaacgttctctcttgcctattatcagttcaactgatttagtgttatctgtttcagtggatctgttagaatctgcctgtgacaattcttgttgattaaaaaaaaaaatgcaagtgaagggaacccatgtgcagaccagctcgtactaatgacattcatagaaactagtgattccgttgaagtgtgcattggactgtgacactagataactatgaaaggattaggcatatggtggtattgtatacttgaagcctatcataaatttaacctttctattactgttaggagatgagttattgtttccacttgccaggtaagaacaatacttgagatgagatctgacgttacgcttttgcccttgcactgctttttgaagtgtaaatggcttatgtttagtcaatcttcttgttgtgaaattgcatcatttttatgccatccaagagttagagctgctgatgcagctattagcagacacagaagcactactcagttgagacaatgtgttagaggtgggtgagttctgtgaggaattttctgctcacttgtaccacacaatttgtgtcatgtttgcactgcataaactgtatcattcatttttatatatttatatatgtttgcataatacaggtgattaccagtatttactg

SEQ ID NO: 128249 - DNA, 1040 bp, Homo sapiens
gcttttcaaagttaaaaaaaaaaaaaaaaaaggccaggcgcggtggctcaggcctgtaatcccagcactttgggaggctgaggcaggaggatcacctgaggtcaggaattctgagaccagcctggccaacatggtgaaaccctgtctgtactaaaaatagtctctgctaaaattagttggttgtggcggcacacgcctgtaatcccagctacttgggaggctgaggtaggagaattgtaggagaattgcttgaacctgggaggtggaggttgtagtgagctgagattgcaccattgcactccagcctgggagacagagagagactccatcctccatctcaaaacaaaaacaaaaacaaaaacaaaaacaatccaaagaaaaaaaaccccaaaaggcactgggaagcacattttgcaaatttcctagttctcgtttatccagtattaccaggacaaacagcattttctagagtaaacatttgatttgggtgaaatgttgactttcagatttgttactgaaacctaagagcattactgtctgaagatttctaatggtttctaggttaaaagacatatatcagggatactgactgctgcataataaagattgtattgaggaactataatatctgggtttaaatcctagctttgccacttaatagttatttcaccttgtacttccatttcttcatctgtaaaataggaatacatcatagggttattatgtgtataaatgaattagtacaaatcaagcacttagcttcagtagctataagctgttcagcagtaagtttgaggggaaagcaaaaaggcagttgaatctcagggtggatgctgagatggaaaaggagggagctgatagctctgcccctttgtttttaatagaggcttagtggagaaggccttgactgcttaagtcaggacatttgtaagttccacattggagcaaggcctgtagggaaatggtgatatatgaagtacagatccagggaacagaatccagtgcctggcctcttgggtggttctcacagttacctcctg

SEQ ID NO: 128250 - DNA, 1873 bp, Homo sapiens
ttccgagtatctgtgccagagaatatatccctgaactctctattgtctaactcacatctaaacccaaaaatgtgtgattgtcatggataattattcaaagaacatgtagtttattcattatcattttccagctagttttatcctaggatcagttcaaaatttcagaaagctgcatcatctcagcctttggcctcttcatctgtccatcatcctgctctacctcactctctacagacttgtttgggctgaattcaaaatgggaagctttactttcccaaggagcttcagcatctaacagccttgtaacaaatacatttgcagaaatgctgctgagggcattgactctgacttttattggggcccactatgtaaccaggaggacaacagactcttaattgttgctgtgtttaaaaaaatctgaagaaatagggcaaaatgtcgaaatttgtaatgtttcaatggtgggtacatagcatatggtttattattctctgtgtttttgcatattttgaactatcttatggtaataacagtaacatcacttaatttcttaccagccagaggtatctgcttctaaaattttgtgaacatccttccagacatctgtctattaagcaaggttaagagcctgtgtacactttgaagtatgacggacctgggttcgactatgctgtggccatttaccgctttctaactttgggcaggttgcatcttactttatgaactttaatttccacatctctaagatggtatattagtccattcttgcactgctataaagaactacctgagactgggtaatttataaagaaaagaggtttaattgactcacagttctacaggctgtacaggaagcatggctggggagacctcaggaaacttacaatcatagtagaagacaaaggggtagcaggcatgtcttacatggcctgagaaggaggaagagggcaaagcaggaggtgctacacacttttaaacaaccagacctcatgagaactcactcactatcacaagaacatctagggggaaatccacccccatggtccaatcacctcccaccaagctcctccttcaacattggggattataatttgacatgagatttggacagggacacattccaaaacacatcagatgggaataatgatggcacatacttcataaagtttttgtgatgactaaatgagaaaatgtgtctaaagtgcttagcacgttgccttggacacagtaagcaccaatacatgtgagctgttatcgtgtatgtgatgttgtataagtggagtatgctatgggcattttctatgtcagtaaatacaatccatggaattaaataaaataaaaatgatataataacaaaaggttcaattctcaagaggaactggcttagttcatccttatgggttgcatacttctggctgccgagaagttcacagtcaaatttatccaagtggtaagaccttgtgacctgataatcatgttctattttctcgatcttggggacttactttttgtgacttccattaactctctatttcatttaatattctccctgtaaacccccttagatcccttgtgcaatgtggttgggaagagagaaaggaaaaaataggaaggaaaagaaacatggatggcaagacggaaggaaggaaaggaagaagaaagggttagttgcacaaggctttggaattgttgattagaatgtttcgcttttggattcatgctaattgacataatttttcactgcatgccagactttttcaggtgctctctggctgcaccttgtttgtttatattttgactggcattaagccttaagctattctccctgatgcgactgtgagttttcacaaatgatgccactggaggtatgcca

SEQ ID NO: 128251 - DNA, 1051 bp, Homo sapiens
attaaagtggaatcaattttaattgcattccacatcagtaaatggcctaatggaatggttttggtgaccatctggttttatccaaatcaggcttcagaaacgattgctgtttggaactttctcaccatgtggtgggtttagtggtaggcaggggtaagagagaatgtcaattagatatcatcatgttaaattcttagggaccccatgtggctttaagtagaagagaagtacattgataacagaagagtcctggacatcttgagaaccttctgtcttcttcagcaggatcttcaccacacgcctccaccacactcctaggaaccatgtccttgcatacgggctggccagacctctcagtgtggaggtggcctgagtttaaaacttcaagctggtttgaaggtactgggagggagaggaatctgaggctctggtagttgggcatcttgtttcctcttttcagaaacattttgtcaaatactgctactttctgaaccaaataatgaaaacgtgctcaaatactttctcaggggccgaggagccatagctcaacccaaaaccagaggcgacattacaaaagctaatgaggtcatgaggtttttgatgtgtctctcaatcatgaacaggcttctctggatacatagaaatatagaagaaaaaatgaattctgactcatatacagaccaaattaatgggcaacttcccaatatatgtagccctctctcttctcttcccatagatcttctatatcagttcaatagactcaaaccattgtaatactatcagaaactaataaaatattggcctatgctctccatagaattatacatgtcagtcgttcattaaagtggaaagttaagtgctaatacacttgctaagaatcccaatagagagccagtgctataataggtaaaagttcttctggaagggaagaagccagagtgttcaaatggctcatcattattcttgcaattgcctgccttctgtcaagcatgcttgtattgcacaacccaggctgtgagtttatcatccagagtagataaaaactaaatta

SEQ ID NO: 128252 - DNA, 1558 bp, Homo sapiens
taagtaaagcaaccccagttgcttttactttattgatctttttaatgcaccagcttcagtatttaaatgagtttgagtttgtttctttaatggtctttcaataaagcttaagttgacccggttgcttttgcaatcacagcactgtaacagcagaaaaagaataataataaaaatgaactcattttatgtggttgaaaaggttacatttctattgattttaactgtaatatagttaaagtccttgatattaaagaaaacaacgtagcagacacatcctttttagtacggtggctctattgatattactttaccagtaggttttggcagcaataacaatattcaggatggagtcgaaacattggcatcatcagaggactgataaccacatccttcaaattcttttccaggtgaaagagcagaaaggtgtatcaggaagatcattacatagagagtgacttcagaatgtgggggaatgcctgaaagttccatttaacgaccagttctgccagtttatggaaagcagcaatgctctgttccctggaaacactgaagctttttaatgctatgtttggagctcgttccagaagtagaaggtggagagggatgggagaattcagtagaaatggtgaggaatggagactagaaaagaccaggggaagtgaagggagatgatggacattcgcttcttttgtgacccggccctgtacgagtgctcattgtgtgcactgagtgtgtgtgtgtgtgtacccatgtgcattaaggctctaacacaattggctgagctgaattctcagtacagaagcctattaaatttggatttggacttggattgtgtgttcaaatctactcgagagaaagcttgggggagtctgcagaccttgaacctcatggtgaccctgagcccgctctatcttgctcaaatcccagctcttcttccgtcaatcttccagagaggtttagttcctggcattctgcctgggttcccttggcaatctcgggaagaaagaaaatgctgctgaaaggatttgggagaaggaagagcagcgcgcagaatatgccagcagcaggaaaaacatctggtcctccccttcatcctcctccacatcagcatctaacatttcctggaggcgaactgcaggtgggatcccaccataagtactttacacatattatttttttaattgcacacaactctgtcggcacatactcttattcgccccatgttacagttgaggaaactgaggcacagagattaagttactgtgtctagaggacacatagttgctgagtagctagcccagaggtctgtgggcttgcagaggccaagctcctccatgtgccaacctgtatcctttgccatagaagagcaaggctggcatcatgcccacaggaaatgcacaagacaacccagttgttattccaaattcttctctaaaagtattctcaatcaactccagtccaaaattgcttttcataaaaaatactagtaaatataaatacaaaaggtacaattagtaaaaaaatacaaatgcatattctgattttattggttttattt

SEQ ID NO: 128253 - DNA, 1073 bp, Homo sapiens
caaattggaagtctgctcaaccacagggcctgctaacctaatcaggactatgaggcatgtataggagaatgtgtattgaagacagagagaacatgaaaatggcctggaggagaactttgcttggttatctgaacccaagaggtaaagaagatggattctgactgtgccctacaggctcctgtgttggtggctgtggtacgtatatggaactggggctacagcatggctgggaacttctgcagaatgaggcaaggctgcacactcctccaagcaatgtagcataatcatacccttggcatttaggaagaacatgtgactggatcatccaataggatcaccaatgcctgaggctgctgcttagaattgaaaatgtccaggaatagggaacctgctggagccaccatttgtgtactttgggccaagagaaagctagctagaagagcagtgatgagaactgaggagagaagggcattcatgtaaggaggagggtttttatgttttccttctcccttcttttcatcaaacatgcaattagagttgggagcattgagcccaaaccccagataaggcagagggactggagattgagttcacctttgtggccaatgattcaatcaaccaagcctgtgtaatgaaacctctaaaaaaaactttggacaccgaagctcagtaaatgtccctggtttgtaatactctgggcattgtcacacactgatgtgcagggagggtagtgtgtccttaggacaaagaagctttgcatttgggacaaatcttgccacctgcatctctccctttggccggtctggattgtatcctttatagtaaaacttgatcataagtatagtgctttcccgagttctgcaaatcattctagcaaattattgacctgagggagtagtgggaacctctgaatttgtagccagctgcttgtaaatgagggtcacctggagacccctgggcttgcagctggggtttgacgtgagaccagtcttgtggaggactgtgcccttggagctgtaaagtttggcctaactccaagtagttggttctagaagtctttgcagagagtgagg

SEQ ID NO: 128254 - DNA, 1015 bp, Homo sapiens
gatttatgttttatatcaaaaatttctcaaaatagtaggaagaaaaaattagctttcacacagtgatttactttatctagactaatactccacctactggaaaaacactgaatattatttaaagcataagatgtttaaaaagaaaccaagcaaacggattttctatcaataagttcgtataatttttgtaaatgtcaacggacaggaggagaaattctcatttcacagctgatatagcatttctttaatagcattgatttcaaagatatttatagcacaatggctcaagcactatataattatttcagagaatctggtcagaaaacatgtagcacttttagttttgtgactttgacttgcaaatgaaaattcagaagatgattgtaaatcattaaaaacaatatctgaactagtcttctagtaaatttgaaatttactagaaatttcaaatttctttgagatgtagtgtgagaatagttcatggttttatacactttcatatttagaatcactttagtaacaatcaactttaaccgttacacatagtgagtactttagataataatttacataaaataatcatgaattaattttatatggcattttttccctgaagagctcgaggaaaaacacattttgataacttagaacatgactttctaggaggaagaaaaacaaacaaatgcgtggaaaagggaggaagaaaacaataaaattaggaagagtcgcttttgaaaatagatattaacaaatatgatgctgcttaaattgtataatgttatggttaagttttttttttttttttttttgagatggagtcttgctctgttgcccaggctgaagtgcagtggcacgatcttgactcactgcaacttccgcctcctgggttcaagcgattctcctgcctcagcctcctgagtagctgggactacaggtgcccgccaccaagcctggctaattttttgtatttttagttgagacggggtttcaccgtgttagccaggatggtctcgat

SEQ ID NO: 128255 - DNA, 2347 bp, Homo sapiens
gactctcctgctagtccagggttgcagctctgttcctgatcctcccttggtgagaccgtaaccctgtgggttcaaggacgctgcctcagttaccactcctgccccaggagcgtggcataacacacgcttgttaaacactgatcagtgggctcagcaggtgcagtggaaatccacctggttgtcagagctccgtggctaacacctcacctctggactttcggctatttctttctctgtagtgttatctaataaaccttccagttaatttacgatccacatgaaaagggcctgtgatatgcaaggtgctcatttaacatgtgttaaatgggtcagcactggctgagccatgttcgtgtatgtatctgtatgtaaatctgtctgtgtgtgtgtgtgtgtgtgtgtgtttaaggtgtggattcctagcttttacttccattagaacttctgtttgtagagggaggaatctctgtgaatgactcagtggactgaagccctcatagcattttattgacatcgagtttgagtgagtgagcttggctccatcctcccagaccacatcgatggggagactggctgatcgtgaatctgggactccgaattttcatgcaagagacacttgcccctgctctgctctgagagtcttgatttcagtgcaacttgtttttgggaccacattgctgagagccacaagcccatcagggtgagggtcagcaggccagccccctcccaacctacattgccaagccctgcggccatccctccaatcccaagaacagccatgggtgcagatgagaggacaccatttgggaggctgacccatttagaggtcacgttgtctaccttaatttgtttttggttgagctactcataaatcctgccgacttatagagatactcaagaagaagaaagaggccaagaaacactctcccctaacagaactctggaataaacgagcaacagccatgcttttgtcactgggttagcgatgcatgccggtcctggaggtgcctggtgtgtttcacggcggatgcctttacgaagggaaagttaaccgaatcctgcaggtaactgcagatggataagtcagggagcctttgcctctttgggagagattaaatggccctggggagatcagaggggtagggggcatcttcgtagaatggagaggcgagaatgcagtgccctcgcctagaccttgcccctgtgctgtgacctgactctcacacctggggaggcactgtgcactcccaggtgtgctcagggctttagaccagctgtatcttttgcccagaatgctcttctgctgtcctttcaccaaatacaataatcaatttgtgcttcttctgggaattattctctaaaccactcactttattaccagtccccagctgggctcaaccacgttggaggactttgacttaattaattaattaactaatgtattaattaattgttggcaaggccagaggtggcctagcctagggccaaagcagacagatttgtctcctgagccccctttacctaagcctacgcctgggtctgggggctctccggtccaagagcaagaaagaaaaactggctgcaaaactagaagagatccaggtgaatccactgtgcctaagcctttctaggacagaaaatcccctgcgcatgggagctggggctctctccaaacccgaatcacctgactgtgagaaggcaaaaagagaaaagtggctggtttcagtatgtgtttcctcttctcggtaaggcactgtcctctatggaaggtcattcagggaccccttgcaaaccagcttctagacttccagtgtaagagaggagaggtggcctggggggatgagaatggggccaggagatgggccctggctctgccacgtgttaaatggatgtttatcaagttaggaagccttcttggacttcagtttcctcatttgtaaagtgaggaggttgaaccagttctgtgaggtttctttgaagatgttctgctaccatggccctaaggaatagtattttcccatgtctctgggggctttgagcagaatcatctgtgaagatacaactctagggtaccacttgaaggtgtcttttcagggcactattcaacttcgaccggttttggtgatggatggagggtgggaggaagcgtccacctgccctggaaaggcatcattctctcactttccattttgagatccagaccgtataacaagtgccatctttgccgtatgtactaaaacatctcggcagacttggctcccgacattcagccataagattgtcaatttcaggttcatttggggattttcaggtagggaggggcctcagagatgtagtttatcaccat

SEQ ID NO: 128256 - DNA, 1903 bp, Homo sapiens
gcaggagactcgcttgaacccgggaggcagaggttgcagtgagccgagatggtgccactgcactccagcctgggtgagagtgagactccatctcaaagaaaaaaagaaaaacaacagatgcacaaaggacactctgacctccccttttcttcctgaaagcaggagatgaaactttcatatggaagatggcttctctctaccaggaagaaaagaacattcttctctccagaggcggggagttgaggccgagggaaatcggtacaaacaaaaagtgttttgacagttaaaaagctcttgttaaaataacccttgtctttagtatctccatatagttagttactttttcaaaattactactttttgttcaccctgttgcataagcacttaggcctggctgcttttggatcttggtgtcctgtgaaggccctcacatgcctgtaaacattggcttgcgtttcctctgttagtctctcctacgtcaacttaactctcaggcccagctggagactgtcagaggagacaggggcagctttgcctccattacggtcagacacccaccgaggttgtccctggatgggctccctcagccctagggggccactaggaaactgcacggatttccttacatcttggagttgctgtttgccatagttaatgcttctatttatcaccccattttaaccgactgtggtttccagctcccgtttgactcaaactgctaagccctcactgcaacaagggataaacccaactttgtccaactgcagatatagttctggtcttggctggtgggattcaatagtaggaaaaaggaggaagcacatattgagcaactgctgtgtacaaggctttgtgctgatcttttaatatgtattgtcttattgaatagatattagataggtatgatctcgtatctttgatattataaagtgtccagtcacagagtaagtaccaaggctggcactctgactccagagacaaaacggtgagctgcaggccacagtctcttgaactagcccagtcacctcaattaggagagggagaggatcagctacattttaaatatttacatttaaaagagaaaatactttaaatcagatatagcgagaaaagcttaacatgaaaagcctaaggaaatgacatattatatgatttcactcgtattgccaggtggccacctcttttcaaatgaaccctggtgcatttgccacggttaagtgtaataatttcaaggtaatttctttggggtccaagtgagctcttttgtagaaatgtattttgctgtacatttagctggtggtcatttcactggcagttaagaggcgataagagattgtgtaatagaggctcattaaaattaaagactgtgactccatgtaccccaggacaaccttgagtgaacactaacttgttcaacatttgccatgaagccattagaagcatactgatttaggcaggaccttgtgtcttacacgtggagcttaaagctttaacgtctattcaggtattattttgcaatatccattcatttccatttttaagccacagtttgcgttggcagagtttgaagggatttcatcagccgtttacgctttggggatgcagtggagaagctaaagaagaaatacctaaatggcgtgggttctcctggaccggtggaggggccgggccccatctcctgagatgaaggacacaatttcaaggcagatcccgctttttccatggcctagacaaaggcctaggatttcttgctgtttttcctaatcgttaattttagggaatacttggaattagctcagcgatattgaatttagaatatatcatcttttttcttcaaaatatcattttattcccaataaagtgattatggagagattggctttaggtgtatgactaaggagtt

SEQ ID NO: 128257 - DNA, 1024 bp, Homo sapiens
aatccctattgacccagtctctgtgtctctctctctgccaatagcatcaagcacagtaaccctttccatgctaatcccgttattaatgccatccacaacaagcgtagtgtaagtaagacacgaagtgtaaaaaaactttcttccccgcagtccgggctctcagagccctccttgtaggtcaacagtatcaaaggtgcttaacgcagatacaccaggaggctcaaagcccaaacatcgaaaaaaaaaaaaagacccactcttgtgctgtgtgtattgcccacgggtgggaggatgcaagtacaattacgttttttaaaactccagtccagatattggcttttccttggatacttttgtgtggctctcccagtacagtcagatccgccgccgcagcctagcgctccaccccgggttttgcgtcctcccctcacctgcctttcagtggtgcggggtttgatcccgagagcggtggactcaaagctgcccgccgggactcgggctgccggccgacaaaggacggtcctcgggggttctgaagtctgacccggccagtgggaaagccacctgcatcacaaagcgaggggcacacctgaaccggggctggcgggaagaggcaagtattgcgcgcgggctggctcccacatggagctgcctcccggtgcaagtgttgcaagggtgcgctgctccagcccggggagcgcgggaggcggcggagagagcgtccgggtgatgagcggggcactgtaactggattttaacacctctgcaagcagcgcttttggtcaaaaaatttccgattcttgatcttctctctgcaaggtcgggggttctttggggagtaaatcacagcgtttgggtttgcattcgaagcactaccaagtctactccacagggtcactgcacggggagcaagtaaaggaaaacgaggagaatctgagagtgctccttcgtgcagtgtgtgtgtgtgtgtgtgtgtgtgtgtgtgtgtgtaggcaaagctgagatttacatggtgtgaactgtt

SEQ ID NO: 128258 - DNA, 1065 bp, Homo sapiens
tgtggagaatagaattgattctcgctttttctttgcataatacctaatcatcaccattagcacttcagacgttcacagctttctgaataggtgtcatttcttccacataccctattgatttgcatcattaacaattgaaaggaagctcttcttttgattaagaagccaaacaattaggaaagcgtggattctttcatagtatttattgagaggcgtctccacctgatctaggctgtgtttaatgggatgagagagactaagagagaacagaaagtgtaattaccgcctctccaggcccgtctttactttttccagaaacagagaattatgaaattatttgtaatgttacaaggacccttggagctcttctagtgcaagtcaagtttatttcacaaacgggaggtctagacagcctttgtttcttctgaacgggtctgcaaggccaagatctggattctgacccacagcgactgctgatccaggaattccatgcacatatgctatgcacttagcgctgattgtgaagaaacaccaaggtggcccgtcaagacctgaactaccacaggtctaacttgggaaagcctcattcctcacgttctttccgcttctactgtaatggtactgtgcctcttgccagcccacacttattcatttgaaatgtgcactttggaagttcactgcatttaatcgattcagaggatttcttttttttttaattttttttttaatcagtagctgagctatactacctagttctaatccgtaatagtgtgttaaaagactgttttctgtgtagttgctggctgttatttaaatcccaaggctgctgaaagttggtaatagaaccaataatagcaaccattactcaaaagtctattgcttactattaactataataattaactattaagtattgatattgtccccatcaatttttaggcgttacctaacattatccccattttacagatcagaaaacggaggcttcagaaaggtgaagttactagcccaatgtcactcaccttctaaggtggggagcagaagccaggttggtctgacccctaa

SEQ ID NO: 128259 - DNA, 1069 bp, Homo sapiens
agcattttaagatgtaaagtttcatttcctaagggatcctctagttgtaaagattgcagctagttgttgttgttattattatttgagatggagtctcgctctgtcactaggctggagtgtagaggcgtgatctcggctcactgcaacctccacctccggggtacaagcaattctactgcctcggcctcctgagtagctgggactacaggcacgcaccaccacacccagctaatttttgtgtttttagtagagacggggtttcaccatgttggccaggatggtctcgatctcttgacctcgtgatccgcccgcctcagcctcccaaagtgctgggattacaggcatgagccactgcgcctggccacagctagttattttaaaggacttctagtaggtccaggctagattctcagcaaagtttgcatggtatgtgatgtgtggtgcatctcaccccagaaaggacctgggagtccttctgtaaattgctagcaggtgaattcacagcatccactgtaaccttaagttatctggttctctgccctaacgctaacctgcatctgacactgggaggtccttgaccaggaattctcacagctcctccaacagggaagtgggtaggagatggaaaattcagaagcaggagtggagggaagggagttaacacccaattctccacctcccccagaaccaaggccaggattgtcaagaatccagggttgagaatcccctgccaagctggtccagtggattcactcaggttggcagagtggctgaaaaccagccctcttaggcacgtgggtcttctcccagatatattaggaactagatggaacttggcacttgggatcactcagtgtaacaaccccatacccccattagacttgagtatacccagcactgagctaggaactcactcaggcttcccgtcaccacatcggacactttaccactggccacagattggtttctgaagacctcttacctccatcgttatgacttctaagttgatttctgtctatattccaagtttcctttctatcatctggccataaaatatttttatatcttc

SEQ ID NO: 128260 - DNA, 1003 bp, Homo sapiens
gtaaaaagctcatctacaaatacattgaatgccaccagttgtgcatggggttaaaagtggatgggaagcagatttcaaccaaatgtaagaaacatattcaaatgcataaactcgtctgtctgtggaactagagcaggccagctcaggtagctctaggattctctaatattgctccaagtgggaagtcgtgtttacctaggccttgtgcaaagagaaacagcaggaacagggatggaggctgttgtgattcttgtgggagacaatggcaagacgggtccatctgaaatggagatttcatttgggaaaacaggaagtgttgaagagttgcatgaagaaataggtatcaaattatttgggatcaatagtatacttgactctgacacttgactctttctttctctacagccagtgcggattttccatataatccaggacaaggccaagctataagaaatggagtcaacagaaactcggctatcattggaggtaggtgatgtctagaggaggcttatatggggctactcaactatggaaagtaatagttgtcaataacatagtagtctaggaaaaaaagttttctaggtttttacattattcattttgctgtttaaagattatgacatatgatgtgaagaaatatagtaaatatagccgggcacagtggctcacctctgttatcctagcactttgggaggccgaggtgggcagatcacctgaggtcaggaattcgagaccagcctagccaacatggcaaaaccccatatctactaaaaatacaaaaattagctgggcgcggtggctcacgcctgtaatcccagcactttgggaggccgaggcgggcggatcacaaggtcaggagatcgagaccatcttggctaacacggtgaaaccccgtctctactaaaaatacaaaaaattagccgggcgcagtggcgggcgcctgtagtcccagctactcaggaggctgaggcaggagaatggcgtgaacctgggaggcggagct

SEQ ID NO: 128261 - DNA, 2019 bp, Homo sapiens
ggaaaccactgtgctttcttgtgctgcccctccctacactgctgtccaaaaatcgctgccagccagaaaactaggaaaaatgtaggattcctcctttttgtttctctgttctcagacatcatggttcctttctgcctgttttctaatgtctgtagactgtcatttcatagactgtgtccagtattttagttacttttggctggaagacaagttactcctgtttttcctgttactccttcatggacaaaaacagacatcttacttcatttttgttatctttgttgttttggaggttgtgttttatatgggagagggctgtgtctgacggagctgtagtgaagtggggacagtgttggagggactcccaagccctgtctaacctctcgtgcttctcctttctccgtcaggcgtcattgctgtggtgattttcaccatcctgtgcaccctggtcttcctgatccggtacatgttccgccacaagggcacctaccataccaacgaagcaaagggggcggagtcggcagagagcgcggacgccgccatcatgaacaacgaccccaacttcacagagaccattgatgaaagcaaaaaggaatggctcatttgaggggtggctacttggctatgggatagggaggagggaattactagggaggagagaaagggacaaaagcaccctgcttcatactcttgagcacatccttaaaatatcagcacaagttgggggaggcaggcaatggaatataatggaatattcttgagactgatcacaaaaaaaaaaacctttttaatatttctttatagctgagttttcccttctgtatcaaaacaaaataatacaaaaaatgcttttagagtttaagcaatggttgaaatttgtaggtactatctgtcttattttgtgtgtgtttagaggtgttctaaagacccgtggtaacagggcaagttttctacgtttttaagagcccttagaacgtgggtattttttttcttgagaaaagctaatgcacctacagatggcccccaacattctcttccttttgcttctagtcaaccttaatgggctgttacagaaactagttcgtgtttatatactatttcctttgatgtcctataagtcggaaaagaaaggggcaaagagaacctattatttgccagtttttaagcagagctcaatctatgccagctctctggcatctggggttcctgactgataccagcagttgaaggaagagagtgcatggcacctggtgtgtaacgacacaatcagcacaactggagagaggcattaaagaaccagggaaggtagtttgatttttcattgaattctacaagctaatattgttccacgtatgtagtcttagaccaatagctgtaactatcagctgcaataccatggtgaccagctgttacaaaagattttttcctgttttatctgaaacatactggatttatatatgtataagcgcctcaatggggaattagagccagatgttatgatttgtttgctctttttcttttatagtttagttatagcaaaaatatggataatttctagtgaatgcataaattaggttgcgtttcttattttgctttaaatctctggtagtttttccacccctgtgacacaatcctaatagacagtgtcctgtaaatggacacaacacaataaagtcaagttattattgctgttactctggatgatatggaaaacactgccatattttaaatcaactactccacgtgtttttccatccaatcacactgctgtgattcagggatctttcttctaagacggacacatttgaacctcaggttcatcacaaacctggtacctgttgcttcccagaggatggagaagtgtagttaatcacacctcttagtttaatctgaaatcttgacccagttatttaacaaataaatacctcattgattatatttaaaagtaatacacttcctgtaaacaaatggggacaatgcatccaaaaaatctttttaaacagattacacaaaaattat

SEQ ID NO: 128262 - DNA, 1058 bp, Homo sapiens
agttcttcagttttgggactcagactgtctctcgttgctcctcagcttgcagacagcctattgtgggaccttgtgatcatgtaagttaatacttaataaactcctatatatatataatatatatgtatatctcctattatatcctattagttctgtccttttaagagaatcctaatacagatgatgaagaaataattcacattttaaggtgtgtttatttgttatgattttatcttattttaatttatttttagagatgggatctcactgtatcactcatgctggagtgcagtggcacaatcatagctcactgcagccttcaaactcctgggctccagcaatcttcacgcctcagcctcccgggtagctagggctacaggcacgtgtcaccatacttggctaaatttttggcagttttaatggttttatttaagcataaataaaatatgcacatgagctgtgtattcattttctttgctgcgcagcctggcattggggttggtgactctgagggcagctgggctgccctttccatatggctttgtggttcttggaggaaacactgtgagcgatctccgcacagggagatttgctgcacgtcagtggcacttccagctccttgacattgtggaccaggaacttccagaagccactgggcggcatgtgctttgtttttttgttcccataaccagtgttgggcatcaatatctggcccttgaatgttctccaaaccctgttgccaatactgctgggtttccaccagttacacttaattttgacacatcgatctgactggtgccagatgaacttcttggtcctctttttgacaatcttgggcttcatgaggggtctgaggtcagccatcatgtcaagtagatggttgtcacctccgtaggcggcaccgaggaagagagactggctaattttttaatttttatttttgtagaagttggggggtctcactaggttgcccaggttggtcttgaactcctggcctcaagtgatccttctacctcactctcccaaagtgctgggagtacaggtgtgagtcactgcat

SEQ ID NO: 128263 - DNA, 2721 bp, Homo sapiens
tatgtttactactgaggacataatttcctgtttataggaggtttcctgtttataatatgaagatttagtaaacacactataaacagaattattataacatttaatgacttaagttttttattcactcatggaggtgtttcatttctaaaaattccgtgagggagagagattgaagtcatttatttttgcttaggtatagaacatcttgcttgggagagaagacatggagtctagttcaagcttacctttgcagggcatatatttcctcgtttttaaaatgagatggtttttaattgacactgttgatttccttaggccccgaaagtatgtggattccatgggaatgccacagcttttaacattaacaggattttggaaaaacggtcttaaagaacattaagtattgtattcatgtttaaaaagcagggttgtgaagcctaagtttgatagttaaattttttcccttgggaaacttggaccaagtaagcactggtctgcctttcctagtgttgactccatgcttcagcgctattgcagttccattctggatctgactctttgccttttctatcacctgacggctcacacatcaccatctctggaaagctggccctgatgtcctggtctgggttaggagccttctctgggttcccatgttgtcctgcctatgtcactatcacagtatttaaccttttgattgtagttggtggtttctcccaccaaactgacctcctttgggacagggacactgtgatatgcatctgtccccagtgcctagcatactgcatgcatcaacattcacatacatccttccactggaaatctttacagtgccctctgaagtgtgggtactatggtttaacccactttacagaatataggtgaaggagctgagactttgagtggtgcaggtaagggctaggaaggtagtcaagcccgagttaaacgggacaggataactccggagctcaggcttttaaccagatgttccctgagtgtttgactagtttatgtgaagatggaagaagactagaagagattaaaatgaaaatgctttaaggactgatatctgatcattatggcagaattcattatgcagaactgtgatccactaccaagaatgagcttattcttcctggtcttttagtaacattgtgggagagtaattgggcactgatagcatagacacgaacagttctggaactttggggctattgttaaattgggtgtgatgttatgactcattggccttgcaaaaatttataaaaccattcaagactgttcaaatataacaagctgcaatttttttaaaggtctgtgttagaaaatacttcggaaaatagattgtatgaaatgggtgcagccatttaaaatatgtataaagtgtgtatgtactagtgaaggtttttttgttttttgttttttgttttttttgagacagagtctcactctgtcgcccccactggagtgcagtggcgtgatctcggctcactgcaacctccgcctcctgggttcaagcgcttctcctgcctcagcctcccgagtagctgggattacggtgcctgccactacacccagctaattttttgtatttttagtagggacggggtttcaccatgttggccaggctggtctcaaactcctgacctcgtgattcacctgccttagcctgccaaagtgctgggattacaggcgtgagccactgcgcccggccgtgaggatatttaaagtagtaaaaatggctgtcattttaggggggtaagcttgggtgcttttaaaatattttttcaagaaaaaatttaagaaccaaaaagtaacagcatggcgatctcaagatggagaagacctagatataacaccaagcacgggaactgtaaaggaaaagatttgagtactttagaataataaaacttctctgtgttaaaattccataaacagaattaaaaggtgactggcaaacagaaaaatattgtaacttacaagcaaatttactttccttactgtaaaaagagggcatgtgaacaccaccaacaaaagcggcccccccccacccccgtggaaaaaaatgggcaaactggtaatttataaaaagaggagcaggaaacatgaaaaaactttcagctttactagcagtactcccagaaatgcaaatcagtgagatactgttgttgtttttttaattggcgtagattaaaaaatgaactacttatggtgaaggtatggagaaatgagctcactcataccttgctagaaagagtgtaatttaatatgattttttgagagcaaagtacgtaacaaaagcttgtaaaatatgtatgtgctttgaaatagctattccatttctaagaatttagtctaagaaaatacaaaaaaaatgactactagattaatattctgtccagggtgtgctgttatttaactaataccctcttaagcatttgttttcgtttttttgctgttgttaaggatgattatttcagcatttagatcaatctttaacttccataatactgtatttaatgaacatttagttagtattaatgataaaatgcaacataaaacaacatatgtaagtaatagctaaactttattttggtgtgtgagtatatgcattttttaaaaagatgaaaaccagaatgttagcattgattgtctctgagcagtggagttatttttagtttctcttagcagtaggttattattttttttttcctccaactt

SEQ ID NO: 128264 - DNA, 1707 bp, Homo sapiens
atagctagtaaggaaattttcagcaagatgctttttagcaaatgcagcattgaacatatgtgcagagaatgggggtgcaaatctgacaggtggaaccacaggtgcggtgggtgacatcactcactgtgagccttgagtggttcagggaccacgggggacatgtgtcaggagcatcttaccagaaagaggtgtcgcttaactgtgcccagttccttcaggagagcggttaaagtggtaaattgtctttaaaacaaaaaacataaaagccctaaatcaaataaagagcacggtagcgccgtttctccttttgaaccagtttgtagtgaaacgggaagtgtatttgaaagtttgctcagctagggaaaattactgatcagagttttcgactcagggttaaattatcttagtcgaaagaaaaataatagaaaggggtgtcttattgatgaatagattcatgttcacttagtgatacactagcttccaaaatctgcttattgagcagatacttattcaaggccccacaatcaactgcagggcaaacggttcaccacacatgagggaaatttggaaattagttgaagaggattgtgggaactgtgaattgagattgttcatctaaatgggagttaatagcgtttgtggttgactaagggcatcctttacggaagtggacctcacgtgcacacctcactgggagagggagagacctgccaggaggtgcacatctggccttccacgcttagtggcctgaggatgtttccctggggcaccacttccacaggccctctaaaaggagggcagaatggcttgctgtttgtatctttgtatttgtgttaagctgggttctgaaaatacagtggtgccaagacagaagagaaactttttggatgctgatgtgcagtgaaagctctccagtagcggcttttccaaagtcagtgggtttcatacaacagcatcccattcattcactagcaagagagctaggaagtcctgtggagctggtgttttaaagtattctgttaaacatgtatttcatggtagaatgaaagattcatgtgaattttaagatagagtgatatttcaaggaaaatttaactctgtcacagcttaggctggatccccaggtctgtcccgatacaaaggattcctccaccctgtgctgaaagttacattttggtgggaattttagagaagtgccacctctggtgtcatcagttatcaaaggtattgtggagttttcaggtaacgttaatttacttcattttgacttcaaaaataagcatgggtggtttaacatttaaatactatcttaggaattgcatagatattagaaaccctttatagtagtgttaacatgaatagtagcaaatgcttaccgtgtgtcaaggactctgctaagcattttattttcgtaactcacttattcctcatagccaccttatacaacaggtactacagtattatctctagtacagatgatgaaatacaggcgcagaagttaaggaatctgaccaagctcacactgccagtgacttgtggagccagaactgtgaagttcacagacatcccacgcatttccatattagctgtttgcaatttgtcactgtgtactgtcaatcagtgcctcttgaattatttctttagtaaaatattttttgtgggataacccagcacccacacagacataactgggaaaaaaaaatgcac

SEQ ID NO: 128265 - DNA, 1255 bp, Homo sapiens
ggccttgttttgaattttgaaagtagtgtctgacaattctggaatccagaaataaattgttggaagttcaaaagtataaatttgagcctttgtcatcctgaattctttcttacctgtgtcaccccatccggtctgaccagttaccacgataactgctttgtgtcgcctgtgtcttgggcctctctctttccattgctgttggtctaagttgagccgttatctcggtgtcacttgtcttctccgaaaccttccataactctgtcaccctcacagaataaagaccttgcatcctcttcccactgacccagccgccacctctcatgacttgcccaaatccttcaccgggctcctgtgatcagttttctgcctcatgcttgtcttcccttggacatcagcctccctgtacctctactgctgttcaaatcctgctcatcctctgagaaacgctcaaagcacacattctgtaaaggcttcctgatcttgtagcctgaaacgacttctttcccctattaacttgtattgccatttttgtctgtatgtttaatatggcagcaaatcatccatgccatatgacatctcttccaatacctgcaggcaaaactttgacattcgtgttttcacctgtttatatattgttgcaggggagtataaacccctctctattggtaatgtcttacatagcatttcttaaagctaactttctggtagaatactcagtaatactgcttttagcgctgataccaagacccatatgtacacagaacctggttgtcttggagagatgcattcctttctgtgaatgaactgaatttgaaccataagatttacagctagcatgctttaagtctgttctttgttttttcttaacaactttattgagatttaatgcacatgctataaaagtcactcatttaaaatgtataattcagtgatgtttagtaaagttagagttgtgtggccatcactacaatgcaattttagaacatttccatcaccctgtaaagatcctttgtgtctctttgccgtcactccccattcccaccatccccacaaccccaggcagctactaacctgctttgtctctatagatttgcctattctggacatttcatgtaataaatggagtcatatgatacgtggtgttttgcatctggcattcatttagtgttaatatttttgaggttcatccacgctgcatcagtacttgattttttttttattgccaaatagtctgactacttggcattattgtgtg

SEQ ID NO: 128266 - DNA, 1082 bp, Homo sapiens
aagatccaacaaagtagagctttaactagctttggacatgtaaatataaataaaaggcaagctcatgaattcgctagttcttccctgaactattcgttggcagcagtttggacgtgtcattacgtattcatatcatgaagctttcacctgtctttttgcatgcttccttttgaagccaggttgtaatgtcaaatgcaggagtaactcttggtagcacacttcttaaggaggtggaatgagaaactcctaccttctaaggaagcagcatgggtaacacctctgagcctgggcttcctcatttgtgaaacgtagcttgtacatgcagagaatatacttactgtgaggagtaaatcagtgaaagcattaaagctgttgtacagagtctagcgtagcagctacagtaaatattaactcctttctttatatagttaataagctgacatggaacagttgtactcagtggacattctggaggtgccatgggtgtgggtaaataaaacgcagcgtatagaagaaggtccctgcagttcattcagttaacagagtgagtgcctgtttgtgttttagaaattgtggggcaacaatatggaggatggattggaggggacgaggccagtgaagaccctttagttagtgagccagatgggagttaataatgcctagactccggcagttgggagtgtaaagagaagtaggataagaaggagatagaattcatagaactgatttttcatcaggggtaagaatagagaggaatcaaagctgatgggaaatgcagaagggggagtgagtttgaagggagagagaccagtccagaggctaagcatgaccctcagttgaaagtcttggtagagggaatggggaggaaaagtgagattgcacgcaacatgaggaaaatagataggattagatatttgggcagttagtagagagggtggtgctttcgtaactcctaggattccaagctgggcagctgaggcttctgacaactaagtcaggaagaaaggcagggagagaggagttctgtgttgaacttgtgagtctgtggcttttggaagatccagcggaaggaggaggaagag

SEQ ID NO: 128267 - DNA, 1089 bp, Homo sapiens
ttgtatgatttttcctatttattagctgtttgtgttcctgggaatttcctgagcatatcctttgcccttttttctttgagtttgtctttctaattgtcatctaggtcaagtgatatatatttttgataacttccgaaggcaaaggaaggcaacatagttgtgcttgtgcaaacttttacccaggttttctcttgagtgctgatatcataatgattttgaactaaaattctaagcgtatttttgtacacagaccatatggttaacatgaatgtgtttgcacatagaaagagaaatggtctctagagtgggccctgcagactgagtttttctgtcagtgtgtctcaccttattacagtaccccagagacaatccactgattctctttatttcttcctcaggtttgcctgcaatgagatttcattctctacatttaaaggacatcctttctgagctgctgtgaataaatttggaatggtactgtatattttcatctaatggagaactagctgtactttgaataaggattgctgcactggacgactttagaacatccctcacaatgtcgtcaacccggagccagaacccccacggcctgaagcagattggcctggaccagatctgggacgacctcagagccggcatccagcaggtgtacacacggcagagcatggccaagtccagatatatggagctctacacgtatcctcctgcctagcgcaggttgattgcttagagttttgattatttactagtatgacttatgaattattagaattttatattgttttctcctcccagttcatcatgtaaaataatcgcagggttcatttttagccttaagtttttgaacagagtagaactggttcatttttagtcaaatgcagcactgggcagtacagtcaccactgggcacatgtggctgtttacatttgaaatattttaaagttccttaggcacactagctgtgtgattaataaataaaacatttctgtcatgtagaaggttccgttgggcaaagctggtctaaagcaaggtcctgaggttctcagcagatcatttgttttacgtccatttgtttatatattgtct

SEQ ID NO: 128268 - DNA, 1079 bp, Homo sapiens
ttgttttgttctgttttgttgatctttctgagtataagtatctttccgttcattttattcaattaataatacatgcagataagctcatcatatttaaaggatacaacagaacacggtggttttctgccctgcctggccccatcttctcattctctgcgctccccctgcagatgcagctgttttgcaatcagctgtctgtgctgtggtttatacatctctctctttctcaggagtgtgtggacactgctgccgttcactgataagttttagatggctatgactattgtaatataaggacttggctctctgagtcattttaaaataaagtttgtgttatttcaatatttagaatctgtgcctctgaaaaagttacagctgagcatcataatagacagtgcttattgttagctttttgtttttcctggagtcagtaattgcatttttcttttgggacagttttccacaaggtcagtcacatcagataatctaaaaggtccagatttttttataggcaacctccctcctggaatgttcccttctccaccttggcggtgttgctctcaaggcctaccaacaaccttgtgaatggggcttgttgacttttagctttatggatagtgtgaatgggatctttgttccattctagtttttaacaggttttggttgatatattgggaatgcattggtaatgaaatataagaaaatatgtttatgttaatgaccgttaacgtctgtgatatatgttggtttccttaacttttctccaagtcatgtttataactactgtactagtgttcaccagtcaaaccaagcacgaggagctggagttcctccttctaagtcgaaaaaggggcagacacctggaggagctcagtttgttggcctggaattatataaacgacttaaggaatttttgaagaattacttgacaaatcttcttaaggtaagatgttttatatatatactgagtattcataacaggatataaaaaaagtgaaataatggttctaacttgttaaatctttcactgtcatctgttactgttttagacactaacgtaggtgacagtgttttgctat

SEQ ID NO: 128269 - DNA, 1130 bp, Homo sapiens
tgtatctagccacaagatgagcaagtgggtccttcatctggttctacactgtcaaagagtgaagacgtctatactgtgaccccagggaaatttgcaggaactcttctgtgtatatattttaaatattttttatttacacaatgtgcaaaaattctgcatgctgcaaaattgttttacctaatttatttttgcaagctaattgaaaactttaaaacatcttgctaacagactgtatgtagttggctggccataagttgtgactagtgtattattttcatcttccccaaatggtgtttctaaggtcttgctgaagccactgttctttttattcacaacacatcataaagtgaatgttgtaattaattaattattctttagtactaaagtaagaaacagtatattgtgctaagtaaaaaggttgatgaccatgccatcagtgatatttttgcattttaaaaaggtcaagtaccatcatccaaaatagcttagctttacattttaaagttcatttcatattatttaaatttaaatgaacaaaaaattatttgtctcaagagatgatccggtttttacatggcttgtttggtcactcgtgtaccttatacatgtggagcttccagtctgttgtagccatttagttttcattgaagacactgaggctcagagaagccagtgggctcgccccagcccttcctgcagccctcctgcccccaccttcctctttcgtgcttctctgctgcacacacctaaatggcagtgctgccatacagtaccattaacgtttttaaagggtaaggtttactttgtagatgccattaatccctaagaaaaaaaattccggttagtctccttcaaataaaaatttgtgactcaagttgtggaaatctggataaaaataattttcgtaaatgcacattttcttgaaatattgttatactattgtacttaccttatttttacagatcaccacaaaaaagtgtttttatggtttttaagtaaatttaaagaaggaagaagatgcatgtaaaaattgaatagtattagtctcattgtctgaattgctaagtaggacatgttgatttcttttttttttgggaaggggtgcggcggagtcttgctctgtcgcccag

SEQ ID NO: 128270 - DNA, 1050 bp, Homo sapiens
ttgaactcctgacctcaagtgatctgcccacctcggcctcccaaagtgctgagattagaggtgtgagccactgtacccagccaatttttttttaaacaaatatcaaaaatacagatgattttgtggtatatttcttaataaaaaggaattacccgcatatcaaatgttcagggtactttttttgagtgtgtttgcatatttaataccatgaaaaatgttccagtttaatttgagatgaaagaattattttactatattcttgtgagtttatatatattagcatgtttttgtatacagaataatttaaagaagccatctaaaatcacatgtgtcaatgtattttaatacagtagatgttattcaccgttatttttaatttataatgtgacaaattagtcatcttaaagctttagttaacttgtttttaggatggagaagatttgatggatgagagtgtactgaaattctacactcaacaatgggaagattatcgattttcaagcaaagtgctgaatggaatttgtgcctacctcaatagacattgggttcgccgtgaatgtgacgaaggacgaaaaggaatatatgaaatctattcggtaagagttttgttttaaaacgttttaaatttgtttttgtttttgttttttttaatggcaaattgtctttcagcaagagaatctaggcaaatattaagcttttttcagaatagtaaactaattttcattgttttatcaataaatgtcacttaaatattttttagcaagaaagtagaagaatgggtaaattggagttctaaaatacaatttgcccatttctgcatttgctttttaaaaatttcttctttaattacctgaccctaccatcacagtttgcctggaactgcctgagttttcgcactgaaagtcctgagtcctggtagtcccaggcaaatcaggtgccatacctgagggcgagccctgaggattagccctcccatgctttagagtctgggaaacgctgcttcatggagaggaccctgaattaattaattactaaatcaccctcagtaat

SEQ ID NO: 128271 - DNA, 1798 bp, Homo sapiens
gtttccaacaacagttaaagaaaatgtaaataaagaagttgagctgacaaatgtctgtgcttggatacctcttgaagttgttgactctagagagtggctttctgcttttgtcctgatagcagattttgaccaacttgtaatctagaaattttgataaagtaatttgagatttaggttatttcctatgacttcaatcttggaaaaacatggtaaaagtatagacattttgtacttttttttctccagcttgcattggtgacttggagagactgtctgttcaggccactgaataaacaggtacctactggtgtgagcgtgtgcatgttccttttaaaatcccttcgcagtttcgttgcttagcttttgtctcgtcactccttcggattatcccatcttacattgtttagtggctgtgaatgtttaagggatatgtagtaatatatatcatattctataacctgtgtaatatttttctacatcctttctaaaggtaacaaatgctgttttaaagctgattgaaaaggaaaggaatggtgaaaccatcaatacaagattgattagtggagttgtacagtcttacggtaaataatttccctttagtttattcaaagttttcacatcaaatggcaattacaacaatgctctaacagatgtcatttttaaaatattttaatattataaaggatattgttagcatttacgaaggtacttacatttctttttaagtcagtgtgactttatttgtttttatccatcataaaagctgtttgatccgtgtgccttaaggaaattttgatgaaatagacattttgattattttcttttctggtctcatagtgaattactggatatgttagagtgtgagctcaatgataaccagaaatctatatcagcttgaaaaattgagattgagaaactgataaagtaatacaatgtcttaaaaacttgggtagcattgtatttctttgcaaatttaaaattagttatttttattgcttttggaaatacaaaagttctctaaaggaacttcataattttgaagcatacctggccatgggtcagaattacttgctttttatacgtcttggatttttttccttttttattttattgaaagagtgtactttaatactagtgagtaagagttacttatgtcctgccatttcacatttaccttttaaacataacttaaactgaatgctacacctaagtatattctgtgaaatataaccaaaaaaatagggtaattgaaatatagctcatattcatttctagtggaattggggctgaatgaagatgatgcatttgcaaagggccctacgttaacagtgtataaagaatcctttgaatctcaatttttggctgacacagagagattttataccagagagagtactgaattcttgcagcagaacccagttactgaatatatgaaaaaggtaagcttaaatatagtactttaagtagacttaagttaaagtcattgctactcaagtgagttctttttagcatatacagctttctttacaagtcatttgttgggcattgtttttctagagtgtttttatcaggtgcaagtgcttctcctaattctccaaggagcttctataaattaatttggtaatcgtgactgagagttctccttgctgttctaaggatataaccacaatagctacatgaattttttttaactgtttattgtagaatgtggatttatataaaatgggcatcacagtcatgtcaatgagaaaattttaagaaacaaatattttcagatttgcaaactttaattttttgc

SEQ ID NO: 128272 - DNA, 1634 bp, Homo sapiens
catgcacctgtagtcccagctgcacagggaggctgaggcaggaggatcacttgagcccaggagtttgaggctgcagtgagctatgattgtgccactgcacttcagcctgggagacagagccaagatcctgtctctgaaaaaaatatatttaaaacaaaaatcattttggagagtattggcatttttataatgcaaaatataattctctttactcagatcacctgaataatttattgaaatttcttccttgctttgataatttaatagtttctctctaaatttttgaacagtctgatttctgatgatgatttccatgtaatcacttcagggcttatatttgtgtgactcttggcttcaagtagtttttaatctaaagtaccacatcttagtatctgcacagaagatgcattcatttcttagagtggcagagacattacctcaaaaagataaaataccattctctgagggatcaaaatgatgtaaagacatgttaactgttaataacgatgatgttgttagggcacttaaaaaggaagtttgaaatggaaatacgtattacagagaaaatggcagacatcagtggctgtttaaatatggttgttgtttaccgtaaaatcaaagaactttttcctttttctttctgttttttgagaaacggagtcttgctctgttgcccaggctgaaatgcagtggcacaatcatagcttactatgtcctttaactcctaggctcaagccatcctcccgcctcagcctcctgagtagctaggaaggactacaggcgcgtgccacacctggctaattttttttttagagacagggtcgcactgtgttgcccaggctggtctcaaaatcctggcctcgagcaatcctcctgcttcagccacccaaagtggctgagccatcatgcccagccctcccttattttcttaatcgcattttattagagctggcatgtgaatttaatttgccatttttcagtttcctttaatttacatattaaagaattgtaacagttctttaccaatgaatcaaaaccattcacttgaattaattttctccaggcagaggctcgtctgcttgaggaacaacgaagagttcaggtttaccttcatgaaagcacacaagatgaattagcaaggaaatgtgaacaagtcctcattgaaaaacacttggaaattttccacacagaatttcagaatttattggatgctgacaaaaatgaaggtgagccacaagactcataaaatgtaggtatttataattatctgtagttttgatattgcttttgattctagactctcgagtcaacggcattacttgcccatgtcagttttaaaaagatgcatgtgtttgtacatcgttatgtgccaatttcagacttctgcagagcattttggtttgacttagggggaagagtgtatttagaatatgacttgctccatacactttagcattaaatgatgctaccccaagttttttcttgactgttcttcctttgaaaattctctgagatgaggagactgtcatcttatatttcccttaaccactcccatgttttactggggcatgttaggagctcaataaaagattgaagtttggatttttcttctatggtcctcctaaagtaaccac

SEQ ID NO: 128273 - DNA, 1049 bp, Homo sapiens
tattcattatttttaaacaaatatttgagtgcctattatgtgtcaggcataaatactatttcaatcttgagaattttaggaagcattagagttgtttctgataattttttttttttgcttagtcttaagttagtggtttctcacagtaagggggaaaataaatttacaatagtaaatttatagtaaatagtaacaatttcattgttacttttagcaaaatatacatataccaaatagagaatatttggttataattaaatgctattgattattaaagtctaaaaacatggttatcttttgcagagtatttttcatctcagtataaatacataattagtagaatggatatgcaaaatttttttcagtgcataaaaggggtttcttcctctttcagatttgggacgcatgtataatcttgtatctagaatccaggatggcctaggagaattgaaaaaactgttggagacacacattcataatcagggtcttgcagccattgaaaagtgtggagaagctgctttaaatgtaagtgagatttcattgaaaatcagtcaggctgattatttccacatgcgaactgcaagcatatgttatgcgtctctacttccaaatctaaatggtaccattttcattagaactctgagaaccatgttttgtctttttgaagtagatagttcacagacatctttgtttagtaaatacctccgtaagtttttccctcgcactttttaggcgttaataatgttattttttttttccttttatgccttctcactgttaaattccttgcactcactagaagaagctgcttccctagaaacaaaaggctcctggaagctgttactttgccactcacagtccacaggttgtgccttacaggaactttgatctggatagtagcctctggctgaagaccacagggctgtactctggagaggccctgcagtttatagcatttctctacacccctccgcttccccagggctacatagaatattcctgctaggtcatctgtaattcaggtcatctgtaattcaggtgataatttc

SEQ ID NO: 128274 - DNA, 1328 bp, Homo sapiens
cccattgtgaggccccatgctcaagaccgcatacctccacacagcatcacgttggaggtttgggcttcaacatagggattttgggggcacacagttcagcttctggtaagagatagagacagattatttcatcattgtattctaccagtgtcaggacaccttgctcttaaatgctcacaaattgtgtatgaattgtgtgtgtgaacacttcactgtgcaacatagagttgtggggttttttgacagtgtattaatattaatccatgcatatttgtactgtaaaatatagcaaaatgttactagctttgctagtagttccatataattaagtatatattgtatactctgatttctctaagattcccttgtatacatttgtatttttgtacaaattaataagacagtcatctgggttcttctcagcaagcttgcgggttcgagtacacctctaaacttcagcgcatgtttcaagacattggcgtgagcaaagatctgaacgagcaattcaaaaagcacttgacaaactcagaacccctagactgtgagtatccgtgtgtctctatgttgtgtttacaggcagagttctctgtagcaaatgaagaaatgacaaaatattaggtgaagatgggaggggctttgtcagaaattcaagaactaagaagcgggagattcctcccaaatgcccagccctcctcccccgactcccgtgtgacattaggagatgacaacccttgaagtggtgtcagctctactggggcaaggtcaccacctgttgggatctggggagggactcacaggcgtggttttgtcttgtaaaccttagcttggatccattctagcatttattttaatgttcacttggcctgcataggtaacagtcaagctaaagacctgtggcttcagactgggattagggatcagtacaggcaggtgcaggtgattcagttctccaggagaggcagctgggctggtattttagggccttgcatagtagtaggatggcggatttatgcttacatcatcttttgatcatctttgtctttttaaatgaaaaatggagaattttatttttcccaaatcagaatgacaattctattgtaaaactggacagttttgccagtgggctttttaactatctgcgaagatgaaattactgttataatttatagaccatgtgtggcgtttcccagtaataagtgaaacatacactataatgaagttagcggttttctcctgcttgtgagtttgcatgagtctggggctgtgatgatgccgggcctggcaagcacaggcgtggcttgagtggactgagtgattcaggacagaaa

SEQ ID NO: 128275 - DNA, 1052 bp, Homo sapiens
acagtggatttcagcattcaagtgctgagctccgggtcctggcccttccagcagtcttgtacatttgccttgccgtcagaggtaaggatgggtttgtctgccatcccattagtgctaagtggagggtggggcagggcagccttcactgtggaaggggacaggcctgcagatggccttcctgctggctggctgcatcacggtgaaccatgggggcaacactcagggaagagccctgtgcagtggggcaggtctggatgtctaaaggtgggctgtctgtcccagctctacagacatgtttccttatcttgtaaagcagaacctaattagttgtgtaatgaacacctcgatggacctgctggtcttgaagtacaaaccttttttaagattgtaccttccagtgcttaaagtgctttacaagagaggcagacacctggcgtttgtattttacttttatgtaagcactgactttgtactgtaagcttggaacagtgggctttacttagaaacgctgcctgtaggatgtggtgagatctgtattccatataatgctgtccttttatctagttggaacgtagttatcagcgattcacagctttctacgccagccgccacagtggccgaaaattgacgtggttatatcagttgtctaaaggagaattggtaactaactgcttcaaaaacagatatactttgcaggtaagatcacatttttatcttaaaatttttctattctaaatgaacataaggcaaattatggaaatcattatcagctgactcagcagcagaatctagaattcagcttctggtgaaatagtggcaggtttaaagcatggagttgtaagaatcagatgaaccaaattccaattctttctggctggggagcaagttatttaatgattgtgagcctcagttttctcctccattaatgggagtgttagtactttatagttgggaattgatgtgaaaattaaataatgtatttagtaagtgtttggcaccgctcctgcctgacacacatcagctgttcaggtagtgacttcaaaagctggagt

SEQ ID NO: 128276 - DNA, 1848 bp, Homo sapiens
gatttcattgtgcatggtttccaatacaggttcaacatccctaatccaaaaatccagattccagaatgctccacaatccaaacatttttgagcaccaacatgatgctcaaaaaaaaaaaaaaaaaatgctcatggcgcagttgaaatttcggattttccaatcagggctgctgaatctgtaaatccagtgcagtattccgaaatccaaacacttctagtcccaggcatttcagataagggttactcaacctgatttaagtataacagaattgttcatttctattattgtgtgatcaaggccagaaaggggttgatttcacttctagaagtcagggtggaaggaagcagtaaatttagtgaacttctaagaagtaccaacttttttttccttccagcatactcttcttttgggtgatttttttttttttttttaatggaaaatggactgtgaggttgcctgtggtggttattgcaaagaaaaatgcattttccctttaacttcctctttttctctttaattgcaggacattttggcgcaagttttacagattttattaaagtcgaagctattggtaggtttgcgcccttttatcttacactagaagaagccttttcctgagattgtagagtaacaattgttttcttacaggtcttggaagatgaaaatgcaaatgttgatgaggtggaattgaagccagataccttaataaaattatatcttggttataaaaagtaagaaaaatctaataagtagatggcccttgaccatagacacgtcccccgggagccctagcacggatctcagtattgttacaaaccaagggagaccggggactcagtgtgaagcgacaggcactaggctgggagtgtgaggtaggcctttgattccattcagcgagcctgatgtttctccaattctgagcttctgggatttttattattttggcaaataagtctccttaaatggctcaccaagaaagtttggacctttgtgtccaagtggcttgattttatctcacttgacaaaatttgggagagcagattagggacctggattttctgtaatgtggatgtccctgttaatggccgagtaggaaactaggccatgatcggactctacccagtgctgggtagaggacattttcacggagagctcacagaaatcaacattctcccctctgtctagggaagcagggcacttcttaaaggttgaaaaatagaaagcagccttcactgcctaccttttaatataatagtgatcggtttcctcatttttcttgatagtaagaaattaagggttaacatcaatgtgccaatgaaaaccgaacagaagcaggaacaagaaaccacacacaaaaacatcgaggaagaccgcaaactactgattcaggtgacttatctgtatgcctgtgccaggtgtgctgtccctcacgcagggatggctcgcaaggacgggccgtggggggtaggcgggggtgacaaaggagtgattgccagatgaatgggtctgtgatggcagaaggtggcaaggccgagagccagggccttgttatctgaattagtcctttatgtcaccaggcaaaacagggcagtcctcttgctctaaatgttggaaagcaaacattgtggcaggtttggctgaaatgagggggaaggagagttcttcagtggggaggatgggcagcttccgtggccttgaagatttaattttgtctccttttttttaatgctttatggttgagttaaattattgaggtaaaattgctcaaaagacccaaacattgtaatgtttgccacgttagagttgaaacataggcaggtagaattggttccctctcccgtctcacc

SEQ ID NO: 128277 - DNA, 1314 bp, Homo sapiens
actccagttcttgcttcacctgggggagcaactggcgggctgctctttggccctctttgctatggtcatcattttttccagaccatggttctattttgccttcccagcgtcaggcctaagcatcctgatgtggaccagccttcctgggaccacttgcttcagaggcataggggaggctggtcaggctctgggaatgcttgtagacaggtttgttcacttcagaacttggcagcgtctcaattagatggccagcaacacagacctatgcattgccttctatgaatgtgccgttatgcaggcagctgtgtaattggatgggttttttttttttttttttttttaaagacattttaatgcacccactatcttcagcaggctttgttgtgttaagtctcagcacatgttggatgggtggccatccagcggacatctccttcctgttgtttcagatacagccaggctgatgccctgaagtatgtcggcatcgaaagagaaatggaaatcccttgacatctgctacctcctcccccctcctctgaaacagctgccttagcttcaggaacctcgagtactgtgggcaatttagaaaaagaacatgcagtttgaaattctgaatttgcaaagtactgtaagaataatttatagtaatgagtttaaaaatcaactttttattgccttctcaccagctgcaaagtgttttgtaccagtgaatttttgcaataatgcagtatggtacatttttcaactttgaataaagaatacttgaacttgtccttgttgaatcatctctcataacgtgtcaataactgctttcaggactgctcaacaaaaaacttttaaatttaactccttgggttttttagttgtctttgtatgaatcttgatttaactaatactgcctgtgaatatgtggaagacatatatgaagaacactgctgtgcatcctgagggcttacccagtaaagggcttgatcttatagacaagaccagggtgggtacgttccagtcagctgtgcaacctggagaaagagatttaacctccaagtctgttccccatatataaactgacagagtagacttttaggttatttttaagaacgtacctagttctaaactccattagtctagatagagttctttagaaacaaacacaatataagttgggattccttacctaccttatcacaaaaggtgattgataggtataaccaaactgtagttttatatcttctcagaggtaaaaatcacaaactctgaaagcgtcaaggaaacgacatgtaccttgcatgccttatgataatgtggtttgtccca

SEQ ID NO: 128278 - DNA, 1006 bp, Homo sapiens
gtgtcctggggctgaaaatggaataactattaatagaatcacttggggaaagtagagggaaaggtatggagaggaagagtgatttggtggtgtccttatattaaattcaggttgaaagtgaattactcgaggaaatcaagggctgaagatacagggaagccaaaagtgcagcaggcctagagcaccttgctgaacgatggtcattgcagaggaccaacaccaccaaaaggttttctgtaagacagagattcttatctgctgtataaggaaaacataatgttcatagccattctcagcagctttcacgttgactgaagctgtgtgcccaattactgccttagaacaaacaggtctgaggatttacagtgatagcttttgttttcattctgtagtctactttgtccccagtccattttcaccctccttttttgatgatgtgattgtgttttattctctagcatctattgctggcaccatctgacgtggcaggctgggggatttttatcaaagatcctgtgcagaaaaatgaattcatctcagaatactgtggagaggtaaggcactgataacctgtattcaggtggcattgtatatactaactttactttattttagattgattttattaggtaagtctgtgggtttgattggaaatgaattgccataaactgccttttcagcctggacttctgcatgtttgtggatttgcatgcttagtaactggattgtgctgggcgcggtggccgactcctgcaatcccagcactttgggaggccgaggcaggtggattgcttgagctcaggagttggagaccagcatgggcaacatggcaagaccccattgctacaaaaaatgcaaaaattagccgggcgtggtggtgcatacttgtagtcccagctacttgggagctgaggcaggaagatcgcttgagcctggaagagcctgggaggttgaggctgcagtgagccatgtttgtgccactgcactccggcctgggcgacaaagt

SEQ ID NO: 128279 - DNA, 2317 bp, Homo sapiens
ctgctttgtgcagcattgggagctcaggagttctgaccaggagtcatggatgaacacaggaaatgacgtcttgccacacctggggcagcctgagccatcaagctgtttgagttgcttcaaactgatggcaaatataaactgggcagggcatgactcttggctttaacgcattcctgtattcatggcacagatagatccagttaagcagctctctgttggatttgtagcttcccgcagaaatttggtttaattttctttgtgtttttgcaggttgtgggctgcacactgcagaaagatacagctgaaaaagggttagcatctttccattcctctcattattagcttaacaatatctgctttgttttcatttgttttagaatagtaactggattagagcttgggttattctaatataattgccttctgtatgttaaaccaatttgaatggaggacgtctactgatgaatccccagtcaattctcttctgtaaagtggaggctgactggaaggtgtgagtccgagtcagttgaaggagaagtgctttgggatgggactgagatgtagccgtgctttagatggaactcataagcacttgggggtgggagagtattttttgccatcgttgtggaaaccggaatatgtgtaatgttatgcattcagtaaaggcaggccagctacactccacaggtagtagggaagaatgtactcgtgttaattgtgtatgatcgtttccatctccctggattcattggcctgcatgatgttatctttactcagacggctcctctaaccatgtttacaactatcaaccctgtgatcatccacggcagccttgtgacagttcgtgcccttgtgtgatagcacaaaatttttgtgaaaagttttgtcaatgtagttcagagtgtaagtatttgttgctttgatgcaattgcatgagaactaaataggtctttggttagcaatttaaaaaatcaaaaataagaacatgggagcactcccttgtttacttgacgaaactcatcaatttgacaagtatttattgagccccatacctggccctgtgccagtggccagtcagtcgcctgggtgttgtgtgtctgtgtgtgtgaggcaggcaaagttgtattaaaggaacctgaattttatttttttcttctttgatcatttaaattaagttgtattaaagttggcacagattgtaagaggaatctagaaggagctacccaaataatttttgggcaccagaaatcgtcagagttaggagggttttagtcttcagattaaaggaatgtagcataaacatagtagatttttataattgtttaatgagactgcacatgaagcttgggtattaagggagtgtttagaactaggggctattggaatggtcaaggaccatggatattgttccatccagaccctttattcacaccgactttaaatatatacactatttaacaaatgaaaaatggaaaaacaactcagtggtggtctttttcagtgcaaacagctataacttcgctgttaatacttccatttccttgtctatatagtagggtaataaggtggttgtgagggttgagagtcagtgagatgcccagtacagcccttgccacgtatctttctgcaagtttttgcatacggtgatgagtgaagaacctccaaacctctctctgaaggtcaaaaccgctttccgggatgccgctgcaaagcacagtgcaacaccaagcagtgcccgtgctacctggctgtccgagagtgtgaccctgacctctgtcttacttgtggagccgctgaccattgggacagtaaaaatgtgtcctgcaagaactgcagtattcagcggggctccaaaaaggtgagcaacaagtcacttctggaagattgtttgtagttagctatttagtgatgcaaatgtcaggattgccttagatgatttagctggggcaaaaagtaaaagtgatccttgaaaggtgcaactgatgagaaagtgttcataattttctctgggtaatgcacccttgggcagtctcttcagttttatatagagcaccatactctgatagtaggagaaaccagcaaattctgagaagtagccattcatggtatcagatttaggaataagaggtattttttctacctgtttaatagattatttgaatttgtcttttagttaatagtttatctagtatccttaatgcaaataaatggtgatttctatcaaaatatagactcattctcatcaaagagtatttatagattccttgctatgtagagtaaaagatgaaatttcccatggcaggtttttatagactta

SEQ ID NO: 128280 - DNA, 3886 bp, Homo sapiens
cagtgtacccgcatttgaatctttctgttacattattttggaattttaggtttcaaacagtgtatctttctaaaatccgtttttttgacattgtaattttctgtggcaagacactataagctctcaccaggttcttggattgggtatgattcacaggaattgaatgttagtaatctggggctgtcctctttatcattaaaaatgagtttttacaactggtgacaagctgattgctgacctttctttagaaatcaagaaattgtatgtcagaattaaaaataggaaatctgatttaattgtagagggtctatcaactgcttagacagagatagtaagattcaatttaagtaaatgtttataaccatagttatgcgcatcagttttacttgcaaggagaaaaatgagaaatcacgactcattccagaatttactgtttttccttcctgcttaatggttggaggaggaggaatggagaatacgttgtgatcattcagtaagagcctgaaggaaagttgtatgaagtaacgtaaaccacatattagcaagattataatccattaattgacttttccagtggaactggaagagtgaaaaagtaagtattttatagttatattagattctttgtttcatttattttgcagcttttcatgcaacacccaacacttataagcggaagaacacagaaacagctctagacaacaaaccttgtggaccacagtgttaccagcatttggtaagacttagtgcctaattattgcagagggtacttgagaggactttgcactttggtggaggtgatcaagtcagcgttaatgttgtctgcacccatgctgttatgggccatatgatagacagagctttctcacccatgctgtttcttccatagctcatgtactgcacattttagtccttcattaatgtggtattattctttttaaaatctgtgttatctcttcagcaacatttcaaggtctttaggatcaaggacttttatgccttccacaaagtctatgagagttgcaaggcacagatagtccgcttagaaagcaggcatgcagtaatcatacgcagtagatcccaagcccctctcatagccatatccctctacttgagttttagatgcactgtcatttcagctatgtgataggttccacagattttttttttttaaatgatggagaacaggtaaggggttaggaaaatatgaggtagaaaagttgtttttacgggtactctcttatttttaccatttcccctctttgaaccaagccactcctacctaggaactaaatgggtatatattgcctgttggattttggacagaagattcattgaatggcacctgcagaaggtatcctatttttaagcaatttggtttttgtagaatgaagtataaaactgttggctgctgtcaaacttctcccttctatttccactaaaaaaatggaattcttgagcacttgttttataatattctttacaaggcagaattttgtttggctcatctaaaatgtttctgtggtctctataaaccatgctcttaccattgttttatactttgagactggattattgtacttcataatgcaagatgtaaccctcacagtcttattcctgaagttcctttcatgtcttcctgtggctgtgtatccttcacaggaaaaaaaaaaatgttggatgttttaatagtaagacaggaagtgacaaagtcaagcatgtttgtgttttgtgttcttgtatagttgaaatattaacacgaagaggtatgcattatcttaaactctgcataggtagtctgactccgtgcacattaggtatatgattcttttgtaaagattcacttttaaatagactgtatgtccatagagataattacctttattacatgaagtatatttcatactttatcttcttatattttaacttaattataactagctaatatattttacaaattcacaatatagaactgtcttgcctgatttttgtaccattctaggaatatatagaacccatatttctctttctgaaattttcagactatcaaaagcatatcaaaacaagtatattagacatgcaaatgattatttgtgataaatggataatgtgatacattttttgactaacctggcttatatagtatttttttttctcttccatcaaaatgagttttagaactttgccctgatgttgacatttttcatttcgtaggagggagcaaaggagtttgctgctgctctcaccgctgagcggataaagaccccaccaaaacgtccaggaggccgcagaagaggacggcttcccaataacagtagcaggcccagcacccccaccattaatgtgctggaatcaaaggatacagacagtgatagggaagcagggactgaaacggggggagagaacaatgataaagaagaagaagagaagaaagatgaaacttcgagctcctctggtaagacacgtctaataactgggttttactgttctgtgaaagttcgtgttgtgaggattaaggatgtataatgcattgaataattttcttagttggttagtttcagtataaagaccagagttatctcaagaatgtgtagctgtgttgtttctgtttcctgcctgcacccgtaccctagcttgtggtgtttgccctgcttggttgtttgaaagctgatgatgcactttattctcattctttgtgccattttcttttttcgatctttctcaggtagggaataatgaaatttggatcatttggtttaatattcttgacgttctgtgagtagttttgttggaaaatgtgaactacgatgggttagtgttttgccgattggatttgagttgtcctcatcttttcgcttttttcttaagcacaccctgaattgtacttcttaatattatttccaatcatttcttgaccagtgcttacatttggttttgtagaagcaaattctcggtgtcaaacaccaataaagatgaagccaaatattgaacctcctgagaatgtggagtggagtggtgctgaagcctcaatgtttagagtcctcattggcacttactatgacaatttctgtgccattgctaggttaattgggaccaaaacatgtagacaggtaagatatccgataaaaatgttgttaaaagagcttcaaacatagagataaaactgtactcgttgtccaaacaaagaaaattcttggttattactaagctcctattcatctcctaaaaataatttttttttcttcccaagagggaattgaatgaaaattattctccaggtatgttacagaatttccccaatgtagacttttaaggttagatagcagtagcttttaaaagctagtaagaattgaaatttagcatcacagttcttgaccagaatataattacagctacccctaatgtgagggtagggacagcgatgtgtgttatatccccagcatctagcagtgtcacagaagagacaaagacatttttctggtatgcatgagtataagaatggtttgcctaaataagactgtcctcatggctctgtgactgtgcctcttgtcaggtgtatgagtttagagtcaaagaatctagcatcatagctccagctcccgctgaggatgtggatactcctccaaggaaaaagaagaggaaacaccggtgagtctgtcatgaagctccttagagaagtcaacatagatagacactgcaggcaaggcccttcctaagggctgttgttggtttctacttagtctatttttaaaaaaccttaaactgccatcaaaaacagaactatggaatcttatttccactgggaattgctagtatttttctataagaatacagcagccttcagtatatttggtatgttaagagtcataaaaattacggttaccag

SEQ ID NO: 128281 - DNA, 1130 bp, Homo sapiens
agacggagtctcgctctgtcgcccaggctagagtacagtggccccatctcagcttactgcaagcttcgcctcctgggttcacgccattctcctgcctcagcctcccgagtagctgggactataggcacctgccaccacacccagctaattttttgtattttttagtagagacggggtttcaccgtgttagccaggatggtctctatctcctgacctcgtgatccacctgcctcggcctcccaaagtgctaggattacaggcgtgagccactgcgccccacctgtcagatccattttctatttgaggggatagatttagagaggttaagtaacttataagattacactattgggaagaaacagagtcaatagttggtgttctctacttggcaaagctcatgctaaggcagcatagaatagaataatttggcgggtgaaatagcaatttctaagaagcgtatttcaaaaaagagaaaataacaaaaaggtaccttattgaccttattgatcatctagttcagctccttcattttacagatgagtaaacagacccaagaggtaaagtgatcactctaagtcacaaaatcagttagtagcagagctgggagtagaacctaggttttctgcttcccagtgctcttaaagcttttcatatttgaatttgaattttgtttttgactgactggcattccacagacatgtaaagtatgtgagaagtaagtaaaacacaaaatagagatgatttcttagaaaatcagctttgttatagagacataattgggtagagaaaatgaaagatcaaaaacttgtttacttccattctttttttcctttcatattctcctgtttagataaagaaagccgcccacctcggaaatttccttctgataaaatttttgaagccatttcctcaatgtttccagataagggcacagcagaagaactaaaggaaaagtaagaatttgttcctttgaggcaatcttgccctgtatggtatgtaactcaccattttggtttattacaaatggaatcaatgtagcggatgagccactacactttgtttacagtgtttgcaagatacttgaagcaacatgtgtacttgtggtactctgcattacaaaatatttcctg

SEQ ID NO: 128282 - DNA, 1049 bp, Homo sapiens
atccttagagtcatggtttcagttttttgtgtccaggaggccctgttaaagtgtctgaaaggataatatttgtaatatcatcatccattgtcattatcagcagaaagcagggtctgaaatgatcagttaaaggacagatccattgtttgggaggaggccaaagccacaatcagttcctagaagattcagttttctactagaaagttttggggaggggccattctacagaaagtagcaggtattaaagataagtttgcttcctttgcctaacaccagtcctgaaaatgatcttatcttttcctcccctcatttcaataataatgttttagtgccagttactaggctatgcctgttttgtccaagtagaaaaaggatacataaacttttgacattattgcttctcctgtgtgtttctgacatttgatgcgtttcagaatgtgggtttataaatgatgaaatttttgtggagttggtgaatgcccttggtcaatataatgatgatgacgatgatgatgatggagacgatcctgaagaaagagaagaaaagcagaaagatctggaggatcaccgagatggtatgcctgattattaggattctgtgtagccattacagctttctttcaaaaacagtagaaagagtagaaatagggcttagtttcttctttctctttttctttctttgttaaatatcacattgatagcagtataatcaaaattaacatattatggccaggtagggtggctaactctgtaatcctagcacttgggaggctaaggtgggcagattgcttgagcccaggagttcaagaccaacctgggcaacatagtgagaccccatctctactaaaaagtaaaaaaatgagacagggtgattgcttgagcccaggaggtgtaggctgcattgagctgtgattgtgccactgcacagtctggctgggtgacagagtgagaccttgccttaaaaaagaaaaaaaaaagcataatacttgcaacattatcttcacttgagtatctttgtttcctttggctagcaaagaacgtaatttttt

SEQ ID NO: 128283 - DNA, 1012 bp, Homo sapiens
atgaatacattaaaacctgcattttaattatatgctccttttatcccactttttcttttccttgtctgtctacggtacttgttatctttatgaactctccagttgtcctaaatttgttacctagggattatttgagattttttccacattccctggctgctactagtcctgtgtgtggcctttcccagcgtgttcttacctgtgggccatgatcatagtgctgggccgagcctacgccatctcaccctttaaagagcttctgtgtcctcccagtcaggcatagccagtccattctgcttattataattatctttctaaaattctgttttcaaccaatactcttttcaaaggcctcttaagacttagacttgtcttcacttggaattagtctctttaaacatgtacttcagaactgtccagtctttatctataactgctgtcatttttattcttcattgaaaatgctcttcctcctatgaatgtcaactttctttaccttgtatgcttaactattctattctgtcttaacttttgtttgattggctattcttctttcttctctgttgtcttccaaagcttgataaaaactcatctatcatctttactagcactgtcaactttgatattcatctcattcatctaaatattgaaatattttatgtttttgtagaatgttcttattttacatataagtacatatccttttggcataaactttaatggactatcaatactctgtatccctagaattttattatattggatgtcttacatttttttttcattttaccttaaactattacaagttaatggctgttttaataactggatcatcaagtggagtttgggagtcttagggtagttttttggtatgggtctttatagttgatcttgatacaccatatttcatcatcctctattaacatctaaagtgcgcgttaaaactgatgatggctgggcatggtggctcatggtgtcagacacctgttatcccagcactttgggagccaag

SEQ ID NO: 128284 - DNA, 1046 bp, Homo sapiens
ccaaagtgctgggattacaggcgtgagccaccgcgcccggcccaagttttcttattcttattaagtaagatttaagtggcttatttggtatacatattactattctgtgtggttggaatgtaagagaaatgaaggatgagctaggaaataaatgtataggaaaagcatggaggagttaatcagatcgctgaatctcatataagtacagtttttgattcttactgatattggtaagtatgggaagggttggaggttttgaaaatttggaaaatttgaagcatttttgcaccctaagtaaaagaaaagagagaatcctatttggtttatatgaccactttactgtcctaggtaaggacttttttttcaaaattaaatatttgggtaggcagcatctctttacaatatgatggctacagcttaaggttgtccttttattcttaagagtcaattttattttttctgttttagtgttcggtgaccagtgacttggattttccaacacaagtcatcccattaaagactctgaatgcagttgcttcagtacccataatgtattcttggtctcccctacagcagaattttatggtatgtaaataagatatcttctgcttatttgataataacttatttgaagtaaaaaagcatagataattttattgtcaaggtgaatcaagacagtataaattctaaaaagctatcaaaataacacttgaagtaatttttaaaaattgattaaggtagtttttttaaggcctgtgcagtattactcttttcctatactctccaaaggaaaagtgttaagcagtaaccatacctaggattaaaaatatttaaaagatgggctgggcattgtggctcatgcctgtaatcccagcactttgggaggctgaggcagatggattacttgagtctgggaattggagatccacctgggcaatatggcaaaacgctgtgtcctcaaaacaaaagttagctgggtgtggcgcatgtctgtagtcccaagctactcaggaggctgaggtggaaggatggcttgagggaggcgg

SEQ ID NO: 128285 - DNA, 1036 bp, Homo sapiens
aggggaaagattgtgggctctggagtgttagtaaactgttcacaccttcttgtttactcgagttaagagccttattagtattattacctttatctttgcctttttggaaagcaaattaatagatgaatcactgtcacagttcttcctaactactccatccttaaacctttacttccactaaggaaggaattatttttgtgctgcagtgactgtgatgattgagagattatcccactggcctgatgcaacccaatgctgagggtcaggtgtggcccatatgccagatttctactctgaatttcaccacaactagttctgctatttttaagacattttaaataaaaaatttaaacatttaatatgtgtgtgtgtgtgtgtgtgtgtgtgtgtgtatatatatatatataatgatttttcagtttcattttactacacttcttttttgctctattttcattgattgtggattatgaatgtatgtctaggatatttttgagaaggctctggaggacttacacctgggcagtagtactctttaaggaatctcggattcgtagacagggtggaaagtgctgtggttatttaggcacagagttataccatatttcagagaatcaaagatgcaaaatttttcacattttaacattggaaacaacatgcatcttagaatcactgtgataagaatggattatacctttgtttagttggcagcattttttcttagtgatacagaagataatgatgtaccttgaaatcgctgtcatcatagattgtatgaaatatggtgtttcaagggactatgtgcactgacacattttagcaatatggtatcatggcaatataaggagcgggaagagcaggggctccagagtcaggcttttggagtttacattctagcccgagaaccatgcgcaactttgggcaagctacttatcctttcttttctatagttttctcacctgtaaaatgggggctaagagtagtacccatcttacagtgttgtaatgaggattaaatagaagacatgtaatgtgtt

SEQ ID NO: 128286 - DNA, 1876 bp, Homo sapiens
ttgcataaaagtagcctgaacttaaattatatacacggtcattttcaccagaagggctagctaatttaaaacttgggcgtgttatcttttctttcctcaagtcctgcagaatatagggtagtttcagaaatcacccccagcttttctctagacttggtgacagctgatgctttcttctgactcttcctttcctggagtgccgaccttcctgcaccttcctcgctgttgtcacatggaaaggctacaggatgttagacaatgtcaacagtttactatgtctctggcatgaaataaatggaccaaccagtatctgagaatattttttacttggctaattgattgtatgttttcccctactatatggaagttggacttagcctttctcatgttaaagattattcagaggcaggacggccatggctgttgtctttgggatgtccactgtaaaatggggagtcatacctacctcacagggtagttgtgaaatttaaagaagctaactttggtaaagtctctagcacagtgcttggcacatagtagggtgtgttaatttctttcccttccctgcaggccattcacctgctcttccctctacgattttccataacacagtttttacttggaaccagccttctgccaagagtctcagtttggttgtgtactcctacaactactatttttggcttgacttccctctccagctcccagtggtccagccacacagtcgcctattgtaccagctggttgatgtaagtctatccatcctcagaggaacctggttacttaccagtaagctgtgtttctctgaaaatgtagcatccttggtaatgattctagtcccccccatcccctttttttttaaaccattgatgatgaatcatctctaacttccttgtgtgatcctcaagttggaactggaattagagaatctaatttgttgataaaggtctcctagtaagttcctgagtccaggacacatggctctgaccaggtgaaatgtggagacccatgaggtaaaaattcttttcactactctgagtgacatgagacttaattatgtaaactgtcaaggatgatacattttcaaagaaaaataagttgctggtaagtaactgggatttttgagtaatttttctgtaagtcaataaataagaatcccacgtttgttttcaccaacaaatgcttttgcatttgaatatttcataaatgaaaggaatatggttgttagttacggttaatagtaaagaatgggataggtttctagatactagaaatacagtgaggtgggggtagaccatcagttttctaaataggtgctctcttagcttgaaacagaaattgaagtctccattagagaaaatcatcaagtgtagtctgttcattccagaaacattttttgagtgcctactgtttttttgagacactgtgctgagtatcgtttcaagacagaggtgaagccacacttggctcagctgcttttgccctcagagagcttatttcttgtctcttagtgactctcgcatgactcagaactgaggcgatgggatactggggtatgacagaggtatgggactggaagtagtacgtagtgctgcagcctgtgccttaatattttctgtgcttccataagttctttctgttaatgggaaaaatcagctgacttcattcagaatttgcagagtatttgctgtatcactagagcaaccatagatgaagcaaagccaatgctccttctttgtcatagttgaaaactcattctctaacccttatgtgcgactttggagttaggtgttaaagcaggtgaataagtcagtcggagaggcagcccactccccattaagctttcaaagcacttcttccttcagaagccacagaa

SEQ ID NO: 128287 - DNA, 1065 bp, Homo sapiens
gggaggccaaggtgggcagaccttttgagatcaggaattctagaccaccctgaccaacatggtgaaagcccatctttactaaaaatacaaaaaaattagctgggcatggtggtgtgcgcctgtagtcccagctacttgggaggctgaggcaggagaatgccttgaacccaggaggcagaggtttcagtgagccgagatcacaagactcaatctcaaaaaaacaaaaaacaaaaaaaaatagttttttttgtcatatgttttgcagattgccccccccccattttgatgttatttctgatatatcttggttatacagttttttcttttaatttttgtctttcttaaaggttccaaaagtctttcttcacttcaagattataaattatctacctatctttcctttagttctctgttttcatttttatattctaatatcatttaacccatcaggaatttcctttggtgtaaagaatgggtaggggatttggtttttaattttgttctttttagtttcctggttgtttcaacactatttactgagtaattaatgaatagtgaggggcagttgtaaacttgtttttgaagatcagcagaatcagccttcttggttggtggtttcctgggcagttctaccactcgagcaagacctgaagtgtttcccttcagaaaccacagcctgtgccatcttgctcactcactttccttccttccttccttccttccttccttccttccttccttccttccttccttatttgacagagttttgctctattacccatgctggagtgcagtggcgtcatcttgtctcacctcaacctctgcctcctgggttcaagctattcttgtgccttggcctccagagcagctgggactacaggcatgcaccaccacacctggctaatttttgtattttagtaaagacagggtttcaccatgttggctaggctggtcttgaactcctgacctcaagtgatccgcccaccttggcctcccaaagtgctgggattacaggcctgagccactgcgcctggtcttgcccactcacttgaacctctactactt

SEQ ID NO: 128288 - DNA, 1976 bp, Homo sapiens
tccccagggatactgaagtatgtctgtctatctcatactatatttttccctttgtcttaggtagactatcagctccataggggcaaggatttaataatatttgtatattcattttattcaagttcgtatacactgcttgggtcataatatttattacatgcttgagaaaatgaatttcttcgcccctttgttacagctctgagtaaacagccatctgccttctctgtcatctgttggtggttgagtatttctgtagaaagttacccattggcctcaggactcttactctaaatcttcttcttaggcagttttctctgtgcatgaagtttttatgtaaacaaatagatgaagcctgccctactcatttatttgctcaagccagaaagtcaccttcttcttcactttccatatttaaatcatcatttggtggaattttggcctaagcaactcttgaattcacgtacttttccctgtcatcgccagtgtggtgtagaagcctctgtcaccccttgtcgggatgctgtgctgcagcatcatctaacctggttgcagttattctttcactccctcaccgcacacccttttacttaaaacactaaaagtggcttctcattgttcttaagataaagcacaaattgttagtgtggcctgtaaagctttgcatagcctgacagagaatgtcctgctaataatttgaaggtacaggatgattttaatactttaggagaaaatgttctaggaaaagacgcttgtttagacttaaggtgaggactctgcagtatgaattagacatctggtgaactataagctgtccccgcatttaaacataattggttctgagagcctgcaactaaagataaggcagaagaatttactttgcatttcctgcattcctcttttcgcttgatagcagaaacccctcatgttaataaaggtggcacaagaggcaaaaatacagactttatcacagtgtttaaggagaggtgcatgattaagtgtgtggggagagagtacctttgtacattttattatatggtgaactgtatgttttctacttttagtactgtttgtaaattttacttcttcttggatttacctttttcagttatattattccattatgccttgctactgtaacagctaatgatgaaaaacaggatctgtctttatattttcttccctccacaaatgtggatctcatagagttgaaaactaggttgtgatatagtatagtatacctaattcctgtaatgggatcatgttcctataatatggccgcaatttagtgtagaatttttgtaaataaaagtgtattttaagtttaacttaaactttcaatgaagtgttttaaggatttaaccatgcagcacaaatgagcacctttctgtaaatgccaacagtgtaatatgtgtcatttcttcactgattgttagtttgctgcggattaaaacacaggtgatcatattcaggctggttagattagtgattttaatatgaaaccattgcttttagaataatcatgggccagactgggaagaaatctgagaagggaccagtttgttggcggaagcgtgtaaaatcagagtacatgcgactgagacagctcaagaggttcagacgagctgatgaagtaaaggtataattttatcttttgtgaaaatgaatatacaattaaggataggttttttcccctcctaagttcaataagtttttatttaaaataattctagccaagtttgtatttacaataagatgagtgaatacttggaagcttaggttcttgatctgtcttaacattataccatgcacattaatcagtctttgtttagtatacttttatttgcatatgcagctgcagaaatgcctccctaaatataaagggatgcatttcatgattttatgtttctaaagtcattgtgattaaaaaaaaaaatacacacacacacacacacacacacacacacacacacacacac

SEQ ID NO: 128289 - DNA, 3267 bp, Homo sapiens
tttaaactactgaaacaatgtagacatttataaaatgaaagcgtattgatccctgttatctcattcgctacctttaacggtttggtgtatattcttccccaaattttcaaatatattcatatatgaatatgtatttttacatacattttataaaaatgggaccaagttatttggttctaacatggcttttttttaaggtcaatacaaagatctgttttattaaaaaataattgatattcctttagggctcactatatgcttggtactcttctaagtcattattttatatagatactataatatcgagagatggagagattaagtaacaactagttagtggtagaggaaggattttaatttgggtacgttagcttcaaagtcctgatctcccagccagggatcatttttggtaaggcctgtgagctggaaacgttaacacttttaaaagagttgtaaaacaataccaccccacttccctgaagaacatataagggagactagataccgcctgccaagcctaaaatacttaccatgtggccctttacagagaaagtttgctgccccttgctctaagccatccagctgtacctctttggtgtaaggggggtgcatagtattccagtttatgaatgtgcattacgcagcaaaccaatctgttgtgattgacattgttttctctcctgaaaagaagtgaacatccttatgtatctttgaacatttgtgtgacaattttctatagagttggctctttcaagattatgaacatttctagttttaataggtgttgtcaagttatattaatttttagttaaaacaacaactgtattgaagtataatttacatacaataaaaagcacacatttgaagggtatgatttgaggagttttgacaaatgtatgcacctgcaccgctgcctggatcaagatctataatggttgccatcatctcagagtcctttcatcctcttttacagtcattctctcaacttttttttttttccctccaagatggagtcttgctctgtcacccaggctggagtgcaatggcatgatctcggctcactgcaacctccgcctcctgggttcaagcaattctcctgcctcagtctcccgagtagctgggattacaggcgtctgccaccacacccagctaatttttgtagttttaggcgagatctcagctcactgcaaccttgacctcctgggctcaatcgaacctctcacctcagcctcccaagtagctaggaccacaggcatgtaccaccatgcccagctaacatttattattaatatttttttgtagagatggggttttcctgtgtcgcccaggatggtttccaactcctgggctcaaatgattctgccttggcctcccaaagtgttgggattacaggcatgagccgcggcacctgacttgtagtaaactctctgaattaatattccattgtaggcatgtgctacagtttttaaattcatttacccatggatggacacataggactgttgtcagctgttgataaagctgctatcaccatttgtatgtctttcctggacatgttttagtggtaaatattgattttactttgtaagaaaccgttaaactcttttccaaaatagttgtaccattttaaattgaaagttacagttgtaactgtgcaggagttacagtttcttcacattttcattgacacttcgtgttgccagtcttttaaattttggccatcaaatgagtattaagtatctcattgtgggtttgtgtttctcagatgatcaatgatgttggaacatcttttcatatgcttattggccatttgtgtactttttttggttcaagccttttgtccctttaaaaaattggattgtttgtctggttgagtggcaagaggtctttatatgttctgggtacatagtcacattatctgtcagattgtgttgcaaatattttattgttcatttttgtttgattttgtgtatttttaatactataaagatcaagttaaaactttaatatgggaagcataatcagataaattatgtgaaacaaattgtccttaattcacgagtcatttaattagtgtaacaaaatgttatgcatttgcagaaacttgtaaactaaaaggatattattcatatgctgttaggtgtatggatgataattttttttaattaaactagttttgaaaattattgtatttagtaattctcttcattttgcataattcaaaccttttcatttattagtgagttaagccttaaattttttcttcaaaggataaatgagaatattaaaagtaaaaagtgaccttgatcttagaatggggtatgtagaaatgatgattgccaaacttagtttccctactttgacaatcaagtaaaattttttttttttttttttgagacggagtcttgctctgtcccccaggctggagtgcggtggcgcgatctcggctcactgcaagctctgcctcctgggttcacgctgttctcctgcctaagcctcccgtaaatttttttattatagaaatggatggcttttcagattatatatacttggtttctatacactattttatttttgtaaagtagcagttcttttgctcaacacctgaattgcccccacaataaatttttagtttttcttcaatattcaagtaatacataacttttccttttcctgtttaacaaagaaaaaaatatataaagcaagctgttggacctccattgggtgttgtttaccaccactgtaggtgatcgtggcattgtccacctcagtcttctcatggctgtggattcaagttaagaaattcctgaaggtagcattccaggtagtctgtagaacagcccaaactctctgaattagtattatctctgataggtgttttttttttctttgcttttttatttgagacggggttttgctctgtcacccagcctggatttcagtggcacaatcttggcttactgcaacctccacctcctgggctgaaacaatcctcccacatcagtctcctgagtagctgggaccacaggcacatgccaccatgcccagctaattttttatatttttgttagagacagagtttcactatgttgcccaggttggtctcaagattcctgagctcaagcgatgttcccatcttggcctcccaaagtgctgggattacaggcatgagccgctgtgcctggccctggtagttttcttcttatatctttctcctgttgatctcacttgattttcttactagtctacaggaaatttcacgtggag

SEQ ID NO: 128290 - DNA, 1034 bp, Homo sapiens
attctttgtacttgccatgagatattttgaaaaacatctctttggggaattggtttaaaaattcatattaaattattttctggtacaattgagaatgtatttagtcagtttaagtagcagtgacttaaaacacacttgttgatctagtgtagttagaaaaagttctgatactttgatacctagctttgccttgcacaaatacatttaagtgaatatctttatgttggccatttaaaaattttaggcaaatttctccaagtcatactggaattttcccaggataccttccttcttttgaggtagtgtgctcaaggattctgaatttatttcagtattaccctttacatgagcagtgattgagaaagttgatctgctttttaaaaaccaacaaggacaaatcctccaatataatgtattctgtggttaattagcaatgatttatggattagccttgaagtctttatatcagtatagatgacaaattttctgtaaatcatgatagattctatatgagtaggtgaaatcttcgggggagagcataagtgaacagcagcaattcattaaattcagagaaaggttcatggtcagatgatacatactttaccttctggaggtcttccctgaattcccactcttgtgttcccacagggttttatcatattttattgtagcatgactcaattgtattgtaatcacttgtttatgcatccctctcttccctacagtcaaagtgcctcctggtagaggctctgtcttatttttttctttgtatacctagtacctacgttggtatttgctagagaataggggttttaaatatagttgaatgaattaaggaaatatgaaaaatgtagggaaataatttgacaaaggaacttgcaaagtgaacaggatatgttagtattcatgtgaggaactttgaaatgtgtttttctccctctttaatagggaatgattacaaagaaaaatagttgtcaaggtgaacaagttccaagtttttcctagttataatctgtagtactaaacattagata

SEQ ID NO: 128291 - DNA, 2067 bp, Homo sapiens
cagcgaaccccgccgccgcccgcgcgcgcacgcgctgccagtgcccgcccgcccacgagccctgagcgcactctgcgtggggctggctcggcgcctccgagcccggcgggccctgtgattggacgggcgcccgcctcgcgtcccgccaatcggggcggcgcttgattgggctgggggggccaaataaaagcgatggcgattgggctgccgcgtttggcgctcggtccggtcgcgtccgacacccggtgggactcagaaggcagtggagccccggcggcggcggcggcggcgcgcgggggcgacgcgcgggaacaacgcgagtcggcgcgcgggacgaaggtaacgcgccgctgcgggcggcccggccggcggggctccgggagtgcgaaccgggcggcggcggcggcgccaggacctccccgccactgctgtgccggtcccgggtatcgccgagcggggctcaccggggcgccgcgtttgtaggcgtgcggggggtggagggtgaggggagagcccccctccccggaaggagctgtgagcttcgggctggcccgcgggaccctgcgagtgaggcagcgcacacccctggagctgcggggcggggggcgtgtggggggctcctttcccggtgcttgtcctggccggggcgccggggccggggtcggggcgttccggtgcccggtccagggtggcagctcgagcctcaagtctcctttgtgtggcgcggccgcggcgggagcgcccgggtgggacgggacagacacaagttggtgggacccagccgccgagtccgcactcagacaaaggacggactgtgtctccggagggctcggcgcgaggggaaggggcatgacacccgggcccgccggcgggcgggagaggggcgtggggaggcgcgggccgctgccggggtgggcagggctcggccctcgcctcgcgcacgcccccggtcccgggcgcgccgaccccgggctggggccgcggcgctcgcgggacgacgttcgcggcggggaactcggagtagcttcgcctctgacgtttccccacgacgcaccccgaaatccccctgagctccggcggtcgcgggctgccctcgccgcctggtctggctttatgctaagtttgagggaagagtcgagctgctctgctctctattgattgtgtttctggagggcgtcctgttgaattcccacttcattgtgtacatccccttccgttccccccaaaaatctgtgccacagggttactttttgaaagcgggaggaatcgagaagcacgatcttttggaaaacttggtgaacgcctagtgagttgccactttctaaagaatcgtaatccttaaacattacaagctgttttggccaacttgtgtgatacatctgagaatggcgacaggtgctaacgaaatcaactgtcattcagccagattattccccaaatcccgacgggttgaatgaggatgaggtggtagaagtaggtgatcaaaatagaatggctatgacaaatgtgtgtttagattatacggttagcagtttcttattaattggtctcgttttctgtgaacaatagctttggtgattcagaaaagactgcatggagaaatgtttgttgcctaagaaatttaacgtgtgctgtccacagttaaacttcctttatcacacaggatctgtaacatttaaattcatttggaaataaaaatgtgtctttgctatttacttaaaggcttgctttttagggttcaagcaagttattattagtttaattttgtggcgttttgatgtcatcataaaacagcatttaataaacctttgaaaaacacgaatgctgtcacaattgaatgtagtttatacttttaggggttttggagtttattttctattactcttcataagcattagcaactaattcatgtttaggaatactgtacaagtgtgtaatcctaacttgtttatttgtaattttatttgcaggaaaacaagtatttaagatatattttaattttctattcatggtctctaaagttaggaataggtaggattctagtcatagatataaagcgtcttgttc

SEQ ID NO: 128292 - DNA, 1157 bp, Homo sapiens
ggtctgggctggagccacctgcaacctctctggcctttgcaaggacagagagtagagagtagcagctactactttctacagtagtgggctcttcctgtgtgactggcccgtctggtggccacaccaacctcactgcctggtccagagagagcccccagaatctttggcctttgcagcactgacgccccctcccgccttgctttccttggcaggaaaactgaagccagtcatcaaatcccagccagtgcccaagaacaacaagggacccgtcaaggtcgtggtgggaaagacctttgactccattgtgatggaccccaagaaggacgtcctcatcgagttctacgcgccatggtgcgggcactgcaagcagctagagcccgtgtacaacagcctggccaagaagtacaagggccaaaagggcctggtcatcgccaagatggacgccactgccaacgacgtccccagcgaccgctataaggtggagggcttccccaccatctacttcgcccccagtggggacaaaaagaacccagttaaatttgagggtggagacagagatctggagcatttgagcaagtttatagaagaacatgccacaaaactgagcaggaccaaggaagagctttgaaggcctgaggtctgcggaaggtgggaggaggcagacgccctgcgtggcccatggtcggggcgtccacgccgaggccggcaacaaacgacagtatctcggattcctttttttttttttttaattttttatactttggtgtttcacttcatgctctgaatactgaataaccatgaatgactgaatagtttagtccagatttttacagaggatacatctatttttatcattatttggggtttgaaaaatttttttttacaccttctaatttctttatttctcaaagcagataattcttctgtgtgaaaatgttttctttttttaatttaaggtttaaaattccttttccaaatcatgttgattttgctctttgctttttcgttgtctgagaaattgttggcgtagatttggcttctggtatgtgtttctgattgcttcctgttgagcacaaagtgagagctgccactgagcagccctgccaggggtgctgtttcaggctgggcatcgccaggcggcctccctgcaaaccaag

SEQ ID NO: 128293 - DNA, 1858 bp, Homo sapiens
gaccttgctctgcccacccctggagggcgatgtctgtgagggactccagtcgttgtgaagtgtgagccctcaggacctcctgcgtgaagaccgcacaagctgaaggtggaaagttccacacagcccagcccgtgataacccttcctgtctgccaagagccaggcctaccttgagtggtctctttgtggggttagtgagcctacacccccaaggaaagggccaaggtgtttgccttttcccaagaagccacctacggttcactggagggaaaggagccccaaaagacggtagggaatgactgggctgtgcttgagtggggtcgagccctggggtgttttgcctcctaagactgatccccttcaaagtcgccactcccccaaagtccctcaaacattgtactcaagaacaatggtggggagatggtgggccccctcacctgttccctctttgaagcagggctccacccaggactcggccatcaaggacttcgtgctgaagtacgccctgcccctggttggccaccgcaaggtgtcaaacgatgctaagcgctacaccaggcgccccctggtggtcgtctactacagtgtggacttcagctttgattacagagctggtgagggacccccaccaagacctgcgggggtggggggtggggggactcgttctttcaggcaaggtggagtgttgaggggaggtgtggctgtatgtacatggctcactcagaaatcccagcctggggcccttgcacgttggtggctcaggtatattttttaattgatggcttccctttttagcaggatgggagcttagattcaggtgcagaaccctcttagagttgacgtagctgagacttggaggagttcagaggctgcagagctgggactagaccagccctggccccaggcaggcgtggccgtgccacctgggcacaggtcttaagggcctgttgggcttgcagctgtggcccccgtgacaagtggggcttttccagaaacatgtttccctccaattgaggtaaatccagggtttgagcattgtcagaatattagcgacaggacctgaagcctgacctcagagtctgagctgggacttgctctgtgtggccgcctggcttatggcccttggtccctttcagcaactcagttttggcggagcaaagtcctagaggtggccaaggacttccctgagtacacctttgccattgcggacgaagaggactatgctggggaggtgaaggacctggggctcagcgagagtggggaggatgtcaatgccgccatcctggacgagagtgggaagaagttcgccatggagccagaggagtttgactctgacaccctccgcgagtttgtcactgctttcaaaaaaggtgagcccgtggctggggctggggtctcccatcagctgctgtgctcctcgtgcggaatccagacaggccaggggcgtctggtgctctggccacgggcacgacacccccttaagtcagccagcagtcctctctcacccccgagggactctgacttctcgtccagagaaatgtcgggtgtgaccccaaactccaaggcaccagaatagcttagaagaaggatttgcaagtgttactattttcttcttggcagttctcccagtgtttactttgaaagcaaaagcaagattcggagtccatctcagggcttacctagcatcactcagcggccttagcacatttccagcgctgatgtgctaaaattccagactagggccggggtgtgcagagggggcatctgaagatggagcccagacagggcaaagtctgggtgtgctgaacaccccttgtggcttcagagcctgactcagagcctcttcaccctcggccacc

SEQ ID NO: 128294 - DNA, 1050 bp, Homo sapiens
tagttgggactacaggcttgcatcaccacacccggctaatgtttgtgtttttagtagagacagggattcaccatgttggccaggctggtctcaaactcctaacctcaagtgatccacctgcctgggcttcccaaagtgtgctgggattacaggcgtgagccaccgcgcccagcctacagtggtcattttcagaacatttgctttggctgatgtgggtaacgaattaaatctcagacatttaggcaattttcaaaattacatcttattctgttaacgtttcagctaacaacctgagagaagattacaaatttcaccacactttcagcacagaaatagcaaagttcttgaaagtctcccaggggcagttggttgtaatgcagcctgagaaattccagtccaagtatgagccccggagccacatgatggacgtccaggtaagcgggcccctctgccatgccagccctggacaccccgcaggcatgaggactctgctttgagccacctctgaggtttcaaacgtggaggtttcgctcttgtctgcagggtctggaactccttttccagcccgttctccccaccccacaggttttctgcaggcggcctgtggtctctctttgccggagggacagggctggggctcccgcacacctggcaggtcctggggctgggcagagctccacttggttttgccagaacagttgctgccaccctttgtccctcctggcaggcaatcaccagtctccctccagtgcctgttccactgtgggtttggcctgggccagcacatggtgctccgttgaggccaagtcgtgtttgttcgggcagctccagctgggggctacagagggacagcatccctgtctgttcaccagagggagctgttgaccttggtgggtggattttgcctttctttccattactgcacccctgcacttcatcctcctagagtgtgacacactcagccctagaggggcagtgggagttcccagcccaaggggaacctggggccagttcagccttctgagtgctttagaaggggccctgcacttc

SEQ ID NO: 128295 - DNA, 1050 bp, Homo sapiens
gacgtatgtaatatagtaacattagatgtgaatgactaaatatgtatatattttgtatgtgttcaggagatgccccacaatgctatccataggcatatgtaatcaaaaccattgggagttggtgagggtttgcgtggagttagtaccatagcctgatggtaaaggaagtctcaaccatcagtaagtcttaggccctctggagaagtctgcaggctgtggaaatgcgatggacaattgttgggaaatagcgaaccttctgactcttggctgtgtccccaaaactgcagagatgcagccaggtttcaggaaatcagacacctcctgttcttgtgggccccgacacttgctttcttccccctcctcatctgcttctggagggaggtgaagtgcctgccagtttgggccttgtgtgctcagtcttgcttggtttctttcagaaattgttgccaaggtcagagaagtctcccagcccgactggacgcctccaccagaagtcacgcttgtgttgaccaaagagaactttgatgaagttgtgaatgatgcagatatcattctggtggagttttatgccccatggtaaggtggtgtcaggccctttccatattcagtaccctggtgggcactaggtgcggggtggcaggcccctgcccgtgaggcaggaacagcagaggagcaaggtgggcacgagttgtaggccaggattgaggctccaggtcttctggaagaagcgtggatgtaagagagctgttgggggagtgaatgtggaaggaactgccaagtagtccattcttgggtgggagaagggacccaaaggaaagaagatggcagaaagagaggtggtcggagtgggagcaagtacagtggctggtctgagctgcccagcttggggaactgaggtggctgcttcatggggaggggaggggagggacgcacaaccagttgcgtggataagctggcagcagtcagagtagagagcagagcggaagaagacggctctcaagggagaggggagcctggcttcaggagagaccatctgccttcccaggagac

SEQ ID NO: 128296 - DNA, 1125 bp, Homo sapiens
tagctgggattacaggcgcctgccaccaagcccagctaatttttgcattttcagtacagacagcgtttcactatgttggccaggctggtcttgaactcctgatctcaagtgatccgcccaccttggcctcccaaagtattttttgtaaagatggagtttcgccatactgcccaggctggtctcaaactcctgacctcaggtgatacacctgcctcagcctgccaaagtgctgggattacaggtgtgagccactgcacccggccatgtcaagctcttttaaactacattcgtgaaagtgcatttgcctattcatgagggatccacccttaagacctaaacccttcccactaggtcccatctcccaacactgccacactggggatcagatttcaacattttggtgtggacaaaccacatccaaaccaaagtggtatgtattattgttggatttaaatcccataggtacagttaacgttttttgcccttcctaatctaattgttaggtgtggacattgcaagcagtttgctccggaatatgaaaaaattgccaacatattaaaggataaagatcctcccattcctgttgccaagatcgatgcaacctcagcgtctgtgctggccagcaggtttgatgtgagtggctaccccaccatcaagatccttaagaaggggcaggctgtagactacgagggctccagaacccaggaaggtgagctggtacctgagctcgtagaggaagaactccttcccgcagggaatgggaatttggctaatagaggaagaaaagctgagggtaccagggactgactttctcaggaaccttagccctctggaatgtttatttgctcttggggtgggggtgggggggtaggaggggggagtagtggggtgggcagggtgggttggggcgtggcatctttacatttcagactctgaaactcaaaacatgggcaggagtgttaggaaatgggccagacatggtggctcacacctgtaaccccagcactttgggaggccaaggcagctggatcactttaggtcaggagttcaagaccagcctgaccaacatggtgaaaccccatctctactaaaaatacaacaattagctgggtgtagtggctcatg

SEQ ID NO: 128297 - DNA, 1110 bp, Homo sapiens
accagccaatgacgtggtgggcccccagggaccacccgggacttgacacattctgaagtgtatgaattttaggaaagtttttttttttttttttttttttgagatgaagtgtcactctgtcacccaggctggaatgcaatggcgcgatctcggctcactgtaacctccgcctcccaggttcaagcgattcttctgcctcagcctcccgagtagctgggactacaggcgcgtgccaccatgcccggctaatttttgtatttttagtagagattgggtttcaccatattggccaggctggtcttgaactcctgacctcgtgatccgcccacctcagcctcccaaagtgctgggattacaagtgtgagccaccgcgcccggccaggaaagttttaaggagagtcaccaccagctttgtaaccagtctgggtgttttccactcagattcttctaacagagaaaatgccattgaggatgaagaggaggaggaggaggaagatgatgatgaggaagaagacgacttggaagttaaggaagaaaatggagtcttggtcctaaatgatgcaaactttgataattttgtggctgacaaagacacagtgctgctggagttttatgctccatggtaaggaccgcgttctaatttctgcaggtggacaagcgctgtgctccattcgctcagcccttcacccggtcatccagaccttggggggtggggtaggagtgtctgggtgcaggaacttgcactctagctttaagaacgctgggagctcactcgttctaccactgtgcgttgaacggccagtgagccagccctcatggaaggcgatgtcttcttgtctcagtccagtgggttaaagatgaatacgtcctctgatggtcacagctgggggacgggcatttaacaagcggcaatgacacagagccctgtgttggtaacagacacgtccttgttatagattctgctccgacctgtctcaggccaccctgccttcctcttccctcaaaggctgttgctcaggcagctgccccaagtgcaggctgttggcctgtgtggtggattttttactacacacataggccctgcggggggaccagtcaggcatccccact

SEQ ID NO: 128298 - DNA, 1038 bp, Homo sapiens
tggtcaggaccctccgctaagtagctttgtgatctttggacaggtgactcaagttcctgcatctcagtttcttcatctgtaagatacaatataacgtgtaatacagtctcccttaaggggtgaagtggtgtgtttaagagcccagcacagtgcctggtacatacaataaataccagctatcatggttaccgtagctgataacagttcttgtttctgtgtttaatacaaactcttcagtattggctgaatggtagagtttatgcagctgtttcaggcacttctctgggggagatgagagtgatcagctgaggacggagagtgaggacatcctaaaaggagctgcctgtgtctgagcaggacccagtgttgtcatcaggtgtgccccgtgggagtggacagggattgaggcaacctgctcaggtgagggtcccccacttcaggagaggccttagcatgtgggctgagcaatgtggagatgaacttgggaattcatttgtctcatgctgaggaaggttgcatcttttcagagggtgctgaaaggctctggacatacatatatatatatatatatatattttttttttttttttgagatggagtttcactcttgttgtccaggctggagtgcaatggcgtcatctctcgagtagctgggattacaggcatgtgtcaccacgcccagctaattttgtatttttagtagagatggggtttctccatgttggtcaggctggtctcgaactcccgacctcaggagatccgcttgcctcggcctcccagagtgttggggttacaggcgtgagccatcacacctggccttttttttttttttttttttttttttttaaatgacagtcttgctcggtcgccaggctggagtgcagtggtgcgatctcagctcactgcaacctccacctcctgggttcaagcaattcccctgcctcagcctcccgagtggctgggattacaggtgtgtgccaccatgcctggctaacttttttctgtattttagtagagacagggtttcacgatgttggc

SEQ ID NO: 128299 - DNA, 1060 bp, Homo sapiens
tcgccactgctccccaccgctccggtaccgacacgtgttcttactgccaagttcggccgcaggatgctgagccgagccccgccccgctccacatttcccaggctccgcctctcctgccccgcccccggcaccgattgccaatagcgccccgaggcgtagccaggtcccgcactccccgtgcccggcccgccgcctttgttctcccccgctctccctcttggcctgtgcgctcccggcaaaccgagtggcagccgctgattggtggttgtggcgcagccaatcagaagggggcacctcacgttagggctcggagttttaaacgcgcagccgagggccgcgcgcaggagtagggagggcctagggcggcggagccgactcgtcgcggccgaggcgcgcgcggtccgtgccggcgtcagtctgggattggccggcccgcgacttcctccgccccctgccaatcgccggggacgacttccgtgggtttttccggctcccccgcgtcgctaaggagcgacgggctgtcggccagaccccgagttctcggtgcgctcagcggccgccgacgctaggaggccgcgctccgcccccgctaccatgaggccccggaaagccttcctgctcctgctgctcttggggctggtgcagctgctggccgtggcgggtgccgagggcccggacgagggtgagcggcaagcgcgccgcgggtcgggctgtgcttgcgggggctgcagagctgtgcgggggcctgggccctgcgaccccggcgggcgggcttccgcgcggtcagctccagaactagtgatgggcgccgagcccggggtaaacttggcggagttgaaggggcgggggcggtggctgtggcagtggcaggatcgatttggggttcccgggagaggaaggtggccggggtctcttgggctccgacgccctggaagacccctgtcacccgaggctgggagagggctgcagagcgccttttttgcagctgggtccttcgccttaatttacagattttcgtcaggtccaggctaactccaggcgaacgcgcccaggcagtggg

SEQ ID NO: 128300 - DNA, 1046 bp, Homo sapiens
gacctatattttccttttttcaatattatccaaagatatgtctgttcagtttagtttcagcagactcaccaaactcacggccatgagacagatcacactgcatggttgggtagctcagtggaagctgggttcccaggccaccacaaggcactcttgtgggtcacttgactgtgagaatcgctagtagtgctgcagacaggaataccgactgaatttttgttttcaattgcaggaagccagcaggctatgaattcaggaaaaactaaaagccatttccaattagatcctgaaagccagtgttcctttggatcctttgtttccttcaggcctgaccaaggcatcaccctcgggagcccacagagacacgacgccagggctcctccaccactagcctgcggccccagtgaatctaccctaaaagaaggaatcccaggtcccagaaatctggatcttcctggtttgtgggacgtccccgcctgggagagcacccagcacccttggcctgtctgcggggaaagctgttgggagaacaaccatttagtaatgcaccagagaggccactcaaaggaccggacacgtagggcctgggagaaattcaacaagagggcggagacgcagatgccgtggagcagccctcgggtacagaggcacttccggtgtggcgtgtgcggtaagagcttccgccggaagctgtgtctgctgcgccatctggcggcccacacggggaggggccccttccggaacgctgacggtgaaatgtgcttccgacacgagctgacccatcccagccaccgcctcccgcagcagggggagaagcctgcccagtgcaccccatgcggcaagcgctccctcccagtggacagcacgcaggctcgccggtgccagcacagccgggaggggccggcctcttggagagaaggccgcggggcctccagcagtgtgcactcgggacagaaaccaggctcgcgcctgccccaggaggggaacagccaccaggaaggggacacggaggcgctgcagcatggcgcagaggggccctgctcctg

SEQ ID NO: 128301 - DNA, 1040 bp, Homo sapiens
acctcgtgatccgcccgctgggatccaaagtgctgggattacaggcgtgagccaccgcgcccggcctcatgtaatcgatttaaaacattaatggccgggtgtggtggctcaagcctgttatcccaagcacttcaggaggctgccgtgggaagacagctttagcccaggagttgaagaccagcctgggcaacataggaagaccccatctctacaaaaaaaatttttttttttaaattagccaggcgtggtggcatgcacttgtactcccagctactcaggaggtgggaggtgtttgagccagggaggtggaggctgcagtgagctgtgatcctgccactgccctccaacctgggcaacaaagtgaaaccctgtctcaagcaaacaaacaaatatttttttcatactaagtcttcaaagtctcgtgtattttatactcatagcacatctcaatttaaccacatttcaggtgctcagtggccacatgtaggtagtggctactgtattgaacagtgccagtccaccctatggagaagaatcaggagacagattgacactaagaaaggaacaacctacccaaaaaggtggaaggggttggcataagtgaagcaaatgtggagagttaagatttaaataggatgcaacttccttaggaagtaaagaagaaaacttagattcggttactgataagtttgaagcaaggagtatgaagagaaagttgaatgaatttaggtctgattaatttccatctcaaagcaagaggacatgtcatcttctgagagtgggggctgcagcagacaagtcttactactcagtgtcagcatcacctgggaatttgttaaaaatacaaaatctcaggctgtgtaccatggctcacacctgtaatcccagcactttgggaggctgaggcaggtggatcacttgagctgagtagtttgagaccagcctaggcaatatggtgaaaccctgtctctaccaaaaatacaaaaattagcagggcatggtggtgtgtgcctgtggtcccggctactcgggaggctgag

SEQ ID NO: 128302 - DNA, 1030 bp, Homo sapiens
agccccttcctcttcctacacccccagcagcaaatgaggcacacctgcagacagcagctatctctctgtggacagtggtggccgccgtgcaggctatagagaggaaggtggagatccacagccggcgactcctacacctggaaggtcggacagggacagcagagaagaaactagccagctgtgaaaagacagttaccgagcttgggaaccagctggagggcaagtgggccgtgctgggaaccctgctgcaggagtacgggctgctgcagaggcggctggagaacttggagaacctgctgcgcaacaggaacttctggatcctgcggctccctccaggtattaagggagatatcccaaaggtaataccttcatttctagatgtaaagtggtaccactagaacttacattagtagtagtcttggtcattcagttacttagattttttatttccttttaaagtttcttaaaatatctcagtctgaaagaatcatgaaggtgttttatgtttgtctatttgggaaacattttatgttcaatttagtacccatttagagtgccaagattcagattggaaacctcttgctggaccaaagttggctatctggtagatggattttttttctcttttggtttctcctacccattacccatgagccgcttctttcttcgttaacttgtgtgccagattcttggggaggagactacataaatattcttttaaatcagtcaatttgaggctgggcgcggtggctcatcccagcactttgggaggctgagatgggcagatacctgaggtcaggagtttgagaccatcctggccaacgtgaggaaaccctgtctctactaaaaatacaaaaattagccgggtgtggtagcacatgcctataatcctagccactcgggaggctgaggctggagaatagcttgaacccaggagttggaggttgcagtgagtcgagatcatgccactgcatgccaggctgggcaacaagagcaaaactccttctaaaaaaaaaaaaaaaaggcctgg

SEQ ID NO: 128303 - DNA, 1028 bp, Homo sapiens
acctccagttggcgagcaggtgttctcatgccaccactgtggcaagaatctcagccaagacatgttgctgacccaccaatgtagccatgctactgagcaccccttaccctgtgcccagtgccctaagcactttactccacaggcggacctcagcagcacctcccaggaccatgccagcgagacaccccccacctgcccacactgtgccaggacttttactcacccatcaagacttacctaccatcttcgggtccataacagcactgagcgtcctttcccctgtcctgattgccccaagcgctttgctgaccaggctcgactcaccagccaccggagagctcatgcaagcgaaaggcccttccgctgtgcccagtgcggcaggagcttcagcttgaaaatcagcctcctgctccaccagcggggtcatgcacaagagcgccctttctcctgccctcagtgtggcattgacttcaacggccactcggccctgatccgccaccagatgatccacacaggcgagcgtccttacccctgcactgactgcagtaagagcttcatgcgcaaggagcacctgctgaaccaccggcggctgcacacaggcgagcggcccttcagttgtcctcactgtggcaagagcttcatccgcaagcaccacctaatgaaacaccagcgcatccacaccggggagcggccctacccctgctcctactgtggcaggagcttccgctacaaacagacactcaaggaccacctccgttcaggccacaatggaggctgtgggggtgatagtgacccatcaggtcagccacccaacccaccaggtcccctcataactgggcttgaaacttctggcctgggtgtcaacactgaaggtctagagaccaaccagtggtatggggaagggagtggagggggagttttgtaaatccaaatctctgtggcttcatgcttgtatatgctcacagcagggcacaaaatccaagagaaggtctgtgagccccatccaacacccacagtaattattatct

SEQ ID NO: 128304 - DNA, 1036 bp, Homo sapiens
tgcatagacaacagtttgttcttgcctgtgttgcttttagggactttgactaccacatgttcttttcttggggtgatttaatcacctgggagcatctgagtctgctcctaagtggctttgcaactgggcctaagttctgtttcctttatggatctcaaattttcatctgcacaatgaggctgttgaaaggaaaaaaagtgagcctctaggaattattcaaaaaaagtctgtgatacattccttttcctgccaaagttctgtctctgtctttggcttctgtccaggcaaagctaaataagacagcaaagtcaaagcagataaattcttgttgaaacttgactaaaatttatttgatttgttgttttactcccacttggaatcctgaggtagaagacagaatgcagaagtcttacatcttgggcaggaaactggtttattcctatactcttgtttcctctgcttcttcctgaggtctagaacaaggtctggaaatgtttagacaggatattttcttgatgaagtgataaggaaaggacccatttttttgctcatcacctagcccatccttcactctctctagttatgcataacaacactagaagaaggtgttagcccagctaactttgcttctgggaaggctatgtctgaacatgttgctctgtaggataatcacacttagaaaacatctgctccatgacattcacaataccagggaccatgggagacacaagaaatgtgtgtctgctgtcataacttacagtgaaaaagcccaataatacagaacaagacatgatgggcaataccctagcatattgggattaagagctttctagccagaatctggacctataccatgggaaaatttaggggtgctgggaatcccaaagccaaggttctggcttcattggcaacccactaggaacttgaatgtgagattcagctctagtttgcaccttgatttccccagtgaaaagggagaagagccaaagtattgtctaggtgctgagttcccttttctgagtggatttcaagcatt

SEQ ID NO: 128305 - DNA, 1943 bp, Homo sapiens
ttctttcttccccattttctctccttccctcccttttccccttctctttattatagaatattcaaataaaaatagacagaatagtataatgggtccccatgtatccaaattccagctgcattagctgctaactcttggccagtcttgtttcacctaaatccctgcccacttccccactcccattttattttgaagcaaaccccagacattagtcatttcctttgcaaatatgtcagtattagctcaaaaggtaaagactcttttttttttaagtgataatctcaatgttattaccaccaccaccatagtaaaagcttcagcctagatcactgtctagccagtgattagattttcagttgtttcaatttttaaaaacatttttttagtttgaattaggattcaagtaatgtccacacattatgtttgagatgtctcttaagtcttttttaatctgcgggcatctcttccatctattatttttcctttcagtttatctggaaggaattgggccacctgtcctgttttgcatctcgctgtctggattccactgattacgtcccctgtggtctcatttaacatgttcctctattctcagtattccagttgattggtaactggatctttctctctggaacgcactctgatcaggcctttgctcactaatgatgtccgtggtgttacagccagtggttgcttctcagtcttcatcctccctgtcctgtcagcagcattgtgtgtaggtgaccactctctccgtgaaaccccttgccgtggcttctgggacacctctctctgctgagtcttttcctacctcaccagctgctgtgtctcattgtttgccaattttgcctcctttggccagctttctaatgcatggagtgggccagacctctgtcttggccttttgctctttatttactctcctccctcatgactgcatcccgtctcacagtctttattatttatttatttatttattttttttgagacagagtcccgctctgttgcccagactggagtgcagtgacgtgatcttggctcactgcaacctctgcctccagggttcaagtgattctcctgcctcagctgccctagtaggtgggattacaggcatctgccaccatgcccacctaattttttgtatttttaggggagacggggtttcaccatgttggccaggctggtctcgaactcctgacctcaggtgatccacctgcctgggcctcccaaagtgctgaggttacaggcgtgagccaccacgcccagctagtctcacattattaaaagcaatctgtatgctctcacctcccaaatagatgctttctctcccctgctccctttctatatgttgcccagctttctttctggaatgccagattcacattcctacctattaattcatttggatgtcagtaaatcttagatttaacatgtccaaagtgaactgcggatcgcctgcctgagacctgttctacctgaagttgtcctcatctccgttgatgacggatggttccatcctttcaagtgctcaggccaaagccttggagtcatacttgtctcctctctttctcacaccctacttccaatctattagtaaataccctgatttttcttcagaatatatccacaacctggccactcctcaccacctccactcccatcgccatcgtctggtcccaggcaccatggtctttcatctgatttttgccatggcctcctggtgggtctcattgtcttcatccttgtccccccacccatacagtctatctcaacacagcagccagagtgatcctttgaaaatgtgaagcagtcacatcacacctctgcttaaacctcccaaatggctgggcacggtggctcacgcccataatcccagcactttggaaggccgggcaggtgggtcatgtgagatcaggagttcaagaccagcctggccaacatgg

SEQ ID NO: 128306 - DNA, 1082 bp, Homo sapiens
cgggaagcagaggttgcagtgagctggtatcgcgtcactgcactccagtctgggcgacagcgagactctgtctcaaaaaataaataaataaaaataaaaataaaatgaagaaagggatctgtattaattttcccaggttggggcttttcctgcatctggtggaaggtccagtagctaaagattctagttctgattgtaaagatggacagtgagttgtcagtccgtaggggtggggccatggcactgaggtgtagacatcgcacctgcgcatggcattctcagagttacaagcacctggtaaaagggctgacatttctaacttacataaaggtgctgcccactcaccatgctgagtagtggtagctgtgctcctgactttgccttttctaactcaccccaaggtgccatacaagccagctttggccctgtaaatgcagatacgtagatgaatggactgtaatcacaggatgggggaggattgaggggtcggatttcagaccgagagtgaaaggctggttcagtcggaatgtgaaagtggtaagagggaaggctgtgtgtccagaggaggaagttcagttatcaaagtcatggaagtgaaacgattttggacaattcggtccaagttgaggtcgtgctggtgagtggctgaagtgagtgattgcaaactgaaatcggctttctgtaacagatccgaacacacttgtcatcagtctgacaagtgactgacaccacgcgacgactcgggccgcagtggagcttcctggtgttggcactcgctgcgcagcacactcaagtatttattgattccctactgtatgctccttgatgatcaagatagggtagtgaacgaagtggaccaaggtcctgaaccttagcacaggccttagattttatatgctttgctgacaaagaggtaactgtgtgcacagaggtgacctgacctgaaatacaggtttggtaaccaggttttactctacctggctcacggatacccactctgagaacccattacccctctgtcaccctgaataccaaaagaagcatattgactactctttaccctcaggtatccagttgaccta

SEQ ID NO: 128307 - DNA, 1549 bp, Homo sapiens
tctcttcagtgtcatcacccctcattttgctgcttgcctagccctttttcttgaatgttggcttcctctctgctcctgagaccttctgctcctcagggtcccccatggttccaataggaacccgagacccctgtcttctcccctggcaagtgctgtcagccatgcttctgagcccagaatgtcctggtgaccagcatgcagaaaaaaagacacaaagcaatgtcattctctgttcccaggagcagagctcctggtgcctgcagaaaaaaagacacaaagcaatgtcattctctgtccccaggagcagagcccctggtgcctgcgcaggatgcgtcctcccaggtgaagcgtgaggacaccctgtgtgtccggggtcagcggggcctggaggaaagagccatccctacggaatccattaccggtgagtgagccaagcagccgtccacaccagggaggggaggggaggggagagggttagcatggtctgccagcccccagagttagctgtcacatgtgccaggccagagggctgagctcgaaatggaagggctgtgcatccagggctgggctgagccaggattcctccaggagacacagacgtggcaaacagcattgacaatttgctggtacacctgggctcagcgtgttctgtttcctctcttcctcatattatccgtttgtaactattccatcttcccctttagaaacaatatcctggcagaagtactaagtgtaaggcttcatgggtgggggaacagggaggtcaggaagacctgttgtgccctgaccaggaaggcctttcattgttttaaacaagtatttatgggctgctacctctgtgccaggcacctacatacctgcggtcctgtgagggacctcctcttagctggcattgcagctggactctgtcgtaggtgagagctctgttatagcagatgtatgtatcaatcagagttctccagagaaacaggacctgtaagggtgtgtgtggaaaagagagatttattttattttaaggaattggcttgtgattgtggaggccggcaagtccaaaatttacagggcaggccagcaggttagagccccagggaattgctgatgtggctgctggagcctgcaggcagaattcccttttccttgggggaggccagtcttttcccttaggccttcagctggttgatgaggcccgcccacatcatagagggcaatctgcttgactcaagtctactgacttacatgttcaaatctcatctaaaaatataccttcatagaaacagctaaataatgtttgaccaaatatctgggtaccgtggccgagccaagttgacacataaaatcaacaatcatgagacatattaacatactgtagccctttacttatccacaggttagagctccacaaacctcatcccccccttagtcagagcctcacacccataggtaagtgctcatagtgtctgggtagaggaaagcccgttcacttgtcatcaggcatgacccttgaaagcatcacagtattaggatctttaaggagatctttaagagataa

SEQ ID NO: 128308 - DNA, 1008 bp, Homo sapiens
gcttcactgtggttcttatcaatgacctctggttgcagcctctgccatcgctggtttctaaatcatacctgttagccatggccctgagggccgttatctggggctttcttctggcctgtcctggccccatgggttcctctggggctaagtggcagagctgggagatctgggttttaatcccggccctgccactgcacagaccttgggctaagcctccttctggccaacttgaaatgcatcgagcagtgagagtccatttaggaaggggcttatgagggtaaggaggatggcctggaaatgcaacaccgataccaaaacatgccctgcaggttgcagccaccgcatgggatggttttcaaacctttgatgggaggccgagtagaactgaacaaaatctaagactgccttctttccatgacaacagagtctctcatctcagcacatgacattttgtcatggatcaagcaggaggagcagccatacccatggggaccacgcgactcaatggacggagagcttggattagactctggccctagtgagtaacgtccccacctagaccctggggtttcttctctggagctgtacagctgaggcgtggacgaaggctggtcctcttctcagctcacccctcgtagggtgatgttctgttgatggcagcgtttcaaagttctgcaccaaagcactcccattctttttggagtgtgatattgtattagctccccaggactgtcataacagggtaccacaggctgggcagcttcaacaatagaaatttattctctcacagttccacaggttgaaagtccaaaatcaaggggtgggctgggccttgctccagacttcctctgaagtctgtatgggattcctccctcgcctctcccagcttctgctgggtgccaggaacctctggcactccttggcttgtagatgcgttgctgcaagcctctgttgtcacatggtgttcccttgtgtctgtcctcacatgccatcttataaagacaccag

SEQ ID NO: 128309 - DNA, 1026 bp, Homo sapiens
gggaagctgctggcctggccctcctggtctctcttcctttcctggtctctcttcctttccttgctctcacccacggataaaaccagaagcgacaggaggccagctcctggggttcctgggagccgggaacagattggctacggaacgccccaggttgtacattcagagggctctttctccatgggagctcctggtgccgcctcggccccagcctgtccccagcccctcaatctggtgcagcagcatcttgtcactgcacaacagtggcctggtcccccacaggcagttagggccccaggtcagacctcaccatgatgatttgttccagttctcccagggcagaggggcgagggagaggcttttgctgtgagagtagccgtcacgtgtctcttcccagcagcgccgggcaagtgggtgctagagtctgagcctcaggctctcctgccctgggcctcccaattggtgctatctgttactgcccgtgctcacggacatggatacagaccctgctgtgctccacaccctgcaggcgcctcgggaagcgcccaaaggattccccttcacgttggtgcacctgctccatagctccgggcgctgcgtcccgaggggccacagtctccatttcagcgtcttgcatggcctggcaccgggtggggtggtatgccccaggacccttgtttgtgtcaaaaatgactttccctgcccttgccgtgggtccggcgttcctcccagccgggatcacagtgggcagccggcacccggcaccactttggcgagcgtcctgcttccgccctcgccctcatctacgctgctccgctttcctcagacccctttttgccgtgcaaagggaattcttgacattaaataaaaggtatccagattgcagactgcatgttcacagagctgggggttctccagcttgcctacagtaaagcctcaatgaactggaatccaattcaatggggtatttttttttcttcattctgctttttgaaggagacaaatcttaagaaagcaaattgagat

SEQ ID NO: 128310 - DNA, 1037 bp, Homo sapiens
aaaaagcatatgcacgaagtattttcctaatctagatcatggaaaggtcagaatgtcttttggttgcaggagtgtgaggagaggggagacgtcacttgagacatgggtttaaaacacctggccgggcgcggtggctcacacctgtattcccagcactgggaggccgaggcggacggatcccgaggtcaggaatttgagaccagtctgacgaaaatggtgaaatcccgtctctaccaaaaatacaaaaatcagccgggcgtggtggcgggtgtctgtaatcccagctactcaggaggctgagacaggagaatcgcttgaacccaggaggtggagattgcagtgagcggagatcgcaccactgcactccagccagggcgacagagcgagaccccgactcaaaaacaaaaaaacacctgagcacaaggctcagtgtgatccctttattttaccttcaaggggctgattcccaaggagacctagggactgagctagtgagagccaagcctctctgctttcctgtatcctaggctggtggataccactgcaccaagtacccctcagctacaccatgagtcgccccaagccctggcacaggttgctggagcatcccatagtgagcctcatccccagagctgatcggggatggtgacactcaggatgttagcctctgctggctcccaggcagcgaagatcctcagtgaagaccctggagtccacatcctgaagcagaacaggggttttgctttgggggtggatttttattttccttctgagaaaatgtagtttatgtagagacaaagtcttgctctgccattcaggctgagtgcagtggtgcaatcttggcttactgcagccttgacctctggagctgaagcaatccggttgggcgtggtggctcattcatgtaaccccagcactttgggaggctgaggtgggaggattgcttgagaccaggagtttcagactgcccttccaacatagtgagacccctgtctctagagtaaagaaaaaaattttaaaaacagagacaggccagg

SEQ ID NO: 128311 - DNA, 1005 bp, Homo sapiens
ctgttgatatggaaactgttcccagtttctaaaaagccaaataacaggtgaacttttggaataaaatcacttgccttttggaaccatatttcttttccccaacaacattacatgttctttcctcagcaaaaagtctgagttgtacacatttttgaatccctcaaagcatttagcagagtgctgggcatacggaagacagcaggatcccgtggctttgcctgaaacgcggaacctggtcttgacttttgagtgactgagccctcctggtgcccgcactctggccgggagtgccaagcagcgttctccctcccgccgcacgggggcacaatgggaagcctgcacagtgaggaagagcggctggagccggtcttgtgccggggaggtcgctgctcccagaatgcacctggcatcaacacggcggcggcggcggcggcttccaacaggctctggggcgccgagcggacaggaacgcagcacgggggctccgaggcggggtctgggtgttgaggggcgactggagccatggcggagtcggcgcctgctcgggtaaagaggcaccggcgcgctggctcgagggcgcgttggggatggcggagtcccctgccgggggcggggcttcgcggtttggacgccgccggggtcttggtttcccggggctgccgttggcgcgggtgaacgcggaccctcctcttcgcgaccccagtgctctgcccttttttccctccgcttccttctgcagcggggtcggagcctcggcgccgtgcgcccttgcccagaaacttctctgacgcttgctttaggttggtggatttgtgaccctgcccacacattttctctttcgtgccaaaagagcccgttcccaggttggagtgtttccagattggaaacggtctccgtcgctacgagtgagctctcccgctgcccgggagaccccaggacttgcctctctgcgaccacctcctcttcggtccgatgtgttgtcggtttttccagtgctgcagattt

SEQ ID NO: 128312 - DNA, 1040 bp, Homo sapiens
taagactaacggccacatcaatcattattcttcatgccctacagaatagagtaccgtacgaggcggtagtcaaaacctgctggagattgagcgtaggtatgtcagagcttcaggagggaaggcagtgcaggaaaagcacttgtcagtaggtaatttgggaggttatggaggaagaacagagctggacatgaattcttaagctgtaggtttagtttgtctttaatcattcaaatttgttattttaacactcttaattgagtatagttgttacagtgtattctgtcatttttcacagggattaaatataaatttgtagacaagcttggagaactatcatttacagtattgttttataagagtaatacatttatatttccaatcaacattggaaaaactgtacatgaatatagttttatagaagtcttggaacctagccagtgtcatcctcctccacgttatcctaattcacttattcctggggtgcttctgaaattcacagatgtttgtttggtcctgaagaaaccaaaggtactagaatgtgatcttttttgttggtcttcttccactttgcagcaggtggggtcatgatcaaacaggagctacagtatacacaggaaggccctgcggatcttcctggagagttctcatgcattgctgaagagcaggctttcctgagcccagagcagaccgaactctggggtggtcagggcagttctgtcctcttggaaacaggtcctggggactctactctagaggagcctgttggtagtagagttcctagcagcagcagaactgtgggctgcccgaagcagaaatctcataggcaggtacagctggaccaggaatgtgggcagggcctgaagctgaaaaaggacacttcccgcccctacgaatgttctgagtgtgagatcaccttccgctataagcagcagctggccacacatctgcgcagccactctgggtgggggtcttgtacacctgaggagccagaggagagccttaggcccaggccacggctgaaaccacagaccaaaaaggcc

SEQ ID NO: 128313 - DNA, 1027 bp, Homo sapiens
ccaagagaggttctcacccaacagcctggttgccctgcctggccacatcccttggaggaaaagccggagttccctcatctgtggttactgtggcaagagcttcagtcacccatctgacttggtgcggcaccagcgcatccacacgggtgagcggccctacagctgcactgagtgtgagaagagctttgtccagaagcagcacctcctgcagcaccagaagatccaccagcgggagcggggtgggctggccctggagcccggaaggcccaatggcctgctttaagggtgcagcccctcgcccgtctgggggatggaggggggtggcattggttcccccgaagagacactgcagtcagggactgagttcttcctgagggcagttgtttgtgattgccttcccttgtcccagtaccaagccaagcccaaaggctgtcctgaaaaccctgtggaagaagagtccaggccaggtcttcatcctgctgccaagtttgctgtttcttggcaccttcaggtctctggttttctcattcatgccaatgcttgtgggctggggttggcgttctgaccccacagggactggtggctggttccagggctcgtcccggcatttcatgtcttcccacggggttgagtcgggccataggggtgagcagctgcctggaagagttctgggaagtataaccctccattttttcttgttttataatctctttgtttaataataagtagaagaaataatttaaatgaactgcttagccctgctctgaagaaccttttttggaattagattttagttgattttttaaagaatacagcccaacacttgttttttacattttaagagttgtagaagttgttcctaacttggggactggacctaccctctaggagggagttgttaatggggctcttttagcccactgatgcttacttaggccggagagcaggggacacggtgctaggttccctcgtgcagtgcctggtgctctcaaattgtctcaaaaggaccaagaggaaaagagtcgga

SEQ ID NO: 128314 - DNA, 1036 bp, Homo sapiens
tgctattgtataggtactattattatctccattttctagatagggaagggaagttggaagctgttgaaaacaccttgcccacagttggccagcttgtaagtggcagagctgagttgcacctgggctgtccactggggagtcatgttctctgtgccacaaagccttgtcctttcatttttagaagaggaaactgagacccaagaaggggagtcacttgtttgagactgcacgtggttgctcaagcctgtggggcatgccccgtctccatagctagcctgtaggacaggagccggggctgtttttcttccactttcccacttgctgacacgttggtccagccactatctcttgtatcagttaggctggattcctaactgataccctagcctctccctctcccccccagtctgctgctaactcaggagcccagatgggactttaccatggcaggtgtcatttccgaagtgtgtttttgaggtggaagttttgattgtataattctcataacatctctcttttctcttcttgtgagcaggaccccgagacagacaagcacacagaggaccagagtccttcgacacccttgccccagccagctgctgagaagaactcgtacctctactccacggaaatcacactgtggacggtggtggccgccattcaggccttggagaagaaggtggattcctgcctgacccgcttgctgactctggaggggcgcacggggacagccgagaagaagctggccgactgcgagaagacagctgtggagttcgggaaccagctggagggcaagtgggccgtgctggggaccttgctgcaggagtacgggctgctgcagaggcggctggagaatgtggagaacttgctgcgcaacaggaacttctggatcttgcggctgcccccgggcagcaagggggaggcccccaaggtagcaccgggacaccctggggtgggggagctcgaggggctgagcctgtgagcgtgtgggtgagtgagtgcgacacttatggttccaggtgcccgtgaccttcga

SEQ ID NO: 128315 - DNA, 1324 bp, Homo sapiens
tctgggaggcgggcactgattaaacatgtatatagacacgggttctaagaagtaggcgtagggatggagttatcttgaaagacaacttctgaggggaaaaccttgacgctcctaacgccatatcttcagttgtgtttctgccctgccttgggtcccctatgccataagagcagcttggaggaggaggaggaggcccgactgcgggaggtggtgaccaccccactggctggtgggacaggcatggtgtttctctttcctgccttaaaatgccagattctgtcatgacctgcctggcgatcattaccgtgatttcctgtctgctgaattcctgtgctgcagtttccttctgtgggacatgaggctttagactggaatctagctgccaggtatttggtggggtccacctcactatcatgccctgtgctggagctgaggccccaggatcgcagtgactctgcctttccccagagggtccctggtcatctgggcaggagacctccatgttgtgctcaatgtcactgatttacattctccaggcctccctccgtatccagagcacctcaccagcccacttagccctgcccaggaggagctgaaagaagggcaggcccccaagcagcagcaggactcagaggcgagagtggccccagccgggccagaagcaggtgagtgaggacagtgaggcggcaggatgaacagtgtcccgaggcagcacgcgatcaccaagcgatggtgctgaggaaaagccctggaagcatggggctgggagagagggctgggagactggttgggctgggccggacaggctttctgggaaagaggcccctgagacaggcctaaaagaaggtaggttttggcattttcagcgtgagaaaacagtctgtatagaggggtgggttcctctgcgtgttgggggcctgggcacatgggtccggtggagtgaggggagggggtagatgggtgtgttgtgcctgcccagggtctttacgagggtcccatccacggggcagtgtgtgtcctgtgcctagcgcggcgccagcatggtgtttctcagtaaacgccctctttctgaagacctactgggaactctggctttagtcatccttccagacttctttgtctgcttttatttaaaggcagtccctgcctgtcctttcacaaaagtgtatatcagggcatttagcggaacacttgcaaacagtccagagctctgttctctgtctagtgttcctctgcggggctggctcctccacctggtcctgccgctggcccgactttcagtctctggttgctttccctgtggtgatttctgggtatcttcccc

SEQ ID NO: 128316 - DNA, 1273 bp, Homo sapiens
gcatgaggtctccttcatctgcagcctgtgcggcaagagcttcagccgcccctcgcacctgctgcgccaccagcggactcacacaggcgagcggcccttcaagtgccccgagtgcgagaagagcttcagcgagaagtccaagctcaccaaccactgccgcgtgcactcgcgcgagcggccgcacgcctgccccgagtgcggcaagagcttcatccgcaagcaccacctcctggaacaccggcgcatccacacaggcgagcggccctaccactgcgccgagtgcggcaagcgcttcacgcagaagcatcacctgctggagcaccagcgcgcgcacacgggcgagcggccctacccctgcacgcactgcgccaagtgcttccgctacaagcagtcgctcaagtaccacctgcggacccacacgggcgagtgagcgcgcgccccgccgccgccgcccggccaggtgcgcgggccgtgccccccctcggacaccgccaggcccgagcccagcgggcgggggcggggcgccccccagcccctttgccgtgagctccccctctcctctcgtccctcctcccaaggacatgggggcagtgagaccaggtcccttgctgccgcgtttccccgggggccccaggggggagggcgcggacctggggaaccctttcgggctgttaatttccttgacaataaaatggatgaaaccaatcagcacggggggcgtgatttggccgccggccactcagaggggcggtgtagggcccatctagttggggatagaactttataattaccttttggatactgtggttctatttgataataatagagtaatttttaaaagaagagcgtttcctgtttgccgtttttgtttggtttgaaggggagggattgagaaggccggagggacatacgctagtgtcagttgacaggttctgttgggacccttttttgtgttccttctccatttgggtggtgagggagacgctgatcccgccggttctgaaatggaggaggagaggcaggactgacgtctaagggaccacgggaaccccagaccatcgcgtctgccctggagtccatgaggttgctgggagctcaggactgaataggtcccagttgactagcgtggtcaaggagagtgacggtcaggtttggaatgagctggaaagaaggtcctgtagcaaaagctgggcgctgccttcagtgcccaggcgttcctgcgtagcttgaaatgcagctggctgaggagtagggtggcgggagggaagcctag

SEQ ID NO: 128317 - DNA, 1078 bp, Homo sapiens
tatgaaaaagcaacagactgaaacatggatgtcctcaagaagggctgctgacacctatgatttggcaaggagataaataacagaatgtgcaaagggtcataagagtgcagacaccctaatgtctgttggctggaaggtcagagcagttcaccagtgaaaatgggatgcctggaccgaggtactccccacaggcaagcatggcccttcccttcctcctctcgccacctgtaccttccgtggaggctgctgtgttgagcttcagggtcccgtccgagcatgctgaagagggatggtggggagggagatccgtttgccaggaggtgggcgggatggtggtggaaaagttggaatggacacctgcggtaaggggagagcagagccggtgggttaggggacggacggggaggacagaagactgttggggaggagagcaggctaaactctgaggtccccccactgggggcttttctgagtgggcacgaggacccaacctctctgaacccagtgtcttttgtccccctttctgaggcactgggaagctcagacatcatcagtatgtttcccacgggcccctctcgaatagaggcagccagtgacttcaatgcccaatgctggggcaagagaagcggcctcacggtgatataggggccactggaacagggccagagagacacccagggacagcatcagccacccgagagaggctcgagacaagtcctttagtacagtcctacctcgagacgggaaaatttctaaagttgtcaggccggaagtgttgagggcccacagctcccccatgctgccacgagccctcccctgtccctcctgtgatccctgcaacttgttccttatgtccccgtctcagccacttaccagaggtggcatccgtggagatgtctcctgctccggaatccagctggctgaggccccagggctcctccccaatatctggctgcccggctgcccacgcctccacgcccagggcctgctgctcctggagctggagctcaccctcctgcttgatctgcatcaagaggtctggggcgggaactgggggccccgagcctaggaaagggag

SEQ ID NO: 128318 - DNA, 1713 bp, Homo sapiens
tgaacctcttggacccccgtcctcccctgatcacaccccttccttcctcttatagtatacataaactgaaaattcagaaatagagtcccttgcctttctttacatttttattccctcagtatgtatcctaagtaacacatttagttttatctgctttggaactttttgtaaatggaatcataccacatatgttcttccttaacctgcttttctcatttgccgttatgtttttgagagccatccatgttaatgtagtatagctgtagctcattcattttcatgattttcaccactttacagttttgtattttgtgaccataatacaatgtatttattccttctactgttggtgggtgcttgtgttgtctcttttcttttcttttttttttttttgctggtgtgaacattcttatgcatatgtaaaagcttctgtaggtgtagatccaggagcggaactgctgggtcataggaaagaaaagacatgtattcaaatttttccaggtgatgtcaagtggggataccaactggtattcccaggagggcctgggggttccaatcacacctcatcctcaccaccctgggaaatgctgtttttatttctgcccgtttggtgggagtgaaatggtttaaaatttatggtttaaaacttggattttcctaattaataagattgaacattacatcctctactggtgagccgtttgtccttcctcttctgtgaaatgcgtgtttatgtcttctttgcatttttttaagttgttttttgttgacagagtcttgctctgttgctcaggctagagtgcagtggtgcaatcttggctcactgcaacctccgcctcctgggttcaagtaattctcctaactcagcctcccaagtagctgggactacaggtgtgcaccaccacgcccagctaatttttgtatttttagtagagacagtgtttcaccatgttggccagactggtctcaaactcctgacctcaagtgatctgctgcctcggcctcccaaagtgctgggattacaggcgtgaaccactgtgcctggcctgttagtgttctttacgtattctaaatattaacctttttgtcaactatgtgtgttgccgttatcttctccatttgtggtatattttaaagaacagatgcttttcattttaatgtacttggatttactagtctttcctttatggtttgtcctttttgtgtcttaagcaattaagaaatgtttacgttcttcaatgttgtagtacaccagtgcaccttctcatatttcctactaaaggttttcagagttcgtctttcatgttcaagttcttcatccttcagaaatggacttttgtggtgctatgaggtggagaccctgcttctttttcactgcactttggttcttcttttcctttgctctttcagatagcccctcaaactgccttatcaagttccatgaaaaattccagttggggttatggttgcaattgcattccatctattaacattttggagagaattgacacttttactatattcagtcatgttatctgtgaatgtcctaagtcactccatttggtttgtctatagtgtcgcaatgaagttttatattaaggtcttgcacatattttgttagatctattcctaggttcttttttttttttttttaaatcacttttgtcagtggtatctttttttaacttgcattttctgtttgttgctgttggg

SEQ ID NO: 128319 - DNA, 1155 bp, Homo sapiens
caggggccaggggcaccagcccccagtcccacgcagccaaaaatctatgtataacttttgactctctaaaaagttaactgctagtagtctcctattaaccagaagccttattgatactatgaacagtcaataacacatattttgtatgttctgtgtgttacatagtgatacttacaataagctagggaaaagaaaatgttactaggaaaatcataaggaagagaaaatatatttattactcattaagtggaagtggagcatcataaaggtcatcctcctcattgtcttcttcagattgagtaggctgaggagaaagaggagtggttggtctagctgtctcaggggtgacagaagcagaagaaaatccatttataagtgggcctgcatagttcaaacccatgttgttcaaggtcagctgtatattgacaacaaaattaatccaaagctttgcaaagagtcagccttgcctccaagaaccaaccttaatttaaaccagtagcagttgtagagctactttggtctacattggtcagccttatggtttggtattattagaagcacacatttatttaaggtgaatcttgttaccagatatcagcgtctcagatttccctggagccagtcagcacctttgaaagttaagggaaggacaggtggacacaggagaaaaaccaaattcctaaagtgaagacctgctgggtcatttgactagggagaccacatctctgcaaggctcgacccctgattcctccagaagacccgcccttgaccgtcccacctgccttggttttccctttcgtctgacactgagaaaggtggtggtccgcagaggccctcctgtgcgccacttgtgtgaaattaaatgcatcccccatgttcgtcatctcatctcagtcagatttgcactttcctaagggcagaagcatgttccgggctggccgctttgccagtcgtcatcgggacattgacagtttagctctacagatgcatttttaagaatcttctaggcgtcaaggacagtgctgaacactagaggacagaaagatggctgagaacagatactattgggctggaaaagagggttacaacccgtgcgcgtccccagcttcctagcctgggtgggaggttctgggtgggtgggtttcgttgtattta

SEQ ID NO: 128320 - DNA, 1442 bp, Homo sapiens
agctgttttttttgctgggtcatcatcagtagacagttcctgtgtaatcatgaggggaggtgcaggctgcgctctagtaaatctgcagtttaccatttctccactaaaatgcccagcaatgctaagtcactgtttacgtaacaaaattgcactgggtacctgccatgtgtcaaggacagtggtatgaaaagatgcaataccatgttcagggagcccacagtgtaggtgtgggtaggaaattattgtgtagggtgataagcaccgtgataagggtctgcattgtgctgcagaggcctggagtaaaggcacccacccagacatagacctaacatacccaagcaggtgatggccaacctgagatctggcatgtggtataggatagccccacttgtccacacatatggactcccagcccaactcccccgtgcctagggagagaggggctcaatgaagacagtggatggaatgagtgatgccagtttctcttttgtttctgaaagatttctccgtggacgatggcagccacgattcaggccatggagaggaagattgaatcgcaggctgctcgcctgctttccctagaaggtcgaaccgggatggccgagaagaagctggctgattgcgagaagacagccgtggagttcgggaaccagctggagggcaagtgggccgtgctggggaccctgctgcaggagtacgggctgctgcagaggcggctggagaacgtggagaacctgctgcgcaacaggaacttctggatcctgcggctgcccccgggcagcaagggggagtcccctaaggtagccctgggacgccttggggtgtgggagcccaagcggccaaacccgtgagcgtgtgggtgagcgagtgtgacacttgtggttccaggtgcccgtgacctttgatgatgtggccgtgtatttctccgagcaggagtggggcaagctggaggactggcagaaggagctctacaagcacgtgatgaggggcaactacgagacgctggtctccctgggtaaggcctgacactcatttctctgttaaatgggattttgcaagtcctcagaattctccctccacatagttgttttcatgtcagtgttatataaatcaccagaaacattgttgaccttgcaagttgttaccttttgtgaaggatgagccctgggtgatggagttaaaagctcccttctccctgtgttgagtttcccagaatgccagtctgggaacggcggtggcttctctcctacgcaggcccgggatgtggacctttctgttcttgctgacttggagcggggaaggccccatctgctctcagatccagtatgtaattgactcacatttgagaaagactctttccttcagccttctcctacaaacatgcgtggcccttacggcaacatgcctcgaggtcagtggagaacatgggcagacggtgctgc

SEQ ID NO: 128321 - DNA, 1128 bp, Homo sapiens
actgtccttgacacatggcaggtacccagtgcaattttgttacgtaaacagtgacttagcattgctgggcattttagtggagaaatggtaaactgcagatttactagagcgcagcctgcacctcccctcatgattacacaggaactgtctactgatgatgacccagcaaaaaaaacagctggttcactgaaacggcacaaacaagagtattgctcaatttcttttttctttttttgttttttaaagcatctcatgtccccttttaacaaacataaaaatctaatggccagttcctcttcccccaggacagtctcattttgtcaccttcccatctgcccctcccccacaagctaaaatccccatgactgcaaatctccatcagtccagagttaggctttttgacactgcctgagccctacaagattctttctctttcccaattcccaccccctcaaggtaaaaatgacggcctccgacatttttgtagctgtaccaggagcagtgacataccctgcagtctggtgaggaaagtacatatatgccacagttagacttgtatatggacagcaaccatcttaattagagacgggggccttccctgtcattggaaatgttcacatggcgtatcagtgaccggcagctgggacaaggaagaatgggcacattttgcggtgggtagggagctggactgtttgagccacccacatctgaatgtgggacctacagggcacagaggagctcctggtatcgggacctgaggatcaacgcctccttacaacattctgcaaaataattcctcaacaaaaggttggtgattatttccaaaatgaagaagtagctactagaaaccagtgtggattcacttagagaaagtcactgagaactagaatgcggatggacagctcaaaaaatagagacaaaaggagagtttgagcagagggagaaacaaacttgtctaggacagtgcttaagatactatctatttggaaggaagcaggacccaaagaaggtaggactctaaggggtcttcaaggctgggagattctggacaagctgaactgtttctaggcgaaaaccccaatgcgggtgggagtcttgctctcaaggagtaggtggtcctacagcacc

SEQ ID NO: 128322 - DNA, 1789 bp, Homo sapiens
ccctttcaataaccgagtcctcgggctgggccgcggggccagcgcagtgactccccccgcgctcggcagtccggccggggtcgcggggtcgcggggtcgcggggtcggcccggggtcgctaggtcctcccgtcgggccccgcgggcggggctgggcggggcggggcggggccgcgggcaggcgggcgcagcgcctgccgttcgcctctcaggctgcaggtggggctgtgcggccgcgctgcctccaggaagcctcacgggccttcgtctgccgggccgcggcgccggctcccaggatgcagtgtggaccggccgggcgctgacggaggcggcgcgactgcgggcggcgcggcgcaggggcagccagcgaggagcggcggcagaggaaaggccaggcaggcgccgcctgcggagagcaccgggcggccgggcctgcgtggtgccgcgcgcggcggcggcgacgacgacttcctccgggccgggcgggacagcgcagggccatggccgaggcggtcgcggctccggtaagggcgacccgcgcgcgcagggactcgcggcctgggggccccaggcggcccggccccggcacacggcgccgcaggccctggggaggggttccggggtccgggccggaccaccgggcctggggctcccgcgaatggggcgcggggtccgccggggcctactgcgcccgtcggccgggcccccactccgagccgaacccgagcgctggcggaacggttgtccccgccccgggccgccccacgccaagttctttgggccctccggggcttcctgcccccgccccagccgctgtcccctccttctgggtgcccccccacccgcggctcctttctctgcctggcgctcggcctgtaggtccctctccatctcccccgcagcggcctggtggcacctgggaggtgtccggcttcgaatccgcatacaccgactcccactacgtgcccagcttcccggggtcggcgcggaagggaatatagagccacgcacttccacaagccctgttgaggcgttagtctgtcctcacagcaagcctgtgggatgggtactggtgttaatctctgtcatacaaaagaaaaacccggggcctagagaacttaacttgcccaggcttacccagctggaaagtgtgaaaagacacacagtggctgtgtgttcaaggaccaggcaggcaggtacgcgggcaataatcgtgcaaaacagaaaggggtgagtgctggcgcccaggtggaagcttgcggtgggctccgggggaaggagtgtcagggggcctcttggtaccgctgtccacccctcctggcctgatgctctgcgcctctgtgatttgagccgggcttttagggaaggctaggatttcaggcccagctagaccggtggtgctttcagggagggaggagtgcctgggcaaaggcgcagagagacgggacagtgcagggcgtgtgcaggcacagaaaggagtccatgagcctggagaagatggttttggtttggaggcagtgggaaaggagtctgcagagagagactaagaaggggtttgcatgcctggacttcatcctgcgggtgggcagtggatgagggatccggctcctcttaccatcagctcctctcaagcaaagagtttcagctcccctggcaggagtccaaggacagccccacatattccagccacttgtcagtaagaagctgggctggagtgagcagcgcacagtcgccacctcccaccacatagtgtgaagaccttacacagggtttcctggccccatcagaac

SEQ ID NO: 128323 - DNA, 1075 bp, Homo sapiens
aggttaggtttggctgaggtctcataactagtatgaaacaaggcagggattggaattctggcagcctggctcctgaggctaggccccagtcaccgtgctctgccccggtctctgggtccggaacctcttaatggccacatcaggtcagcagtggtaccagtgcaaccaacatagctggtatcatgttcttacctagagctcagacctgccttgccagctctgtgttgagccatcagaatgtcatgtgggaaccctctgcctgccatgaaccaaaattccagactcccagaaggaaagcaggggtgtggcacacaccacgtcatttgctcagcctaggcaccttgagccactcccatcatttagggaatggtgggaagcctcctgacacctaaatacctggaagccagcctgagccctcctggcaagcaggccttcctaaggacagcggtctagggctgctctgcacgctcttctgcatagaccctgatgttggctacattttctctgttccaagatgctaggaagaaatgtaaataactctttgagagaagttttggagggtgtctgagactgttcctgagagggagtgaccatacctgggccagagccacagaggtttgctcagggagagtctgcacatcgaggcaggaggcaaaggctgcagcatctcactgcccatcagcctctgggcctccgggcctcaggcaggcagtcacgggaggggctgccccttgccaggggtgtagatgcagcctggccagaggggagcactggtaagtgtgactgcatgggacaagttatcagctgttcagggagaacaggcagagagcccggcagtaagtggacaacaaggctgccggttagtggcagggacagttttttgtttttcttgaaacaggggctggagtacaatgttgtgaccttggcacactgcaaattctgccttccaggttctcctgcctcagcctcccaagtagctgtgattacagacacccaccaccatgcctggctaatttttgtattttattagagatggggtttcaccatgttggccaggctggtcttgaactcctga

SEQ ID NO: 128324 - DNA, 1341 bp, Homo sapiens
tggccctgggcattccttggcttgtggctgcatgactgtagtctctgcctgtcttcacacagctttcttcttttgtgtctgtctctgtgtctcttctgataaggaatgagtcatactggactaagggtcccccctacttaggagtatgacctcatcttaagtaattccatctgcagggactctgtttctaaataaggtcctacttacaggcgtgagggttaggacttcagcgtgtctctgcagagacacagctcacccccagcactgtctcttgaggggattcctgcatgtcagaccctggctattatcctggagtgtgcgcctggaggcctaggtggggttaccaagtgcagggacagctaggctgtcccctctgggatggaacaaccaacccccccggagactgtgcctgcaggtgtccatcaccttcaaggacttggccgtgcggttctcggaggaggagtggcggctcctggaggaggggcagagggagttctaccgagacgtgatgcgggagaactacgagacgctggtctctgtgggtaaggacgggagggagcagcacgtgtggcaggagcctggtgggcggtggaagggaggccggagtccctggacccggcagccttagtctttccacctgagaaatgaacacggggatcgttcacgctgctgctattctatgtcccgggaccgggttctaggtacaattcggtgggggtatgcggcggcctctgaggttccgaccactctgcggttctttgagtttaagtggtcacatgaatgtgcacagacctgcaggggcctgggctgctatgcaactgtgtgcgaagcggagaccactccattcccagggccacagttccctcttctttcccagggacagctgagctgctccccctctctgctttcctgtcaccctcagagcctggaagagctgttgggggagggagccacgctgatgaggggcaggagcctgctggttgtggagatccccagggtaagttatctgtcagactttgggtgtctcctcccactcatcggtcctcagccccaggcaatgcgtgacctcagcctactcagtccagcctctcacctccctgcctcccctactgcaacctcccaagctttcacccctcatccctctgggctggaagcctgttatgcagagaagcactcagagaaagcctggggtcaccctggagagtacctcctgcctcaggccccccacccaccaccaccctgaagccttatcacagccacccctgcagaacctgctccagctcccaaaagtcctgccacgaggcttacatcccaagacctcagatggtggatgtgctccac

SEQ ID NO: 128325 - DNA, 1076 bp, Homo sapiens
cggggtcgggaagatcattgtttgtgtccatccattgggtttctccagtggagaagcttcttgagggggctcccgccgtccactgctgctgcttggtttaacttccagcagaattccttcctagatctgctgcagggcctgctgggatgcctttgctgaataaatgcggttttgctgaccctcccatcagacgaggatgggccctaactgagccccacccttgggctgctggcccctgtgagatactggggtgcagggatggcacctgcctggtgggagaagccgcctggcctgtgagacctaggcctggctagaacctgactgctaatggcttccaaggactggagacttccagaaagttccccagcagactttccaaagctgctggggtcctggccaggctctggcttcacttttgtcctctttctctggcaagagaggcagccatttagggtccactagaacgcatgctgatcgtgggctgagctgaaaaggggaccggttctgtgtgcccagacactaaggcagagacctggctctcttcaggctgatgacagagcactctctggtcccctgcccagggtctgcccccaagccctccccgctgcactgcctggagagcgccctgagggggatcttgcctgtaaggcccttgcgcttcgcctgcgtgggaggccccagccccagccccagccccggctccagctcgagcttcagcggctctgaaggagaagacccgaggccagagcctgatctctggaagccgctcccccagggtgagcctgtgcggagagggaggatagcgggatgtgtgccagggcgccagtcaccactctgatgccagctttgtttgtgacgttagagagggaccgccttcccagctgtaagcctcctgtccctctgtccccatgtcctggtgggacccctgctggcagcagtggcggcagccctggtgaagaccccaggagaacagagcccaggtactgcagcggcctcggtgcaggtgagcctggggtctcctgagggggcgcccatgcgttccccagaggaccaggagtccagactggatcctttga

SEQ ID NO: 128326 - DNA, 1034 bp, Homo sapiens
ccctccatcagggacaaacggtcaagactaatagaaggttatacaggaccattcaaggtggagactctcaaataccacgcgaagagcaaggcccacatgttctgtgtcaatgccttggcagcgagggaccccatctgggcagcccggttccggagcatcagagacccacctggagatgttctggccagcccggagccgctcttcactgcagattgccccatattctaccccccagggcctctgggaggatttgatagcatggctgagctcctgccaagttcaagagctgaactagaggaccctgggggggatggagcaattcctgcaatgtatctagactgcatttcagatttgaggcaaaaagaaatcactgatggcatccacagctcctcagacattaatattttatataatgatgcagtagaatcctgcattcaggtaatacgtttataatgattgctgtatcttacagagaaggattctatactgagaacgatgtatatccatgctgatgatggaaaaaagaatactagtgataacccactgctaacatcataatgttggcatataccaacatgcttatcatggactaggcattgttttagacgcgttccatgtattatctcatttaatttggacaacaaccctattatcatctcctttttgcaaataacgtaattagtgagatagaacatttctacttctggtataaaggaaacaatcatctttattcagaatccaaaataaacacagatctcaagaaatagcctacaaccacaaaatcacagagctcttaagtagtcaatatttaaatttgttttgtttaagagacagggtatggccctgtcacccaggctggactgtggtgtgatcatagctcactgcagcctttacctccaaggctcaagcaatccttcccactcagcctcccaagtagctgggaccacaggtgtgtgcccccacacctggataattttttatttttcgtagagatgggaatctcactatattgcccaggctggtcttgaactcct

SEQ ID NO: 128327 - DNA, 1058 bp, Homo sapiens
ggaaagggcgcacccaccactccccacagtcagagaggctcacaatatccttgacaatgctttccagaaacatccctggtgcccaacttcctggctccttcagtctcagctctgtgactcctctcgatgggcgcaggctggagccacagcccctggccctcagccattctctttccaggtcatgtgtccgtgtctggctttggaatgaggaagagctggctcctgctctgggggctttcagccggagcaggcagccggaatcacactttcatatcctgtggcttatgtttattgtattcctgatttattgattttagatattctctattgattcctactgtggaagatggagatacggccctgttacatcacctgggcccccgcttctcttccctccatcctctcagaacaggtacatcacactttgttggttacattggtataaattatttgcccagttatgattatgtgtgatttactgctgaacaaggtggtgtattgtgatggtgttgccttcattgtcggactcttccccctcgaattggaaaattttttcttctttttcatttttctcactttctttaccctcatcagttcttcccagactgtccagtggaattataaaactcctccgaagagtcttttccacgtgacgggacatcctgtgatctctccatttcattctttctctggagacttcgctccggggccttctcctcccctgctctgtctgacccaggcagctgttaggcctgcggcacacctgtggtctgagatgtgcctttgtctctcccccatttcccgagtctgtctcttcttttgtggttgacgtcttcatcttcttagtgtacatcctccagtggcttcctaaggaagggtgcaggggaggccttctttctgtgacgcatcctgtctaaaaacatcatattcttccctcatgattcagtgataacttgtttgggcatataggattctaggttggaaatacttttcctcagcattttgaaagcattgcccttttaggttttactggtgctattgagaggtctagtgccttc

SEQ ID NO: 128328 - DNA, 1068 bp, Homo sapiens
tatccaagatacccagaagatggcattagaatatgtttcagggatgctaagaaactttaaacttaataccacgagagcgtctttggaggtccttgagagagccattccttccacagtgtgctcagcgccagctgggcggcccacctcgtgcttcctgtaggcagcaagtatctgggggtcacctgctgctatgctgaggccagctctaaggacacatatcaacacaaaggtgtccaagaacattcatcttaccagatacccatgaaacacttcgcatccctcaggctgcctgtcggtgcagggtgggaatcgttagcgacttctctcgcagcagcagcagcagcagcatcctggcggcttcagtcctcccacctgactctgcttttcctttcttccccgggacctatcactttataacctaccatgtcatttacttattatggttgcttattgttttctgactcccagctagagtgtaatcttggcagggatctgtgtgtttcgctaccttgtgtatcccaagtgcctagacaataaatctatgttgattgagggacttagaatacccagtcaacaaggtacactgtctctaggcaaagagatggtgtcagtggagctgatgacagtgctgtggccagctccacaccagattaacaaccagcaggttgacagtggccacccggcttgtggcatgctgggacccaaatgggacccaaagaagcctctacagtcaggtttagggtgtagacagtgccgcactcggtagttgagctcgcagcacgggtccactggtccagtgtggaccacagtgaggtgccagagcaggccataggaggcatctgagaggaacaaggcaagacgaggtgctttctagacacctgtagacatcatttcagatatgatagcgatagaattggatagaccaaggctgagattaatagctgagttgcagagaaagcagacttacctgtccgaagtccaagtgtaaccatgtctaacatgaaagacgatggaatgtgaggcttgatgcatatccacactagagtaacggtgggggcggttctgatc

SEQ ID NO: 128329 - DNA, 1031 bp, Homo sapiens
gcgttagactgccgggagtagcacccagggctctgctcctgttccccgagaagggctgttctcacttgtcctccagcctcctacggagactgcagttagtgatgctgaaagtgcctcccctgtggggctaggaatgaaaagctatagacacctttttctctgagatctttgcaaacccaggcgctttagaggaaagaacactggcctgggagtttaaagacctgttccctagtcttgattctgctgttggcttactgtgtcaccttgggcaggtctcgtcatctttgatgtctcacagttgcttcatctgttaaacagggagctcagtgtctgtttgtccagcttctcagagttgctgtgcagctcggatgtggcataggaaacagcagacacagggagagggcagcataaggcactgtagggagcagtggccacattttctggtgagtcctgtggcaggaatgtttgtgcattcagcactggagcatttactccctgtctgacactggggtagctgccatgagggggattctagtatcagagtccctcccttctggaagtttccagggcaacaaagacataagacaaacatccttgaaatgttatctaaaaacccaagattgaaataatacataccacacaaggaaacaggagagtagtctagctccatgtccggggctctaggggttcatagatggcagctcctgtccggggctgaggttgggaggggagaaacaggggcagagtgagttggtctctggagtgactgtgcttttccaccctcagcagaggaagaaccgatgctggaacgtcgttgcaggggccccctggccatgggcctggcccagccccgactcctttctgggccctcccaggagtcaccccagaccctggggaaggagtcccgcgggctgaggcaacaaggcacgtcagtggcccagtctggtgcccaagccccaggcagggcccatcgctgtgcccactgtcgaaggcacttccctggctgggtggctctgtggcttcacacccgc

SEQ ID NO: 128330 - DNA, 1881 bp, Homo sapiens
cccctccctctacagctgcgacgactgcggcaggagcttccggctggagcgcttcctgcgggcccaccagcggcagcacaccggggagcggcccttcacctgcgccgagtgcgggaagaacttcggcaagaagacgcacctggtggcgcactcgcgcgtgcactccggcgagcggcccttcgcctgcgaggagtgcggccgccgcttctcccagggcagccatctggcggcgcatcggcgcgaccacgcccccgatcggcccttcgtgtgtcccgactgcggcaaggccttccgccacaaaccctacctggcggcgcaccggcgcatccacaccggcgagaagccctacgtctgccccgactgcggcaaagccttcagccagaagtccaacctggtgtcgcaccggcgcatccacacgggcgagcggccctacgcctgtcccgactgcgaccgcagcttcagccagaagtccaacctcatcacccaccgcaagagccacatccgggacggcgccttctgctgtgccatctgtggccagaccttcgacgacgaggagagactcctggcccaccagaagaagcacgatgtctgagacggtgggcggggccgtgttggctgagagagggctggggtccttcgtggtgggagtcgcagtgggctgggggtgcctgcctagtgctggagtaggggacaatgggaatcctagaggggatggaagacgcggggagtgagctgggtgggccctgctagcgagagaggtcaaccccggtggccagggaacccacttccaagcgcagggacgccggcctccagctggtgtgtgctaaggctccgtcctgactgccctgtgccctggaaaagcagcaatagcatccgccccttagagccctctggctagaggagccaccagtggaaaggaagaccctccatcctctggtattaacgccttaatgcccctgtcttttactgtaagttacttaagatcatttttggaagcaggcgtggtagagtcctgtaaatgaatgctctgggctagatacagcttggagaacctgctggccttgttagacagcacttgggcctttgccagcagcaagaggtgaagcgaagccactcttacctctcccttcccctcccacctgccccctgcgtaggcacccagacttggagagacccgtctgctgttaatacttccatcctcttccttcccaaagagcagatcccaaggcatttactccttggtctgtctcgctttatctgtcgcccctcccagcgctgagagcctcccctggctgtcagcagcactgtgtccaggctcttgtctgaacaccgcagcccctccttcgctccttccagagctcagcatgtcacggcaaggactgccgcattggtgatggagggccagctgaggggaagttgctggtgagtttccttttctccatttctagcatatggacacctggcctctgcttgagcacttaggtgacaggaacttccgcacctcctgaggccctggatgattctaattgttagaaattctaattgttagaaatccttccttataatgaatgaattctgctttcctataatttctacctattgggccttgttctgttctctggaactaaacagaacaaccatttacccctccttttcaaactagagaataaagatttggttttagaactggtggctggggagtgttactttttctgggggagctgcgacatgtcaggaggagcagcatgctctcctccctagaaggacggggggctgtgggtggggctctggccacaggccacatgcccagcttgctgagctctggccccctgcctcagttcttccctgagcatacccaggcagttgggctaattctctggg

SEQ ID NO: 128331 - DNA, 1090 bp, Homo sapiens
aagatggctgaaggggagagggcccgctgcatccccttgggccagagcccacaggccaggccctgaggatcttaggctgcaccaggcttgccggacacaggctcattgtctctagggctttctgtcttgctgtaacgtctctccagccagctgcagctcctgctgacttatcccaccccagcgcaggtcatccaacggtgacttatggccccggcctcctggctcgatgagggtatgttgcttctgtttctacctctctgagttcttttcctcggagcaagtgaccctgatgggatggccatgggtgtacaaggatacttgtgtcatgggtggctttgcagttctgtgttcctaagtgtgctgtgcagtgattcgtgctgccctggttcacagtggcacgtttgtgtgtctgtggatctgtaggtgtgtctgtgagttttaaaaaatatctcacattctctgtatttgcatagacagttttgcaggtgttctcacgtagttttgtgtctttgaacttttgtttacttagctgtatttagatatgattgtatctgggtgtgtttgtgtgtggtttagcatttacatcagtttcttatgtccctatgatcatatatttaaattaaaaacatctgctattaactgaaatcagaggcagagaataccattgcctggtcctgagggatttcttaatagtgacagaagactggagcctgaggagccacctcttgggtcctccattgtttcattcactcatccgttcattcattcaatacacattacacaccttctgcatatgagggacgcgcaggtgtgggagcaagcccccgctccctggggctaacctgagtgaggggtctcacagggagagaggactgggtgaggacatagcagtcaggtatgggctgcaggagggcagggaggcgctggggacccggtggagttgagaaggatgaggctatagaaaggggcagcatggcagggaggcattggctgggcatgggctgggactggagaggccagtttctgtgggggtctcctatggaagaccagctgagctgtgcccagcaagtgaggacctgctgggacctca

SEQ ID NO: 128332 - DNA, 1402 bp, Homo sapiens
tcgggaagagacaggggcctagggttttccctgctcccagctctcttgtttggctcctgctctcagagaatgcctttctctacttcccaccttggtgcctccccttggtggcccctgtcctgctctcgctgccttggctcttgtcccctccagcttctctgcccacctgactctcctcttggccctcctgtcctcccgtccatcctctgtccccgggttctcctgcccctttccctccccttcctcctcctccatggcctcttcgcctgcccatgctctgtgtgtattgcaggtttcccagttcatggcgtgtgaggagctgcccccgggggccccagagcttccccaagaaggccccacacgacgcctctccctaccgggccagctgggggccctcacctcccagcccctgcacagacacggctcggacccgggcagttagtggggctgcccagtgtggacacgtggctcacccagggatcaaggcgctgctgggccgctccccttggaggccctgctcaggaggccctgaccgtggaaggggagaggaactcgaaagcacagctcctcccccagcccttgggaccatcttctcctgcagtcccctgggccccagtgagaggggcaggggcagggccggcagtaggtggggcctgtggtccccccactgccctgagggcattagctggtctaactgcccggaggcacccggccctgggccttaggcacctcaaggacttttctgctatttactgctcttattgttaaggataataattaaggatcatatgaataattaatgaagatgctgatgactatgaataataaataattatcctgaggagactccagtggtgctgggagggtgtaactgttacttgctgtgtcctgtgttcctgtctggacatgcataggtgtgcctgcacaggaatccgggtctgtctgcatgcccaggcccacagggctgcccctgtatccaggtctgggtgtgtgcagtgggggtgctccctgggggctgacacaggtcatctccagggagacagaatcttgtctctgtagggccctggattcaagataacaaaaaaccccctgaaccacatgcatttagaggcagtcctgatgggacactgacctggtgtctagcccctgagggccatgtgcctctgctgggtggggcaccctggctcccacagcttggcttcacactgactgtggaagcagccctgcacttgtctccctcacccagttcctgagcctgcgttgaccctaacctgaaattggtctgagtcctggctccccctgccacccacaacttagccttatcttatccaatacaattgggccccggacacactggtgactccagccctgaccagagctcacctggtgtctggctgcagat

SEQ ID NO: 128333 - DNA, 1152 bp, Homo sapiens
tcgaggagtacttccagcacgcctggtcctacaccaacggcatcgacatgaacgcggtgaggccaccagagcgtggccagtgggtggcaggctgggaagagtggggtggcagaggggaacctcttggcacagcaaacaagtctcaggcggtcacagtcagtagtaaggaccctggaggcacgttgcccctttttgcccatgaggaaatggaagcccttggaaccccttccctggagagctccccttttggggtgggaggtatatgtcacataggcgatggggttaaatccttgtgacagcccagggcgggaatggtctctatgccttacaaataagaacatggaggtctagagcccaagggtgctcggccaggcatggtgaagctggagtggggtcccaggtccttcccaagacactgggccccctgatgcttccgagatctcccaggcctggaggttgagatttctctgacatggaggggtgggatggtggagtagagtgtgggttggggggtcccaagggagggtgtgctgagctgcccccaccctgcccccaggtgctgaagggcttccctgagtgcctgcaggctgacatctgcctgcacctgaaccgctcactgctgcagcactgcaaacccttccgaggggccaccaagggctgccttcgggccctggccatgaagttcaagaccacacatgcaccgccaggggacacactggtgcatgctggggacctgctcaccgccctgtacttcatctcccggggctccatcgagatcctgcggggcgacgtcgtcgtggccatcctgggtatggggtggggggcgggcactggactggaaatgccctctgcagcctcaagaggtgcgagccttctgaatatgcagtcactggggctgtggacctgggactgcctgcagggtcactgggctcctttaattcacctaaactcaggccctccaagcggggccatggagaggagccccacgtggggtgaggctgctgaactctggggttcccacattctccttcccttcaggatccgccacaaacagacactttttgcttccttaaagtaggatcaaatctagatcctctagcctgggcagtagaggaagaaatgctagcctggaagctcggcatttggtttcac

SEQ ID NO: 128334 - DNA, 1068 bp, Homo sapiens
gcctccccagtgctcctgcaggcctcagacctcagactgccttgaaatccttagtacctcctgtgatcagccccactcctctgggcctcctgcccttctccgtcccccaaggccgtctgtcctgtcttcttccttgccttcttcatttcttcctgtgcccattcctttaaatcagacgccctgctcttgtcaccaccacgcctcaccttctccctcatggctgacccctccccagctcagacacccactttctgcttcttttcagccccctgggtctgagctgaggatgaaagaagcttttccttgaaggggagccttgaggctgggaaggcaggtgggacagggattggtgtataagtgggttttcttgtcttgagataggaggcagaccagagcgatcccagaggatggggcttagacacaggagaacttttcctgtggcactgaagctatcaggggagcgcccttcatcatggggacagcggtgttcctatccttctggtcaaggcctggtgcagcctggagacagggctgagtgggagaatctgcagggctgccaggtgcgggcgggggtccatgggggccctgcttccgagccagttgcctcttgccctgcagcaccttccctccacctttcccttctctagctggatcagaggcctgttggaggggctccacgggggtcattcctgagctgcggctgtctgtcctggtctgccggggctgcagtcttcctatcccagtcctgctccaggggtgaggcaggcatgacgcaactgaagggtgctatctactccttgacccaccctggggtctggagagcgtcgggagagcggcttctccgtgttgcgtcttctgcagcccccggagaggagctatgtaaatatttgcgaagagctgtctgagatgggagcagagtttgatggtggccttgggctctggggaggggggccatggggcagcagaagggccagcttgggggtgtgtgaggggggagactgggcctcttttctccccagaggtggcttcctgggtggggtgattttggaggttccaagaaagcccttc

SEQ ID NO: 128335 - DNA, 1037 bp, Homo sapiens
gtagctgtgctggggatttggcctcttggcagcagcggctgagggctctttcctttggctgtggtatgtgtggagtgctcttaggtggagctggccctccctcccagtctaggctggccccttctggagaggatggctatgggcccccttctgcagaggagttattgtgggatcacctaatccaacccattcgacttgcaggtggaaggacggagaagcagaggtctgatgaccagtgaatcagtggaaggagtgggattagaacccagatccccagcccaagttcaaacttgtcccctctccaggttacaactccaaaaaatggggctgtgacccagaaaactctgtgccagcaatctctgtctgtccccttcttcactctcacctagtttccacggggctcaggtgtctcctgttggccaacaggctggcctggcactcagccacctaggaccccatgtatcctggcattctaggcctggggtgatgcagacagatttcctcagcctccgcttcttctgccttgaaacactcagtccctcctgtgatccccgggacctggcttgggctgcgtgtgtgcgtgcctgtgtgtgtactcacacatgggcctggtagggaggcggaggtgaggaatgcctgcgccaccccttgtttctgtccaggcctttctcagggtctctgcctgggccagcctcgggtagggggagctgggcaggaggtggagccttctgctggcaggcgccgccgtggacagctgtgctgtgttggtgcctctagccttgctctgcgcagtgtcagggcctggagccagacagccccattatttagttgctgggactgctgggaggtggggaggctagactgggggagtgtgggctgaagggagagacatgaggtgcctggggctcactggccctgtgccccttgaagtcaggcccgggattcaggtggaattgggggcagagtccagtggtgtgaggctggctggcggtaacatccccgcaaggccctggggaggcaccccgggcagcaggtgc

SEQ ID NO: 128336 - DNA, 1005 bp, Homo sapiens
gtgggtaggatgctttctgcagacttttctccctaaattgtttctttttgggagctgggaggagcctggatatctcactgtagcctctctgttccctcagtcacaggcagggtgcgggagagctcttcccaggaatggtctctgaaatggctcttggagctgagatgggggtggggcagattctagaggcttaacagcccagctcttggtattagggttgggcacttttctctttgtcccagatctgggggtagcagaggtgggaagttgaaggcagtgggggcttctccatcagctcatctgaggcccagaaatgttgctttggggagagcttgccccctctcaccgtttctcttcctcagctcaattcttgagtgtgggggcggctaagtgggtctgccttcaggctctaccctgagcctccaaggaagtcagaaatctacattcagctttgacttctgagtatgtggagtgggctggggggagagagggagagatctgtctctcctcagcttgagggaacagctctcttcttgcctctgtgcacagaaggagggctaccccgtgcctgggctcctctctgtttgggaggatgaagggctcctctgactcctgtcttccctttgggataagagcagaggcctgtcccagcaacacgggtacaggagtggaggacagctggccagctcagatgagtggctccttcccttcagggcctggctctccctctcccttggtctggagagagggggaggctacagatgtccctttcccttcttgccctcccatgcccattctcagctgctggcctttgctcactttctctccatcccctggcctggacaggaggacacttcactcacacatgaatcatcctggattcatggtaggcaacccagcagccaggggtggccttggggcgtggcgggggctgggccagtcgtggactaggttctacccggaacccagatgtgttgatgcacctgatgccaaatgctacaccaa

SEQ ID NO: 128337 - DNA, 1024 bp, Homo sapiens
gtcttgtcacctgggctgccctccctggttttctgctgagcctgccgtaaagtattttcagcaccttggacagagacaaagctccaacctggctggaggcattgagtagccaagtgagcttgggatctcctccagggccagctttcctggcaaggttgcccaaagcatgtcttggttcttcatattttttaatcctttgaaggcactcaaaaataaaccccctaatatatgtcaaaacagtgcactagttctgcaaactctcagggcattttttaaaacaaaaccaacctattttctagaatagtgttaggtacacattaggtgcttagtaaatacatttaaaaaggaatacatgcaaattcaaccttcagacaaatgtcccagcctccttataataggattctttctccccatcagtccctcctatatagtaattctggagcttctagtacttgctaagttttgcagcctcacttgaagccccttcttgtgtctaaaaatcccagtctttaaatcaaaggaacagatgactattaagttttcaggcagaggaaactgaaactggccccttctctttctcatctgggggtaagtatagattggtggggaaacccacacctgactcctcttgggatcttgctttatgaagatgttcaccaccttcctttgtacctgagaaagcccttaccatgcagaaggaccaaaatcgcccaggaaattttccgagctgacccagcccactcagagccctccttcttctgaacacccctccacgtatcctcaacatcaccagattgttcttctgacatttcatatccaagttttttcatgcctattggttcttttcccggttagataatgaattccctgtgtttgtggtttccagttagatgctactgtgatgcaaacacagcagataaaatgggagattgatcagtcttgggggcttctatcttgtcctaaggggtctcctgcaccacttatttttagtctgacataaatatgcaggatggatcatggtgct

SEQ ID NO: 128338 - DNA, 1413 bp, Homo sapiens
ccgagtccctcctctgtactggataccaagtcagcttccatagggatggggagacacctggcccagggaggagatgagaagcagcccggatggtgctacatatgtcagagagcagggcaggaagggatcagtgtggctgccaatggtcaggagggcgccatggagtgaaccatggcccctgcctcctcaccagcagctcctctggagctgatactcaagaccccccgtctctctcctcaccctcctctcccgctgcctcggctggctcaggtgttcgatgcccgggactgcaggtctgcacaggaaatgttcacctacatctgcaaccacatcaagtatgccaccaaccggggcaaccttcggtgagtgccccccaccatgccaggccccagccttcttccccaaggcagggaaggcggggctctgaccagctctttccccatgcgtgccagctcggccatcacagtgttcccgcagcgctgccctggccgaggagacttccgaatctggaacagccagctggtgcgctacgcgggctaccggcagcaggatggctctgtgcggggggacccagccaacgtggagatcaccgaggtgggcaccgagggccacccatgagggtgtccccaaggtggagaatgaggaaaccagtgggagaaggctcgggggatccaggcaggaagaggggagcctcggtgagataaaggatgaaaaacaccaaaggaggggtgcctgggtggtcacggagacccagccaatgagggaccctggagatgaaggcaggagacagtggatggaggggtccctgaggagggcatgaggctcagccccagaaccccctctggcccactccccacagctctgcattcagcacggctggaccccaggaaacggtcgcttcgacgtgctgcccctgctgctgcaggccccagatgatcccccagaactcttccttctgccccccgagctggtccttgaggtgcccctggagcaccccacgtgagcaccaaagggattgactgggtgggatggagggggccatccctgagcctctcaagaagggcctgcaagggggtgctgatcccacaccccaacacccccaggctggagtggtttgcagccctgggcctgcgctggtacgccctcccggcagtgtccaacatgctgctggaaattgggggcctggagttccccgcagcccccttcagtggctggtacatgagcactgagatcggcacgaggaacctgtgtgaccctcaccgctacaacatcctggaggtgaggtgcgggatggggctcgggcaccgaatgcacctgtccaaggcaggagtctggctctcactccatccccaaaatgccagccacggggacaatcagagcaggtccagggttgcctcctaaatgggaactgag

SEQ ID NO: 128339 - DNA, 1040 bp, Homo sapiens
tccccggccttccgctaccaggtgcccaccctaactggctctgccagcctgggcccagctctaattctaagcagcccctggggacctctaacctttccttttctttacctcccctcccaaccccatcatctctctgcagccagacccctggaaggggagtgccgccaagggcaccggcatcaccaggaagaagacctttaaagaagtggccaagtgggtcccctgggagccccgctctcccacacacaccctgggggccccactctcccccacacaccctgggggaccctgccccagcagtgttctgggcctaccactcagtatcccaaaaccctgttgtgagggggttggacccttgcctggggaggccctgcctctgtgcacccaggacaccctcacaccttcctctcccgcagcgccgtgaagatctccgcctcgctcatgggcacggtgatggcgaagcgagtgaaggcgacaatcctgtatggctccgagaccggccgggcccagagctacgcacagcagctggggagactcttccggaaggcttttgatccccgggtagggctgagcccaggggagcagggagctagaaagagggggctctatcagcatcttcaggggtgccctggaggacaggaagtgttacaagtcaggactcatgaggaacccggaaccacaggtgttcagagatcaagttggggcctgaatcttgcactgccagggaggccagagtgaggagggcagggcctccgggggccacagcacccaggacatctgtcttcccacccacaggtcctgtgtatggatgagtatgacgtggtgtccctcgaacacgagacgctggtgctggtggtaaccagcacatttgggaatggggatcccccggagaatggagaggtgagaacttccaggaaaggggctgctgggaatgaggagagactcagaattggagtgactgggcaggaacctctgcccaacacacacacacacacacacacacacacacacacacacacacacacacacacacacacaca

SEQ ID NO: 128340 - DNA, 1266 bp, Homo sapiens
cagcaagtagagttgttttttgttttttgttttttttttaatttttttttgagatgggaagaacttgggtcctccttgctccacccaccctgcatggtgagaatggtggagcaggaaaggcaaaggggacctgatggagtgtctctcctgccagggctccctccttccggctgccacccgatcccagcttgccctgcatcctggtgggtccaggcactggcattgcccccttccggggattctggcaggagcggctgcatgacattgagagcaaaggtgaggctggggactaaaggactgcctgaagggagtcacacaatctagggacagaggggtggggctggaaggcaggaaataggaaagagagggcaggaaacaaagtccacaaagctgaaaagacgctcatgagaccaaggggagggcaggtaccaaaggcaagggctgggccctgagcttctggcttcctggtgcctggtacatagtaggtgttgactggattgaggacaaaggaaaatagaattttcaaagggattagggctaagactcaaagaagaactgcccaaggtggattcttgactgtgccagagctgaccgaggtctgtccaagacctaaggatgctacaaggtgttcatattgagcatggggtgcccagggtggtctgtcaatcaaaagaagagggctgtgactgggaggagagttataagtatgggagaatatgaagtgggagcggggaaggggactgcgatgtcacacaatgcaaagggcatggaattctgagtccgaagccgcgcattctagcgcagctccaccaggggccaccacctcacccgcgcttcccttccctctgtaaatcagggctgtgcagggtctctgtgaaagcattctacactctcttagagatgaaacagccaaagtaatggtggtttcagcccaaaacgctgggctgccaggctgggcgacggtggcctgtggggaggccccactagcactgtgccccggagaagagccttcccaagcgcggggttgcttgcagggctgcagcccactcccatgactttggtgttcggctgccgatgctcccaacttgaccatctctaccgcgacgaggtgcagaacgcccagcagcgcggggtgtttggccgagtcctcaccgccttctcccgggaacctgacaaccccaaggtgtgagaccctgagggcgcaatggtaacctgaagatagggagagaggggaggactcgcgctctccagcggggcacaccaacc

SEQ ID NO: 128341 - DNA, 1168 bp, Homo sapiens
caggccccaccaggcccgctccggagactttcacgtccagggccagccagcagccccgggctgcgcccccgcgcccacccccaccagggcccgccctaaccccgccgccccgcagacctacgtgcaggacatcctgaggacggagctggctgcggaggtgcaccgcgtgctgtgcctcgagcggggccacatgtttgtctgcggcgatgttaccatggcaaccaacgtcctgcagaccgtgcagcgcatcctggcgacggagggcgacatggagctggacgaggccggcgacgtcatcggcgtgctgcgggtgcggaggggcgggccgggcctgagcgtgcggggttcctgctaaggtctccgagtcgggttctgatccactgtgctcttttccgacaggatcagcaacgctaccacgaagacattttcgggctcacgctgcgcacccaggaggtgacaagccgcatacgcacccagagcttttccttgcaggagcgtcagttgcggggcgcagtgccctgggcgttcgaccctcccggctcagacaccaacagcccctgagagccgcctggctttcccttccagttccgggagagcggctgcccgactcaggtccgcccgaccaggatcagccccgctcctcccctcttgaggtggtgccttctcacatctgtccagaggctgcaaggattcagcattattcctccaggaaggagcaaaacgcctcttttccctctctaggcctgttgcctcgggcctgggtccgccttaatctggaaggcccctcccagcagcggtaccccagggcctactgccacccgcttcctgtttcttagtcgaatgttagattcctcttgcctctctcaggagtatcttacctgtaaagtctaatctctaaatcaagtatttattattgaagatttaccataagggactgtgccagatgttaggagaactactaaagtgcctaccccagctcatgtggattacagttttttttttttgtttttttttttttgaaacggagtctccctctgccgcccgggctggagtgcagtggcgtgatctcagctcactgcaacctccaccccacaagttcaagtgattctcctgcctcagcctcccaagtagttgggattacaggtgcctgccaccgcgcccggctagg

SEQ ID NO: 128342 - DNA, 1050 bp, Homo sapiens
cagtaaatgggagcaaagaccacctgggggtgaggaatgggcttggccggtgggtggggctgagtaaggactggtgcctggaccaaggctgtcaggatcaccctgggcaaagcactgaggctcagccctatccccgagctggcaatcagtccaggggtgacgaatagatgacaggcccaggttctgcactgctgctgtatttttgggtgatggtgaacaagtccccattgtggtctgtttccttcacgtggaagatggggcagtgtttcctgtcccacctgttcccataaggctcagtgttcttagcacctgaaagactgtccttgctcacagtggctctcggcgggacagactgaggcctcgctgtctcagcgtgcggaggacggcaagactgagctttctttgatgcggttctccctggcgcatccactctggcgccccccagggcacagctctaagtttcttgggcacctctggggccgagtacaacaagatgcagctgcctggggtgccacctcggctcgcggcccctccaccccgggggtgctcagcaactgcacctcgcccctggtgagtcccaagcctggcctccccttctgccttcacccccacaactcctctccaaacccttcccctctaggctcaccttaggtagtaacctgcctcaccagcccccgcccccagcctgctctcctgccttctttaggcctctgcttcctccctactccgtttctgtcctctcttctgactccctctttggctttccctctcctcttgcacccagcctgagccttcctggccaacctcttcgtgcaccctctcctgcctccgagagatctgagcccgacagccccctgtccagctgcggccacagccagcctccttgcctccatttcccgaattgcccaggaccccaggtgaggagtggaggctgagatgcaggggcatgtggaggggggtgggctgatcctgtaggagtggggagctggggcgctgaggggggattcagaaggggagtcctctggggtgtggcgggaggagggcatgact

SEQ ID NO: 128343 - DNA, 1047 bp, Homo sapiens
atgggtccctgggccggggatgaggcgagtggattcgggggtggaggtctggactaatgtcccccataaacaggccctctcagagggctacagggagacttcaggagggacccgggcaacaagggctgggagcctggtctgactgggggtctctcggctcctcccagctacccctgccgccccggcttcgaggtgctgaaagacttcaccctgacgctgccccctggcaagatcgtggccctcgtgggccagtctggcggaggtaaggggagcccaccacctcttcaccctctgactcttctctagcagccactcagagcaaggccgggagcagtgagcccccggtggggtcccttcctccactgccacaaggggccttctttcctgggacaatccctagaatccctggcctccctccctctcaacccaattccccaggaaagaccaccgtggcttccctgctggagcgcttctacgaccccacggcaggcgtggtgatgctggatgggcgggacctgcgcacccttgacccctcctggctccggggccaggttgtcggcttcatcagccaggtgcggggccacatgggcagcccttggctcccactgcccgtcctcccctgggccctgcccccttagtcctcaggtgccttttctttctttcccaccctcatccttgctgctctcgggagaccctggccgtcttcacatgtcctcagctgttgtctgggtgaggcatccctgtcgtgggagcagccacagctctgcctggtctcccagagcagggacgctttgtccgcatttacagcagtctacacagatggggaatccctcagattctctgcaaatcccatagcatccaggtctagagaagcctatagtggaggtgctgagctgcagccgttctccctctgcttgaggtggcactgcccagcgagggtccacccttccctttgagggccgtgaatgaagagggcatgcctgctgtccgccagggagagtgcctgtgcagaagaaaggcaaatgcaagcccccaactcccagcgcc

SEQ ID NO: 128344 - DNA, 1050 bp, Homo sapiens
catgggtattctgtgatttcccatcttacgctgctatatccaggacctggaaaacctacatttttccaaagggctgcataccacccattatgtgcacataccatagtttatttaatgactcccccactgatgggcactgggggtgtccagtctttccattacaaacaatgttgccgtatcatcacacagatgtgaactcccaggactttggtgggctttttttgaccatgagtggtagaaacatggttccaccagccaaacgtgtgcacacaccatgctgcaactgctgggccacctgtctgtcctcccaacaggacacaagcttcatgggggcagggactgtcctcattccccatcgtgggctcaatggcacatgacaggtgcttgattaataaacactttggaaggactgagtaccatggttacagcacaggcgtaccagctccccagagccacagtgccatgctttgcaagtatttactgtagatgatcccactcacactctcaaaacaggcattcagcatcaagcacagctaggctcccactctccactgtggagcgaaggccgaggcgaggttaggaagacggcgcggctcctgcggtctagctcttccagctggactagccaaggggtttcactgcttctctagggggcgggtgaagggctggatttaaagaagccgcccagaagatataaatctggtgtcagaggcattttgggcagcctgaggctgatgactgagtgggtgaagcaggaaccaccttggctggctgcctggtgagggaggggtcaggccaacaagcagggccccagcagggcttgtggacttgccagctgaggccctactctgggctgccctaaggaggggtttagctgtgaaccagccccaggctctgctcctggacctccactgcttaaagacacagcctctgatctgtcaggaagtgggatatcaaatcagggtggatgtgggcctggggtttttggatggcttgtccccaaagcaccatctagttctaaaccacacccacaagagcccgtgggtccca

SEQ ID NO: 128345 - DNA, 1050 bp, Homo sapiens
ttcccgcagggctctcactccaaccttagcgttcccagtagacccgacctcccaaccgcgacacttcctgaaatttctcaccccagcctcagcagcacttggacaacctcaccccgacccccagcctcgtttcttgctgcagacctccaacctcaatatttctgcagcccctcagtcctctcccagacccctcctcactatttccagacccttccggagcaccgccttcattttagacatccttgccctggcaaccgcactcgcccctcctgccgagcccctggagcctcggtgggcaccttctcctccctccccacctgccacatcctcactcacaaagctcaccaacctaccttcaccctgaatcccttcccttgcatactgagacgctgccttcacctctctcaggaggcatttcctggcttagggaagagtgccgcatcctcaccctgacccctgacctccttcccctaggcacctacggaactgtgttcaaggccaaaaaccgggagactcatgagatcgtggctctgaaacgggtgaggctggatgacgatgatgaggtaggactggggagtgggatacggcctggggaggggtttgagggcctgggctgggtgggatctgactgctgcccaccggccccctcacatatgcagggtgtgccgagttccgccctccgggagatctgcctactcaaggagctgaagcacaagaacatcgtcaggtgtgcgggaggcgggtgctccttgccggtgtggccgcttgggggaggcgggggctgacactggacgtctgtcaggcggacctgcctggctgagcccttcttttgccctaggcttcatgacgtcctgcacagcgacaagaagctgactttggtttttgaattctgtgaccaggtgaaaggcggggtttggaggacagtagccttgggaaggtataggggcccagattgaggttaaactctgtcccattcccccactcatatcccttttcaggacctgaagaagtattttgacagttgcaatggtgacctcgatcctgagattg

SEQ ID NO: 128346 - DNA, 1016 bp, Homo sapiens
ggggacactgttgattggggtgtacttacccagcctgggcccctttggaggcccgaggagtcgcctcctggtggggcagtggtgcaggggaagatggactggtcctctctgccttccggtcagcactgtcatcctcttggagaaagaactgtaacagggacccacatgggcaggagtgaccaggccagggccctgccgacatgccctaggagcccgcacccagcgcacctgcaccgaggagggtgtggagacaggggacggctgagtgagagcccgggccccctcagcctcgctggcctcatcctcatcttcctccccctcctcaatggtcggggtttctccagtcggggaggctcccgggcgccttcgaggcttccgtcctgggccctggggtgtcttgcggcggcgtgcatccggaggcaggtgggtggacagtgggtgatggatgtggtgggaggactggcggtggtctgcagggaggagggggacttggctgtggcaggcacagtgtccctcccctgccatcctgccccctagccccactcctcccactaggaccccagtcccttctttgctggacagtcaaacctgatccccccacctccccctcccctgcctgccccctcacactcaaagtcttcctccccatagctgcggcctggctcctcccctccacgagacccggcctcctgtaggatctcctcaaaccgctccacgcccagggtgcggtgaagttcgtcttcctcctgctcggggaacccaggcgtcccagggcccaagctctctggctctggctgtgaggaagaaggcagagagaaaacacacagggctcactgggaattgtaccccgaaacctcacccttcccagtgccagagacccaggaaccctcccccgccagcagctatctcctctaatgctggtggctctatatgcccccagcagctgtcccttaaatatagggacccaggccaggcacagtggctcacacctgtaatcccagcactttgggaggctg

SEQ ID NO: 128347 - DNA, 1553 bp, Homo sapiens
gagctctcggccaccataaaactgggccctgaagcagcagagggctttgcccagggtggtggcactagactgggacagattaggatgaggtgccgggcccttcctgctactggtgtcctttctcctcagtcacaaggacatagtagctgaggggttgcgccagctgctgggggaggagaaataccgccaggacctgactgtgcctccaggctactgcacaggtgagcaaggggcaggcggcaggcccggggagacggagccctggctaaggccgccggccctgctcccctccagacttcctgctgtgcgccagcagctctggtgctgtgcttcccgtgaggacccaggaccccttcctgccatacccaccaaggtcctgcccacagggccaggctgcctctagcgccactactcgagaccctgcccagaggtaaaggaggcagggtgggggagccctggccaccttgcccgccatgccctgagccacgtccctccccctgcagggtggtgctggtgttgcgggaacgctggcatttctgccgggacggccgggtgctgctgggctcgagggccctgagggagcggcacctaggcctgatgggctaccagctcctgccggtgagtggccctggcctggcccgtggcgcatcctcactcccagcctgcgggtaacctgccgccctctcctctccccacagctacccttcgaggaactggagtcccagagaggcctgccccagctcaagagctacctgaggcagaagctccaggccctgggcctgcgctgggggcctgaagggggctgaggggttgatgtggggttcaggatggcccccccatggggggtggatgatttgcactttggttccctgtgttttgatttctcattaaagttcctttccttccccgttgtgaatctcagttttgggacggggagcagagctgagtcccccgcctcttccattcatgccccgccccccatacaaagacaaaaggccacagataggtgggggccaaagcactttactgcaggggcagtgggggaggagaagactttaaattattcacttaaataaaaaggagggaggggcatgggagggggaaccccatcccaccagcctgtcccctcgtccatcggtccctcggctgtccctcggtggcggctacacaggcatgggcatctcattgtactcgtccacaccctcccgctcatcaaacaccggctctgcctcgttagcatccagctgtgtgtggggaggtggcggtcaagaagggaagtgggggggcctttccagatccacagggaggcaagaggaaccgggggaggcagacgggagggcttacacatttcatctctcggtcggtgaagatacgggtgagcaccaccatgcggagcggcactgtgaggatgaggatgaaggggaaggccagggaggcagctgtggacatgacggcccagagcagggccaggcagagcagctgcagggccgtgaacaggtgcatacggagggtccggacctggggggcggagacaggtgagcccagcttcctcc

SEQ ID NO: 128348 - DNA, 1037 bp, Homo sapiens
ctggtactgccagatccagtaccggcccttctttcccctgaccgccactctgggcctggccggcttcaccctgctcctcagtctcctggcctttgccatgtaccgcccgtagtgcctccgcgggcgcttggcagcgtcgccggcccctccggaccttgctccccgcgccgcggcgggagctgctgcctgcccaggcccgcctctccggcctgcctcttcccgccgccctggagcccagccctgcgccgcagaggactcccgggactggcggaggccccgccctgcgaccgccggggctcggggccacctcccggggctgctgaccctcagcccgcactgggagtgggctcctcggggtcgggcatctgctgtcgctgcctcggccccgggcagagccgggccgccccgggggcccgtcttagtgttctgccggaggacccagccgcctccaatccctgacagctccttgggctgagttggggacgccaggtcggtgggaggctggtgaaggggagcggggaggggcagaggagttccccggaacccgtgcagattaaagtaactgtgaagttttcactcttgcagtgtgtctgagtgtgtgcgggctggcgggcggggagtcctcgccccttgggagagaagggcacggactgcgcctggggtctggccctccgccttcccttctccccagcgttctgctctggctttggcgccggcctccgtggccccgccctcggcgccgggcgcgcacttcccgcgggcggggctcgcggctccctggctcgcagtgcctgccgggagccacgtctccgaagaccgatagctgcttcgggattggcgtccgggcggctatctaggggctgctgggaagatggcggactcggtggctagccgatgaggaggccgcggggggaacccggcccccgggccccgagaccgactgagggagcgacctgcgcagggcccggggagtcatgtaggggtggcgcctgcggggagggctgcgggagggcagcgggagctggtgttagcggcag

SEQ ID NO: 128349 - DNA, 1091 bp, Homo sapiens
caagcgggagcgggccgggcctggcgctgggctgaggctcagcgaccgcgtgggaggcgccggcaggtccatccgcgctttggccgggtcatgagcctgacggggatccgcggctcctcggtctggaggcagctgctgggcagccgggtgctgaccgaccgccagggacaccgcacccggagtcggggaccggaaacccccggccactgcgctgcctagcgcttttttctctgggcccttaggccctggactttcgaccgctgagggcacaggaagtggtggcacgctgctggcagatgcctcgcaagccctggtgtggtgggtgctggaggcacccgcaggcaccccggtggcatggtgaccttcgagcgggcacggacagatgggcctcaccctgggccatctgcttcctcccccagctctgtttgaaaggggacgcccaccggcaggtggtgggtttggcctcagtggaaatgcagtgagagccaaggccttttgcgataacatggagttatgggcaggggcctgtccctgacttgggccttaaggttagggccccactcccagcttcatctgcttgcctgaggttctgggggatagtgcacctgaacacctccctttctgctttcagaggtccccatagccggggaagaagtactgggtctggggggaccccatgtggtgctgggttctatcttttgttgtgacatgccagtctgacttccttctgccttttcccaacccgttcttatttctttcctctcaaggctgagttctctgtgaactaattaggtgacagaaaaaactcattaacgtggatctgagtaaatggcctgaatcaccgctgtggctggggactaggagatggcatttgtgcgagccctgggccccaaagacaggagatgaccaatttttcctcttagatctgaagagggtggaggcgggagagacatcgttgctgcagcttcactgtccttggaggaagtaaagacattcctgatttgctccaagcttaccttcccccagctccttctggagggcgacaagcctcgtgggccggccacaggagggtgggggcacatctgcttccg

SEQ ID NO: 128350 - DNA, 1938 bp, Homo sapiens
gtataggccttcaacaggagcccgcttccggcttggcactcacctgcagtgagcgctccctgacagcttgggtttcctggctgagtcctagaaagagggatgcaggagaacgagggcctcagtccaaatggggacactgggcacgtggagcgcaggatgttgtaccaagctagccaggagccccaaaggagcccgggatctttccaggacctgctggtcccagtcgttgtgtgcaggtgagggcccggcacaggggaggagcaggggcttggggagggcctgggatccctgctggcagttcccagatggggggggggggctcccgcctggaagtggaagtggacctgactattaggtgtgtgtgccatatggctactattatgtgtgccggagctgggctttgtcagctgggtgacttactcaggtttctccatcgttttcccactagggctttttttttttttttttttttttttaaacagttacttcgagcattccagccggcctggcctggccagcagagcgttctcactgtcacccttaccccactcactttcattcagttcacagattgcctgccctgggctgtgggcttggtgacatcctaaagggactaaggtaaagagatgtgggggtttcttgtttgggtcaagcctcagctagacagagaaggggccacagctgtgactgcagttgggtggcagctcagagggagagtaagacggtgcatgtggccgggtacagtggctcacgcctgtaatcccaacattttgggagaccaaggcgggcggatcacgaggtcaggagatcgagaccatcctggttaacatggtgaaacccccgtctctactaaaaatacgaaaaattagccgggcgtggtggcgggcacctgtagtcccagctactcgggaggctgaggcaggagaatggtgtgaatctgggaggcagagcttgcagtgagctgagatcgcaccactgcactccagcctgggcaacagagcaagactccgtctcaaaaaaaaacaaaaacaaaacaaaacaaaacggcatacgccctggcatcccacagccctcagcccttaggcacacctggggttttagtgtttgtgtctgtttctgttcgtcctgtgacttgatcctggaggactggcatgatggtccccatgtttgtgccagggtgctctcttgagctttccttactgttcctgggtgggcactccctggccgggccctgcattccgccgtgggccctgctgcaccacacactgctgaggttcccttcaaagatgaggactgggggggtctgggatgggtgccggggacatgcatctggagccagcccaggcccctctggcaattcgttggtttagggactgagtgtctcatgggggcctggttgcttatgcaggactttgctcgcaagagttctagcaattctgaaaaagagcataaccatgtgggtgctagtagccagggaaagcttcatttgttccagatacattcatttagctcctactgtgcggcccagttgcatctagcacagtgaaaagcagacaatcaaaggagagacagggagcgaaggggccagaaggtctgggcttggtgcacctggagagaacgactcagcctgtaggaggtgccagagaggcactgggagtccagaaggagacctagattttcagaagaccagggcagggcaaaggtcagagacttgggaaacctcatcacgacttctttcttccgggtcagaagccagaacaggaagacctgtccagcctgatctcaggctgcatggcctcgtgggaacccctggtaccctgctccatccagggtctcagctctggctctccccagcagtggtaccccacagatgaagcagtccttgtccctatgatgccacctggcaatcttcctgtatcatttatttctttcctcaaa

SEQ ID NO: 128351 - DNA, 1036 bp, Homo sapiens
ccggtgtcctgcccgtgagcaaagccccagagtgtgggcgcctccctccctgtgcccaccacagccaagaggccatagtcccataggcctggctgagacacacgcctgggtagcagtacagaggctgggaggaagtgagcagggaacctggcatctgccgcagaggaggggcccaggataggccgaacctcccagggagccagttcaacggggcaggaagccagggtctcgggaggccgggagagaatcatctcccaccccaggcctcggggtgagagagaatctgcctcccgtccctctgttcctggaaggcaaaggtgggccggtgcgcctgggtgaggggagccatgcgggggtgagggctggcagaggtgagttctgaacctgggggcagtggtgccatgagcccttccttcccaggtgaccccaaaacttgagcaagggtaaaataaagcagaggtgcagatgacagcctgcttaggctgggagtggggcgtgtgggtgtcctcgaggtgcagtccctttgctctgagtgggagacgggcctggcaccaagggaaaatcagctgactgaaaagcaaagcatctcgactcaggagcatcctcagagcatgtgctgagggtggcgagcaggtttctgcgcagtggcctggggcacgaggacagcggcccagagctccggtgagcctgcagcccagtaggtactgctagacatggcttcaccgcagtagtgcttttattattaaaatcactggcgtagtatgttttcaaactactcaaacgcgccaccccacactccagcactttgtgtttgtgctgcaaatgtcacaagattgacagcttctgctgtgggtgacaggagttacaggttctaagccagggacagcaggaccagatctgctatctcagaaagaatggtagtgtggttgctcacgcaagtaatcccagcactttgagaagccaaggcaggaggatcacttgagcctaaaagagttcaagaccagcctaggcaacatagtgatacctcgtctctaca

SEQ ID NO: 128352 - DNA, 1006 bp, Homo sapiens
gtggtgggtggccccaccctgccagggtgcgctgttcttacttgcaggagtctgccccccaaccaggtgcccagcccttgggtctgttctgagacctgctggagtggcctctaacctgggcctggtatttgggccacaggggcactaggccaggtgtggcttggtggggggacaataaacctgctggagcaggaagaggaggaaggacacagggccgaaaccagggggactgagcccacagccctcagagtcctgttctgaagaccatccttactctgcttcactcaagaagaaccttcccactgcctcctggggaactaggggtgagggttgggggtcccgtggaggaagctgctgtcctctggcctgggcttggggagggcatcataggtgacacaggcagcagtggttgggacaggtgtgtgtgccaccctggccctgacggggcggctctgtcttccgcagactcgtttgtgaacagccaggagtggacgctgagccgctccgtaccggagcttaaagtggtgagtgtggcccatgggcagcaccggcggcctggagctgggggggcgaggctgggtgccgcgggcctgggccttgcttctccggcttctgtccccttctctgctcagcttggccctctctgccctctctcctccccttcagccctggcctttctccctcctgctgcttctttgcttttcctgctgggtcttctccctcgtgccctctgccctctgacccactcaccccttcctctcccgcagggcatagtggggaacctgtctagcgggaagtcagccctggtgcaccgctatctgacggggacctatgtccaggaggagtcccctgaaggtgagcgtcacaggcccagcctgggccctgaggccggccactcctccagctcctgcccacagggtctgggtggggggtctccagcccccttccagtcctcttccctcccgcatgggaagctgtagatttcttcttggcccctggattcttt

SEQ ID NO: 128353 - DNA, 1030 bp, Homo sapiens
agcgaggtgcccatggtgcttgtgggcacgcagggtgaggcggggccctgcaggagctggcagagagcaggaagtcccgggcaacgatgcatgggggcaggggtgggcaggtgtgagaaagcccccaagcccctactcttttcccagtgctgactgggaccctcagcactctccgtgctgctcgtgtctgagggcttttgcccccactgaaacctgctgtccctgtgactagcaggtctgtgtttttttagatgaataaacgtgctcagagcttaagtgcttgctggtttgcactcagtgaggccatggaagggttgaaatgagacccaggcacccgcgttcttggtgctctgtgtgttccactcaccaggccctttgcacacctgcccttgggccaaatgccccccaccacactaccccagcttctccgaaagctgaatgactcccgccctcccacctccaacagatgccatcagcgctgcgaatccccgggttatcgacgacagcagagcccgcaagctctccacagatctgaagcggtgcacctactatgagacgtgcgcgacctacgggctcaatgtggagcgtgtcttccaggacggtaactcgggtgccgggtgggagtcactggcagccgcggccccagtgctggcgataggaaggctcccagtgagagcaaggctgtgtgtctggggggaggtgctaagccaggcttttcccttctctccagtgggtataattgactctgctgtcccctgcagtggcccagaaggtagtggccttgcgaaagaagcagcaactggccatcgggccctgcaagtcactgcccaactcgcccagccactcggccgtgtccgccgcctccatcccggccgtgcacatcaaccaggttcggcctgtgccccgccctgcccttcctgtccccaccatgtctgtcttgcctctgtgcgtcctgccacttctgctggcctcctgctcacacctgtccaccttcctctggcctcccagccttgcatgttgcttggaaaca

SEQ ID NO: 128354 - DNA, 1005 bp, Homo sapiens
cctgggggctgttgtgctggcccggctgagggtggcctctggctctcaggccccagggcctgctgtctctccactcccaatgtgcgacacacagtgcccatccaaaccctaatcctccagccgggcttggctggatgttccaggagtcttgggccagacaaaggtgggtgaacccccgtgtgggttgtcacgagagcgcccgcccctccgcgtcactccatgcgcctctttccgagagcagggcttggctctcagcctgggcccgagtgcggccagccaggccagatctccggaccctgcccggacagagctggcacttccaagccctgctcactcatcctcgcctctgcctgcccagctcacttctccctcccggctgcctgcctctgtcccgagcccgccacctgccctcgcggccatccatgctaacagagactctgtgctgacggtccgccacacattgcagctgcccggccctgaccctgcctaaatgtgcagcttctcctttctatccatggccattgagacattagagcgtggggggggccgcctgctcgagcccacacctgctgctgctgctgctgcgggacccttaggtgcctctgtccacggtgcctactgccagggcctgggcaccctgctccctggcatcgtgcctcagtcatccgctgcctcagttccattcttaatctccccttcccctcgttggcaagctctgtagcaaccccagggcaccccctgcctttccctgccctgctaccctctcctccgcccacgcccagtccccggcctcctcccttgcgccccgtgcttcctgccatcctgtgctctctgctgcctgcctcgactctgctgccctccctcctggctgctcacggcacggccttccctctggcgcttccattctctccatcctcacagcggcgaccttatattttccttccattgtttctgtggtgacctcacttgcaccattgtccctgagacggcctcaagacgcgtccg

SEQ ID NO: 128355 - DNA, 1050 bp, Homo sapiens
aggggcgggggagtccaagcccgcccggcccggctgctcctggggggcgctttcctgcccctcccctcctctgctccttcctgcatggacctctgccgttcctgctcctgctccggaagccgccgccgccgccgcgcttgccttgccccctctttttggcctccccctatttcctaggatccgcattcgggtggactctgccccaggagcttgacagggtgcagggcctcttctggcctctctcctctctctgtccatccactgtgccccttgggccacgccgacgcgctcggtgccacgtgccgtgtggtgtctgtgccgcagacgggccatctgcccgctcacttgtggactttgcgctcccggttgtcgcgccctgtgctcccgaccagcagccccaccgtccacctcctcgcccccgcttctcttacgcccccgccccgggcgtgctcctcgcgccctcggcctctctgtccttgctcttttgtaaggggcgggcccggctcagtgacctgtgctgctctgtatggtgccgtgtgtaagaataaacccgttggaatactcgtggtctcagttccttcccgtcccgccgccccggcccgacccactgctagggctgcccaggaggagggaggcaggagggaggccgggaagtccaggtgggcagctctcggcagaccctgggcctctttaacacgcctcttgttttctcttccagtctcggaagggtgctgacctggaccgggagaagaaggctgccgagtgcaaggtggacagcatcgggagcggccgcgccatccccatcaagcaggtcagcgcctcccttcccgtgtgctccagggctcagaatgaggcccaggaatgtggcgcttcccagggcctcttctcaggcctctgtgatgggggagatggcatcagaggccagcaccaccctcctaggcggagtccttaacaagggactggctctccagtgagaagccaccttctctgcgccgccaccttcaggccacgagctctgcctgtaccttctgatcaccaccggagggcagc

SEQ ID NO: 128356 - DNA, 1060 bp, Homo sapiens
gggtgaggggagtcgggacgggggcggggagccgggtccatccctcacacttggttatttctttggtttgtgtgctgggggcggggcggggggtattggggatgactccaaggcatctccagagcctgagggacttagagccttcgagcacgctagtcccatggctggtcgcagcgggagggggaacagctgactgcttctgagctctcagtgcacctggcccctggccagtgacaggaataccacacccagaggcaggtcaccaaggcccagcctacctggaagactccttcgcagaccaagaggcagggcccgcttgccttgtggaaggtccccttagtgccgctagttttcagaaaccccttttgaggatagggtctcccaggccaagggggccaggtagcaggatgtgtctgcacatggccatgtacttcaactcccagcccgcatgctcgcacctccagcaatggcatttggccctggtgtggccggaggaggagcagcaagaatgtgaaacgtgctggaaagtcagcaattgatgtcacagctgctggggccgctggaagtgggtgccctttctggcctccccctcacctcctgttggggagggagaggtccaggaaacgggaatctcttatcctaatggcatccatctaggagttagccttctattaggaagaacttagaggaggaaggtgcagttgaatccagtatttaccccccacccttgggcgtcaggaccacgagctgcagactagggactgccgtttccttgtgcctgcatctcttagtccctgtgttgttggctgtcttctggcggggccctccattcctaaaggagatgccatcgcggggcctcttccctctctgggcgccccctcctctaagtatgggcagagtccgctttttcaagtctccctgctgggggtgctgccccttccgctctcccagctgagggtgagccccacactcagcccccagtttgtggatctacctgtgcccctcttccccctatgctatttttgccttgaagtctccagggagcactgcctcttctcag

SEQ ID NO: 128357 - DNA, 1050 bp, Homo sapiens
caggaacttagcaaaatctctgctgttttgacccttggagcctcctggggaggagcatcactgatggccactatctacacccctgagcgtctactcctggccgtctatacccctgactgtctacacctccgatcatctacacccgacggtctacacccctgacaggcttctcctgtcgaggtggctccacacactggggagggaagacgcccacctgccggaacagcggtccagctgcttcctgatggatgatgggggagagccgagttctggggaaggactggtctaaggggccttcccaagttcaccgataggtccttaaaggctgctttgctcaaagtggcccaggagaagcggggaggggggagggcattgcctgacgacatcgtgacctcctcatgccctatgacctagggggctggctcctggtttctgatcagacctctgttctcaggggatcctgctaaagcggagcggcaagtccctgaacaaggagtggaagaagaagtatgtgacgctctgtgacaacgggctgctcacctatcaccccagcctgcatgtgagtctgggaggaggagcctcctgggggagtatggggagggggtggagggaggataacagaatgcgggtagcagacaggctccaggatggacgggaagcagaccttagtgatttcaaatggctcatccctggagaaggaacctcacactggcagcttgggacatgcacaagacccggctggcccctcccttgccctctgggcggtcaagctgtatatccgactttccagttgtttaaggtgggggattcagccacttccacagaatttctggtcagggatgccgatgttgcccagcagttgtgttgagctgggcagtgccagtggggagctgtgggcttctgggcctgggatggtggaggaccagggctgttgagaatgggctagagcctcggacagtcctcctgggaggagagcgagggtggccttgtctgtggttaggagggtctggtggccacgtggcctgtgtcccagctggggggtgttgtggt

SEQ ID NO: 128358 - DNA, 1043 bp, Homo sapiens
ggccccatgctcttccagggtccgtccttccacacccgtttccctcgcttccagagcccctggctcccgattgctttcccccaagacttcagtatccccagtgttgtcctagaccattggatctcatgttccctgggcccagtaacagctgccctgctggtgccattcctgtgccctgtcccagcagtcagcgcttggcagcacaggtctgcagctgggtgagtcacctccctagagggcctgtgcttgtcacagtgaggggaggatgtgacagacttagtggacaggtggttggggatacgacatccagtcccctggaatggatgggagagaccccaaacaataaagaattgtcccactcacaaggctgatgggactccgctgagaaagcccaggttagagggaaggaaggcgcaatgatgcctccaggtgtggtccttgttggaggcaaggcacctgaaccaggtgtgctgggcccactctcgcagaaacaccgtggaccagcccgaaggcaggggagtggccagggggaggggcctgacacaactgagatgtaccctatgcagtggatgtctctgcatcaggtcccaggtcctcagcagctgtgaagtagagattattgtccccattttaatgaggaaacagaggcttggcatagctaacaaacttgtctgtaaattccacagtaagtgggagacctagggttcaacctaactgtgtctgacttgaagagcaatcttctttcctctaagccaccctgagctcagaaaggaagcctgtgaggtggatggagggaaggaaggaagctaagaaggagaaggccggccaccacccatcatggggctgtgccagtgggggaccttgagcctgccgtggggttgtactggcctgatggcaggtcacatgcagtcttcagtgctctgcccggagagcgggtcagagctgcggggagccctctggcaccggcccccaggagcccctttggtcagcttggggtttctcttatcattccaaaaatgaggagcaggcccaagtgagtccct

SEQ ID NO: 128359 - DNA, 1052 bp, Homo sapiens
cccaacagagagcctgccaatggcaccaacccctctgctgagctgcaccgtagtcctagcctcctataaggcccaggaagagggcagaggggccagaaggactccatggcccaaagaccctcctccctgcaggcactgtgggaacagacacagagatggagaagcagggacatgctgagaggacgaagccaaggaaattagggaggagagtcaaagggatcaaggagagttggggatttgagctgcagcagagagggatgagggatttagccctctgccctaaggtgccattgaaaagggacaggacccttcggaggtgcctgtgaggagaggggagcaggacctctccctcctccagatccctgcctcctagtgccagcccctcacacgccttcatcctgaaacaggaagaggacggcaccaagttgggggtgctggatgaaagagacgaggggtgatctgtgagtcccatgtaaactttgtacattggaatatttatgtttgtgtacatatttgatgtgtgtgtgtatgatgagccaataaaccagactgtgtgcgtggccttgtttcccccttttacatcgctgccctcccaagcgtgtccctcagctctgctctctccttatccctttcttctcattgtttgccatgttctaagattttcttccctctgttcgcctgggtcccaggtggtcattcctcatccttctatgcgcattgctttctttcggccttcccttggcagggtgtggttgagttttcagcagcacagcacagggcccctgaagagaggacacagagttctttgcttcctactgggtgctgcctcccccacctttaggcagcttttttttttttttttttttttgagacagagtctcttgctctgtcgcccaggctggagtgcagtggcgagatctcggctcagtgcaacctccacctcccgagttcaagcgattctcctgcctcagcctcccgagtagctgggattacaggcgcccaccaccacgcccagcttatttttgtatttttagtagagatgggttttttcc

SEQ ID NO: 128360 - DNA, 1047 bp, Homo sapiens
tttcagaatgccctcagatctcacattagctggagaggaattcatatgcagtaggaatctataggatcttaaaaatctataggatgcttaaagaaattaaggacaatcctaataccattagtaaatcctctattttaattttttaaaacatagtttgtagtaaataataacaaaaagaataacaaaggcttgtacaaactcagcccaatattacaatatgttaaacagtgctaaaaaggcagaaactagacttcgaggcttgaaggataaaatcagttagtacaactccaagcacccagggggtgtccaataaatctaaattgatgatgattgagatgaggctcccaggttcccgatctggcagggccctcctgagatcgtatcatccatccctctgtcttcagacagatccataaaatgaagcccacatgagccggccaccctcagtgctgcttttaaagccatacaaggagcacaggttcacaacctctcttggttacttgatcccagtgggatgctgagcggcaggggcaagagtttctctctgagcctttataatcatgacattgaagactctgataagcaactcttgaaatgaaatggggtgggacaatagaagaaagcaacgagaggagaaaatacagccacatgcctcagaggagagtctgggacaatgaggaagaccgacaaggagtgggagagagaaggaaaggccaaggcaggtggaaagaagactggggaaggaaagaagtggggtagagaaatagcagaaaaattaaatgatgagtcagataaaataaaagggctgaaaagtctagagaagggagagagaaaatatgggaaaaatcaggggaaagaaagcaaaaggtactttttaagaaatgcctcatctacctttccccccagaatactgatacatttgaagcaaagcaaaacattttggccctgccatttgctctctgctgccccaagagaaggagcactgtagactgcagtagccaaagacacaggcagagaaagagaatgagcaaaacagtagtgcaatcc

SEQ ID NO: 128361 - DNA, 1055 bp, Homo sapiens
agctttcttctggctagacagattcaggtgttctgagttccaaagcttatacaatttgctgggccctatttaagaaaaataggcaccacttgcaagtgtggggactctgatgcttcaacatctttagtatcaggatggaaccgcttctgctcaaccattcattgcatccagcttagaggtggaaatgaccccagtaggcctgggagctgacttgaacagagacaagaagggaatgcaagagtgcttttgtcctttgccagcagagataattcttgattatcagttatggggccctttctgacattgtccaaagggttaatcactctttcagaccccaaaggctgccatggggcctgtcttcctattcttttctcctttcgccctggcattttgcttttggggattcagctgttgttttcttttttgtacctggttggatcaggaagacccagtaactgaagtcagaatagcatcttctaagggggatcataaggaacagatagagcagcaactggaaggtgggagaaaatgtccacaagataaaagggcccagggcgggagcctggaagccagcaggatgatcttaagaaaaaaagattagtatgattgtcagaataggatggtcctaaggcagaaaaaagagtaagacaggccatcaaagagatgactttggaggagataggacctgaaggtgtaaccagacacatatagaaagagatgagctgaagagagaggatggaggggggatcccttggtagcggggacttaggggcatatgcccaaactgtgggacaacaagcaatttgtcccaccctttcaggtctgctcagttcttattttgacctatatgtataatgggagctcttttctggatcatatagtatattggctataaaaacagacattgagaaagagaggaataagcagagaaaaaacagaagagaaatactgatgaaacaagaatagaggaaaggaccaggggatgagttgtatactggaatatacaaagagaacatgaagaaggagagggttctctgctggaaaaggaactctgg

SEQ ID NO: 128362 - DNA, 1016 bp, Homo sapiens
tgccactcccggctcccagacctagtggactaggggacctgctggtgttggggaaggtagtatgccctgtgatctgcacctcctcccccagccctaggcccttggcctgaccttacgcagtcatctccagccctgattcctgctgctgacctgttgcctggctctggcccatttccttgctctcaggctccccggatatccacatcatggccccactcatccgctccatcctcctggtgggcccctctggcatggggaagaagatgctggtcaaggcagtgtgcacagaaactggcgccaacctgttcgacctgtcgccggaaaacctgctgggcaaatatcctggcaggaatggggcacagatgatggtgcatatagtctttaaggtccggagcccccagcttttggcatttgcggttctcagacctgtggcaacaaaggaggggggctttgaggtcacgtcacccatcagcctactgggtatgatttcaggtgctgaactggtgaggtctccctaccaaccgggctaggagcttgggttccccctgcagcccctgtggtgggggaatgaagggaaaagggaggacacagagcagtttcttttcatggtaggatgagactgaatatgcagctcccccatggggggcagtgactcagtttaccctgaggtgtgagatatgtgcagcagcaggctgggaggtgggacttccaggtgtggggagtggagacggggctccaaggtcagcccctgctcaaggccggccctcatcctgccttctgaccagcagggacatgacccttctccagagacatctaacatctgatttctacattctgacccatccaggtagcccgactcctacagccctctgtgatttggattggaaatgctgagaagaatttctataagaagacccccaaagaagacaaggaggtgagggagcatggatgtgaaggccgtgtgggcaggtagcgtgagctggggctaagctggaaggcctgggcttgttccagtc

SEQ ID NO: 128363 - DNA, 1098 bp, Homo sapiens
ccggcccctggcagcagctcacctgtggagccatgaagggcactgtgtagagcatcctggaccccatgttcccacccccagctggaaggggctgcaggggtggaccccagagggaggaggctataaagccagcaggagcacccacactgccccccacaagcctctggcagccacggggagacaccaggggctgtgttgggtggggacacactccccaaaccagggctttccaggccatgtgcctgtgtgcacacacgtgtgcctggccaaagtgagtaggcctggctccttgaatctgtctatcccctgttctctgtcctctcacccagctggtctccactgacttaggaaaggcaggccgagcctggaggggtggccggagcatgctccctgggggaagggctttgccccaggcagatcctttggaggcctggctgccagaaggagctgaggagggggctgggctggggactggagggattggagggaagggagccttcccaggtctggtgacatcttggcaggctgggaggctaccactggaggcttggagccttgggaggaaggaggggccaggggctgctgtgtgggagtggaggtcagagacttgttggggggccagagggctggacccccaggagacgagagcaggccgaaagaggcaggggttggcttcagcagggaggggtccgtgcacggcagtgggtgaggaatgagcccggccgcccgggcctatcaacagtgtgagctcagcgttttcagtaattgtctctgcgcagagtgatatttaaaatacatttgggagccaatgaggcgggaaagtggctgcgagagcggctgccaactcggccgcggggcgggggtgcaggcgggggctggggccggaggctccaggggagggtgtgctggggaaatcgggcaggggacagcctggatgcatctagcagactcattattagagtaatttacacagacgaattcggctccaaacacagtttctcccgatgcaggcatgcccgttgttccgtgtgggtgtgtgtgtgaggccttgtgtgagcgtggtgttggggaaggagtgggtacaggcgtgtgtgcccg

SEQ ID NO: 128364 - DNA, 2619 bp, Homo sapiens
ttgcccagggtatagggaggggctgtatctggctgagttccagccagccgcccccaccccctggcaggaattccagcctaggtggctcctacctgcttcttgaacccagaacaggtgcctgggatagaaataggaagttacctagtagggtttattttgaagcgggatgccagtcacacccgggtggcttccatttttcctgtagcatttacaagagcagctggacttagatctctcacctttggagtacatgatgaagtgctacccagagatcaaggagaaggaagaaatgaggaagatcattgggcgatacggtctcactgggaaacaacaggtcagtaaaggagggtgtggtgaggatgccagatagctggcagactgtggctgggtgggtcaggggatactgtcctggcagcctgggtttggaagctgtccaaaccagagtctcctccatttgactcccctaagaacctactaccttttctttactctaggttgttatgtaatggagcattttgagggggcaaggatagcgtgccagtctctgacatgcccttgtgccatagtgcttgagggcaaaggaacttgtaatctagaaaacaaatttctggattcagatctggaaggatccaattcattgccaagagagcgagaggtgtgggcttagtaatggcaagggcttcaggtttccggatgagtctctttcaggcctcaagagactagtgggtctctctgagcctcactttttataaatggcgatgctaatggaggagtcagggagaaatgagggagagatgagctgtgctgtttggcggggataatgccaagttatatgtaggtcacggttctactcaggtgagcccaatccggaacttgtcagacgggcagaagtgccgagtgtgtctggcctggctggcctggcagaacccccacatgctcttcctggatgaacccaccaatcacctggatatcgagaccatcgacgccctggcagatgccatcaatgagtttgagggtggtatgatgctggtcagccatgacttcagactcattcagcaggtgaggccctggccagggggtgaggcacagcagagcttctagggggttgggtagggtagtcatggcatgtggagggtgcataatacccgcctactgaattaagagaaggggctcagagtgtagacacaggtggtgaggaccagttcttatgcctctttggggctacttagaaagccttaactgaaacacttcatttcttcagtagctatctggagatgtcaaccaacttagcattttgggcccaaatgggaaagagagttgggtagaaaacggtgcttttactactgtcccaagattcttcagtccaaaaatagtattctaaggaggattttgattagacagctaccacagtcatttgagaaaaagttgttgctcattcctctgaagctctggggaagatgagaggtggagaaaagaaggctgagagtgaagcctctgaatagatctaggccctgccagggagctgacaataggagtgacacagcagttcctggcttggaaggctccaaacctgatgatggtacccttgggttagaacatcccaaataacttagaagtagtgagacagtgagttggatatgggtttggggggcggagttttcttcctagacgcccctcaggacagtctgctgggcagaggcagggacagtgactagcccaggattaagtccaggttttgctttctaggttgcacaggaaatttgggtctgtgagaagcagacaatcaccaagtggcctggagacatcctggcttacaaggagcacctcaagtccaagctggtggatgaggagccccagctcaccaagaggacccacaacgtgtgagccctctacctgggttcgggtcaggagctccatctgggaactaacagctgctaacctgaccagccgctcaggacaggaccctggggctacactcctgcattgctgcaatactgctcccccagcctctcccctgcccctcaacctgccttagctgcactctcttacctacagctggacagtacctgtctgtttcctgtcctccttccagttacatctgtccatgtctggactcggctggccgttccctccagccccttgctggttatcttactctgagtgtgatgcagtcagaggcacctgcgggttagcccaggggcccaagccctggatttggcctgcggaggagcttaggatcctcgttttctgggttttggtgatgttggaggagtaccccccagcccaccgccccgattcctttttgcttctggtttggagctccggaccaggaccttcgtcctggtcagtttttaaataattatttagcagtgtaacttttagacctgcgtgacatctacaaagcgcccaataaagaaagaggaagccacggtccctaccttccttctcgggtctctggggccttctcctccctgcagtgccaacatgcactgcccacagcaggagctggatccagcgtcagtgtgtcgatgggaactgaagactagtccataggagctggaagaactttgtccctttacttctgatttgaaattgtaccttttctcaggcctgtgattc

SEQ ID NO: 128365 - DNA, 2763 bp, Homo sapiens
cccaaagtgctgggattacaggcgtgagccaccgcacccggcctcttttttctcgagatggggtctgtctctgtcacccaggctggagtccagtggcgtgatattggctcactgcaacttctgcctcccaggttcaagcgatcctcccacctcaccctcccaagtagctgagaccacaggcacatgccaccatacccagctaatttttatatttttagtagagacggggtttcgccatgttggctaggctgctgtcaaactcctggcctcaagtgatccacccacctcagcctcccaaagtgctggaattacaggtgtgagccactgcacctggccacagttacaattttaataatcattctgtaggttgcttttttaaatttagtatattttggactgctttccatgtgagtatatataaatcaatcacaatcttttcagtcactgcatagtatttcgttatgtgtttatcctgtaacttgttaggccctttctggtggatatttagcttgagtccagtttttgtttgcagatagaaaccatggtagtccacttatgcagggtttgtcagcttctaaatctgaatggtctgttttcccctctggagacagctcttgcagtcttttgtggggcttcagcctctagggaacggggaaggaataggaggtggtattggaaggctctgagcctcgtgacgtccgtatgaccgtgattttcaggactattcccagtgccacaggtgtctttctagctaacctaaggatttgcgctggagcctggccctggctgggctgagcgaggggcatagaattgaaaagactccgatttgatgttaggatatgcttctgtaatgcacgtcctctcttcttactgcacagccttagagccagggccaagttagtgccatccctcatccccctaaactctgagtgagaatccaggattgaaacccaggttaaagctgcctgccttacctggcacatttccatgcagggtaattatgatcagtacgtgaagacgcggctagagctggaggagaaccagatgaagaggtttcactgggagcaagatcagattgcacacatgaaggtagggagactgcagagtcaggctcatggcctcctgtctgaaagaagcagggggctcggatgagggcatttcgagaagcggtagtgatggaggatgtcgggaagaagttacgatcaacatttttaccctggattgaagatgaattgttgagcgcctgcacatactccaagctctctttggtcttttttagaactacattgcgaggtttggtcatggcagtgccaagctggcccggcaggcccagagcaaggagaagacgctacagaaaatgatggcatcaggactgacagagagggtcgtgagcgataaggtggggtgtgattgggtggggtgtgattgggtggggttgggtggcctaaggtgaggtggataagaaaggagccaacttgataaatgccctcttttcttcctagacactgtcattttatttcccaccatgtggcaagatccctccacctgtcattatggtgcaaaatgtgagcttcaagtatacaaaagatggggtaagttcagggcagggcatgggtggctggggtgtatcttagggtgagtggcagctcatgggagttgctcctgttctgtgctgaccacacctgctagcccacgtgctctgggggattttcaggtgtggcagctggggtgcctcatccaaggctgctcgcgggcctttcttcgtgtatatggaaagaagactactcagctgggttggtgggcggaggcagtgggcgaggcggggtctgctatgagtgcttcctcccgctactctcccttcctcctctcttggtgactgggaattcagcgggcttggtctgctggtcatagcagatctgtattctagccttgtgtccacatctctctcatccccacctcagccttgcatctacaataatctagaatttggaattgaccttgacacacgagtggctctggtagggcccaatggagcagggaagtcaactcttctgaagctgctaactggagaggtatggtgccaaggtgggcgtggatccctctaagattaggccttgcgatggttaaggaagaggggagtgatgcaggggctactactttgggagggcctgagtaccctggtggtgagtgagccatctggaggggtggagcagcagccaggagagggggaatgtctggttggacagtgctgaggctgggggctgttttcctgggacagggataggtagggaggagtcttagagtgtgtgtgtgaatacatgtatgtgtttaagcacgtttctattttctttttttttttttgaggtggagtctcgctctgttgcccaggctggagtgcaatgtgcgatctcagctcaccgcaaccttcatcccccgagttcaagcaattctcctgcctcagcctcccaagtagctgggattacaggcacacgccacagctaatttttttgtattttagtagagatggggtttcaccatgttcattaggctggtcttgaactcctgacctcatgatctgcccacctcggcctcccaaagtgctgggattacaggcgtgagccaccgcgtctggcccatgtttctattttcaatcagagcatttagaatataggaacatctgtgcatttagggatgctgcaggttctcaagtaatgtcatttcattaatattgatgaaaaatagaaatgattcccagctggggcc

SEQ ID NO: 128366 - DNA, 3440 bp, Homo sapiens
tacctttttatgttgtatctcctgtttctttgtctaaattgtttcatctttgagtgcaaggaccctgtcttgggttttttttatgacttgcttctcaggtagacactaagtaaatgtttgaagaggaaaggagaattagtctgcaagttgtaacagataggcgttcagaaaagggggacttagaaagcaattagaaagagcaataaagtcaggctgtggggaagttttattcctggccacagtagtggaggacagaagttaagagtgatgggagtaagtaaacagatatgggaggacaaaacaaaggaaagcagggtgtcggggcagctctgtgtcattgtgcactctgtaaagtttgggaaacatctgagtgctcagcaggattggagcctggtccttcaggacgttgacctttgtggagagccgagtctgtctcacgccatcttcccaaactgcttttctatccgcagaagtagatttgctgaccaaggagctagaggactttgagatgaagaaagctgctgctcgagctgtcactggcgtcctggcctctcaccccaacagtactgatgttcacatcatcaacctctcacttacctttcatggtcaagagctgctcagtgacaccaaactggaattaaactcaggccgtcgttatggcctcattggtttaaatggaattggtgaggccttggaaggggaggtgggaggtatctctccttagctcatctgtcactcacaagcatttatttagcatcaactgtgttcagagcaaagcatttagaatagggatgggagaccagattatgtccaggggaaaggaactagcaacgcagagcagtatgtgttatgtacaggttgagtatcccttatctgaaatgcttggaaccagaagtgtttcggatcttggaatatttgcattatacttaccggctgagcatccctaatccaaaaacctgaaattctccagtgagcatttcctttaagcatcatgtgagcacttaaaaggttttggattttggagcattttggattttcagattagggtgcgtccaccctgtaccacatgattagttacagcaggtgctggagaagttggtcaggggcgtgtgaagctgtggtaagtgaaaaaagcttcagataaggggtggggcaagaattggaggaaagttagaaaggaatcccaagaatgggggctggcaagatttgaacgaatgaagggaagaaaggtcctcaaaaaaaaaaaaatggatgaggtcccagtttgactggggtggaagaactagtggtgaagagggataggggagttcactgtaccaagcgtctgctgctctcccctctcaggaaagtccatgctgctctctgctattgggaagcgtgaagtgcccatccctgagcacatcgacatctaccatctgactcgagagatgccccctagtgacaagacacccttgcattgtgtgatggaagtcgacacagagcgggccatgctggagaaagaggcagagcggctggctcatgaggatggtagggctccagacctgggcataggggtgggcgtcctcccagaaaggcccccaggagcctcatggccatacactgtccacagcggagtgtgagaagctcatggagctctacgagcgcctggaggagctggatgccgacaaggcagagatgagggcctcgcggatcttgcatggactgggtttcacacctgccatgcagcgcaagaagctaaaagacttcagtgggggctggaggatgagggttgcccttgccaggtgagtccctccctccttccctacccccataactcccccatctctccagtgtttagtgttcactccagtggaactgtttggaacaggagtcagtggtaagtgtcaaatgagacatggacatctgcagtgtggagggggttgttgtgtatgggctagagagagagcttcctggctgaagtggtagagtgactcagttttctattggattcttagcacccagcacagagtttagagatcctaggggtagtcctaggtaaaacggtggagtaggtctgtttctgtcctcccaccaggattccctttccaccctttttgtactctagtcctgctaattccagctgtaaagataaaatgttagacggctattatgatagctgtcgttcttattctcttgtggcctggactcaaagtgagtttccatagaccagcattcccccaataatccccccagagtcactaaacaggtaattccttgccccatcattctctgtgaagggaatttataagacttgatatacttctctagaaagttgcctgcatgtgccttagagtataagcacagtggttccacatgctagcaaggattagctgcctccggttcacccaaggagcttttaaaaacacagatttctggtttgggaaccagagctttagagtctatccctcgctagactctggccaccccacaagataggtctatcttcagaccttcagataggtctaatttgttttagcagtttatttcctctgtatttttttgtcttctccgtagtctccaacttcagtgcacaaggctcataaactcataaagacttctacagccttgcctcgaactgtccttatatgcttctgagccccgtattctactcttcaatctcttctcttcgactcttgtttctgtcctgcttctccttttccctctgaggtatagagcctaaaattgatttcaagactcaagccaggagcctactcagaattgcatgtagcaggcaagtttgtcccgtcctgtgtcacatccattataattctgaggtgcttctgtctcctttaccgtccttcagagccctctttattcggcccttcatgctgctcctggatgagcctaccaaccacctggacctagatgcttgcgtgtggttggaagaagaactaaaaacgtaagagggtggaatgggggatgtgagcgggcaggtcccaaagggggaatctagaaaatggatgcccagaaactgcactgatgttagagcggtgagaaaggaactgaaggaaggacagagttcactttcttggacaagcagtgagcacctttagggctgttgaaggctggccttttattttgattgtttttctttagtttgaaatttatgagcttttttttttaaaaaaaatccttgttggttttgtccatatttcaaattcaagatcttaattaaagatatattttttttcttaattgtataaagctaaaaagaggtcttccatctaagatcatgatgcagtgacaaaggaaaatatagccaatatggtcatggtcctacagctaaagaactgaataagctggaatattgtaccaattttaaaagaaggcttttagtggtacgatgacttagtaccttctttcaaaaagtaaagcattttgttttttattgtgtctgtacc

SEQ ID NO: 128367 - DNA, 1052 bp, Homo sapiens
tgcggccggctcaccagccaatcacggcctcgggtggttctcggcgcgccgcgctgcctccttggaagtgtagtcctcaagttgcagcggccaagagtgagacccgccttgaggactactatgtatcccacagacctcgcggggccgcgtgacgccatcaggatgcgcgaggctcggggagggggcgggattagagtccaagagctctctgctagcgggcgcacttcgggcgctggaaactgcaaatcccagattgctcgttggataaaccggctgagccttcaggctttaccccacctctcgaaaatccattgagctgttgtggagttacgagtttttagagctacctaaccgactcaggcagcagggcgtgcaactacacttcccagcttgcctcagcgggagtagatcgaaacaatgggagaggagaggtgggagcgtgaggggaggactaaaatgaagggggcgctgggcagggaggggttccagaaagcggggcatcgctgcaaagatgttgccaacggaattccttcacgaaagaaagcgccttggtttcattaaaccttaattttagaggctggttcattgttaaacttttagaaggtgccagacgttgttttggaacctcggccgcttagcctccccgctgccgcattgttaggtttccactgaagccatgcaagtttggtggaaagggccccgagataaaaaggccccttggctgagatttgttttattattagttagccatgctaccgggcccgttactttccctttgagtctcactgtttaaaatctctcacatgacattttgggctggatggtttaaaaataaatacaatctctcaaggacttcacattacctacattgtaaactccaaatgtttagcctcaagtacaaggcaggccctttgtgatctttgttacttctccaggctcctgtgcagcagaagcctcaccatcagtgacgtttggggcagcaaaggaagctattgctccctttgagcatattctccaaatgtggcaccttttcgcccacagtccgtgactca

SEQ ID NO: 128368 - DNA, 1103 bp, Homo sapiens
cctgagtgggaggaggggttcctgtagccgttgcgtcttctcaaacacggggagcagagtagaaagaggctctggccccttcccttgtgcccaccgggcctgccgcagtggctcagcagccccttcagtagcccgcctgaggaccgatgccagaggcaggcattcttccggaaaggcccactgaggcaggctccggctcctctggttggggctgttgttttgatggatcgtgtgcttttcccttacctcttatcacttgctgtcatctgttgacttaggcccagtctgcagatgtgtgtagtgttcctttttgggttagctttggcagtattgagttttacttcctcctctttttagtggaagacagaccataatcccagtgtgagtgaaattgattgtttcatttattaccgttttggctgggggttagttccgacaccttcacagttgaagagcaggcagaaggagttgtgaagacaggacaatcttcttggggatgctggtcctggaagccagcgggcctcgctctgtctttggcctcattgaccccaggttctctggttaaaactgaaagcctactactggcctggtgcccatcaatccattgatccttgaggctgtgcccctggggcacccacctggcagggcctaccaccatgcgactgagctccctgttggctctgctgcggccagcgcttcccctcatcttagggctgtctctggggtgcagcctgagcctcctgcgggtttcctggatccagggggagggagaagatccctgtgtcgaggctgtaggggagcgaggagggccacagaatccagattccagagctcggctagaccaaagtgatgaagacttcaaaccccggattgtcccctactacagggaccccaacaagccctacaagaaggtgctcaggtgagagcaacatgtgtgcatagtccccagacactggccctgttttgggctggtgtaaatccttgcctctgcctttccattggcaatcggcgtcgggcgacttggagcaattctggcttattttccatcatggtttctttctgttttttccctccttctcaggtcttagaaagtctcacattca

SEQ ID NO: 128369 - DNA, 1078 bp, Homo sapiens
aaaacaaaggtgtgattatgaagaggatgtgagtcctttgggtgtaggagagaaaggctgttgagcttctatttcaagatacttttacctgtgcaaaaagcacattttccacctccttctcatggcatttgtgtaaggtgagtatgattcctattccatctgcattttagaggtgaagaataacgtacaagggattcagtgattagcaagggacccctcactaagtgttgatggagttaggacagagctcagctgtttgaatctcagagcccaggcagctggagctgggtaggatcctggagctggcactaatgtgaggtgcattccctccaacccaggctcagatccggaacctgaccgtgctgacccccgaaggggaggcagggctgagctggcccgttgggctccctgctcctttcacaccacactctcgctttgaggtgctgggctgggactacttcacagagcagcacaccttctcctgtgcagatggggctcccaagtgcccactacagggggctagcagggcggacgtgggtgatgcgttggagactgccctggagcagctcaatcggcgctatcagccccgcctgcgcttccagaagcagcgactgctcaacggctatcggcgcttcgacccagcacggggcatggagtacaccctggacctgctgttggaatgtgtgacacagcgtgggcaccggcgggccctggctcgcagggtcagcctgctgcggccactgagccgggtggaaatcctacctatgccctatgtcactgaggccacccgagtgcagctggtgctgccactcctggtggctgaagctgctgcagccccggctttcctcgaggcctttgcagccaatgtcctggagccacgagaacatgcattgctcaccctgttgctggtctacgggccacgagaaggtggccgtggagctccagacccatttcttggggtgaaggctgcagcagcggagttagagcgacggtaccctgggacgaggctggcctggctcgctgtgcgagcagaggccccttcccaggtgcgactcatggacgtggtctcgaagaagca

SEQ ID NO: 128370 - DNA, 1042 bp, Homo sapiens
ttgatgtattccttgtcatgggagtcctgcagcctgttggtcttcacatactgccacagggcctggacaatggctgagcggctctgtgtgtgcagccccagcagccgggctaggcggggatccagtttgaactggggaggctgggaaaaggggactgtgaaagttagaccaaagggagagaaaggaaggagcccagggccaggccattcaggactagggggatgtgttgattgaggaaacatgcccctggggaaggataggtttgggaggggaaggaggtctctcaagatgcaccactttgggacctagccctgccctgagggccttgtgtggcgtgtacggggcagcatggcaggtgcagacctggtagtccagcatgaggagcagcgtgcagcgcacactcaggtccccaggccgtttcacctggaagccgtccgtctcctgggtcgtgggtgtccgatgccactgtccaggagagaagagctgtgtctcccaaaggcccatctggagtggtggggcccaggactctagggtggtccctgacccaaatctgtgctggttcttcagggattctggcctgtgggagggtggcaattcaagggcggaggggctcttggtcttacctcaacgaggtggttgtcagggccataaagatctttgtccagctcgatgaccaaactcttgaagaaagaagagaacttccgcttctgtttgctgggctgtgggagagcaacagggaccatgggggcagaacagggacgaggtgggaggagcagaaggaggccaagttggcagccgacagggcagtgggcttagatgaaatcctctgcacttggaatgtctctaggcctgcccctccacccagcctgggctgactccctagcccttagtgcagacaccttgttctgttctcagtgcagcccatgcccaccccaggacacctggagagacctgggccgggacgtacatcatccaggagcttcccctccacccgtagctcccaggaggcaatgctgccgtcggaatcctcagcatcaggctt

SEQ ID NO: 128371 - DNA, 1088 bp, Homo sapiens
acagtggcacaatcttggctcactgcagcctctgcctcctgggttcaagcgattctcctgcctcagccccccaagtagctgggcctacaggcacacgccaccatgcccagctaatttttgtatttaagtagttatggggtttcaccatgttggccaggctggtcccaaactcatcacctcaagtgatgcgcctgcctcggcctcccaaagtgctgggattacaggcatgagccaccgcgcccagtctcaaataagtgttttcactttttcctggcctctctaaactccacacctctcaagatgtcaaaccacagtgtggactgcagtgtaacggggcgacctccactcatcagagttgatggccttagagtctttcatgcccttttctatattttgcctttttttttttaagtcagtattgcattttctgatttttcttgataggaccttgctaagcagtactctgacagactagaatgctgtgaaaatgaagtagaaaaggtaatagaagaaatacgttgcaaggcaattgagcgtggaacaggaaatgacaattatagaacaacgggaattgctacaatcgaggtgtttttaccaccaagactaaaaaaagtgagtaatttccctaaatttgagtaggcactaatgtccagttagtgatgaggtcaaataaattgttgttgtttggaaagttacaatccaaagtcagaattcttttaagtgactttacatattgaacaatttatcagcttgaaagtcaatgttacaaattcttaaactggaacattcccaaggtaggcttttagagaccctcttgggcttctaaaatgccacagagctgtatgtcacattctgatcctttctagcgtgtgaacgttgagaaataatggggaataaaggattcccaagtttcctagaagcctgtgcaggaggacacagcacagaaggcttcatccttttcctgttccagtagaggtcagagggcagtccgctgagtgctctcaagcagggccgaggagatctgggtggggtcacctcctctcattgccatggccaggtagtttgcatctagaaatgtcactgtggca

SEQ ID NO: 128372 - DNA, 1046 bp, Homo sapiens
tgcacctgaaaacatgatgctcagggaagaagccagacacaaaaggccacgtactgcactatcccatttatatgaaatgtccggaataggcaaatctgtagcagcagaaaatggattagtggttgccaggggctggggggcaaaggggagggaatggggtgcaggccatggtgtttctttgagggatggtggaaatgttctgaaatgttaaagacgtccagctgtgtgagacggcccctctgagcagccctgcctggtggtgccacgctgccgcccccttgaggacgtgcaggtcacagggtcagcctgtgctgggttatgttcagtagacttctaggcaggcagcattttagtttttaacagtgaactcagtttatatcctctgccgtcagcttttctgatttcacagggtaatctctccaaaatgggttaaattcaagtacgttttactttgtcttatttttaacaggataggaaaaacttgttggagacccgattgcacatcactggcagagaactgaggtccaagtaagtatctgtgtgctctgtgtcctaggtgctctgggcctttttacattggcttatttgatcctctgtgagcgtcctcttaagataggtagggcaggtattatcttcattttataaaagagaaaattgaggctttgaggttgaaggacttattagagctgtcactggtaggtaagtggcaaagtgaggactcaagacttgcaagcactatttcctggtgtaacttccgagcaggtgggaactccatgcctatcatatggtaggcacttggtgcatgtttgagtgaatgagtgagtgatacaagcaggagacacctggtactcactagctcattagttttgaattactattttttttccctaatgtattaatagcttgctatgaccttcagcacggtgttttatctgatttcaggctgttggcccatctgtaaaacacacacacacacacacacgtttgccacatactagtgaaatcctaactttgagatctggtgggttatttcatctccttgtatg

SEQ ID NO: 128373 - DNA, 1022 bp, Homo sapiens
ttgtctcctacagtttcaaatagccgtctagtaagatggctttattgtgatgtttgtgagtcagtcagttgaaatcctgggtgtttctgataaaatggataaaagagctatcatgattaaagccttcttttaaaaaatatttattttttagagacaggatcttgctctgtcacccaagctgaagcacagtggcataaatatagctcattgcaacctcaaactcgcggttcaagcaatcctcctacccaaacctcccaagcagctagggccacaggcatgggctaccaggcctggctaatttttaaaaattttttgtagagataggatctctctgttgcccaggctggtcttgaattcctgggctcaagccatcctcccaccttggcctcccagggtgttgggattacaggcgtgagccaccgggcctggctaatgtctttttaatggataataaatcgcaattttgttttcctacaattttcactggttttattttacagaatagctgaaacctttggacttcaagaaaattatatcaaaattgtcataaataagaagcaactacaactaggtatgtatggcaaagtatgcataattttttaatgaaccaaatatagaaataatgacttccctttttttctcaatgtcttttcaaaaatttgtagctttatttcatttataatccaaaagtgatttagaagtttactaaaataaaaatgtaaagcagaaaatagcttttccaataaatatttactgtctgttctatgatagtgggaagaaagacactcattacagcttagataaaatgttagagaatggaatgtaaggtgtgctgagtgtaagatgccagttccagcaaattcttcttgaaggagaagagctaaggctgtgtcaggacagtggggaggccatggtggcgtgcgttccagactgagagccttatgtcagagcactatggtgtgaatttgaggaactgaggaaggtccagtgtggctgtgtgtggagaatgaggggaggggagt

SEQ ID NO: 128374 - DNA, 1115 bp, Homo sapiens
cttaacagtgacatagttacaaccaaatgtaggcatatttttaccaattatgtggcgtgatggtatgcaggattaagaattccattttgtccaggagcaaggcctgatgtctgtaacccagcactttgtgaggctgaggtgggaggatcacttgagcccaggagttcaagacaagctgggcaacatagtgagactccatcactgcgaaaaatacaaaaattaactgggtgtgatggcatgggcctgtagtcccagctcctcgggaggctgaggtgcaagacttgcttgagcccaggagatgaaggctgtggggagccatgatcgtgtcactgcactccagcctgggtgacagagtgagaccttgtctcaaaaataaaaacaattccatttaacatagaaaatggactgttacctggtaagcttaatggctttttaaaataataggcagttctgatttttatagggaaaacccttgaagaacaaggcgtggctcacaatgtgaaagcgatggtgcttgaactaaaacaatctgaagaggacgcgaggaaaaacttccagttagaggaagaggagcaaaatgaggccaaactcaaagaaaaacaaattcagaggaccaagagaggactagaaatactggcaaagagaggtacccagagctctgggcttgtcacccactcagctgcttgggggcagcactggatcacacagttgggggatcatggctctcactgagtctcacctcaacagtctaacatttttaaggctgtcatcatcataactgtttaacattgagttcatggaggtccttttggttttgttacagcagcagagacagtggtggatccagaaatgacaccgtacttagacatagctaaccagacaggcagatcaatcagaattcccccatcagaaagaaaagtaagtactatgagaaatgtgtggcctgttcttagatttgttgtcagggcagaggtggttttttagttgctttatgttggaagtgttgtaaagggttggaaacagtgctccatctccagcctcgtaaacagaaaatgtcaccacgtggtgagcactggcatccaatgggcctcaccctgtgcttttcagcgcattag

SEQ ID NO: 128375 - DNA, 1017 bp, Homo sapiens
ttttaatatcgtcagcatgaaaatgtaacagtgttgaatattaatgctactaaaattgtaaaccaaagcaatgttaataaaagtacactctaaatgaaattttttatttttataattttttttttttctttagagacagagtctctatgttgttcaggctggtctcaaactcttgggttcaagtgattttcctgcctcggcctcccaaagtgctgagattacaggtgtgagccaccacacccagccttctaaatgcaatttataccaggctttaagaaaccactttgccccaagcaaatgatcaggtttaaatatagttttatatataataataagtgttgatttctcaaaactaaaaggatgacatgtacccctctaatatgagacctctgctttgggttttttgtgtgtttgttcattttgttggttttcttctctctcttttttttttttttggctgcacaaataaatactcactcctgggtcaaacttgagataagtgcatattgattttatttttaactgacatgaggccatttctgcccacgctcttgatgcttagtaaaacatgaacgagcctgttaaagcaacatgcaggagatggagaagttcggccacatgcccattgctttcctgcgagtggcaggagagtcttctgtcactgggaccagaatgtgcctagaggcaggaaatctcaacacgactgtgagatcagaccacaatccacaaagcgctgctgtttctctcaaaggcaggttctcaggctgagccgtagatttggagaaagcacccctcacccagctccacatctgtgtgtctgcgtgcacacgtgtgtaaaacatggtgtatgtgttctcaaacattcacgaaattagaaatgttgagagagatgaaaataaatataaaaatactgctgtgatacatttttcttgccgcacccacaactggactgtgtacatgggccctctttaggagactactgttttaaagagtaaatgacaaaattaaagtcctttt

SEQ ID NO: 128376 - DNA, 1554 bp, Homo sapiens
tgtgacctgggaaacccatccagctttgtatcccaagtgacggctctgtccacatttgtgcccctacacgcgttagcacgcctgtatgctgtggccactgacctcgcggtgctcgtggtgaggctggtgtggcgccctgctctcagcccgaggtcactgcctgtcctgagatggctgctccctgacgcacccgacttgagtcttccaagcccccttccaggttgctctacgctcacattgcacagaagcatgacttgtgcacaaagggccatggtgcacacgccgggagctcttaaacatgagagtcggctgtccactcgtatggctgacgggggtggcagaagaggcgccaggggctgatgctgtgacccctgcgctctcccctagttggtgtacatgggttttgatgcactcgtggccgaagctgcgctgagagtgttcagaggcaacgtccagctggccgcccagacccttgctcacaacggaggaagcctgcctcccgagctgccgctgtcgccagaagactctttgtccccgccagccacgtccccttctgactccgcaggtaggtctgaggtctttgagggccgcattgagagcaaagtgtcttcagaagccaacagatgtggccctaagccacggcagatgtggagactgagggggcgtcccctgacgtcaccgggccggccacctggacagtgtggccagcaagaggcacagtctgaggttgactgtggtcgtgcagtgtccccaggacaatcctcacataattcacttactcctgcggtattttattgtaggaacctctagtgcctcaacagacgaagacatggagacagaggccgtcaatgagatactggaagacattccagagcatgaggaagactatcttgactcaactctggaagatgaagaaattattattgcagagtacctatcctatgtagaaaataggaagtcagcaacaaagaaaaactaaataatgaacagaaatagcgctaattttctgcttataaatgctatcattatgaaaaggctaatgcagctctttctgttcttactttttatctgaattacaagtcctctttgggtgtaggagggggtgggcaggggacaagtccaggaggggtcccagggccttcatgcgtggtctcggggaagaagcttcctctggcctggcgcaggccgttccatctgcctcccaggtctgcgtccctaaccccttccccagcttggtgttttaccccgaaacaggaaggaacaggggtcctgtagaacaggggtcctggggaaggtgtccagggcagggtcctgggaagggtgtcccgaccgcttcctctccagctgtggctccatctgcccagcttgcctgcctcctgcacccactgccctgaccttcctgcttcccacgctgccatctctgccagggtgccacatgggttcctgtgccaccctttccccgcccctcaaatcgtcctttaagtcttccttccaagtgctgtggggcataacgatgaggcgctggccttgggggccacaccaggtcgcagcaaa

SEQ ID NO: 128377 - DNA, 1082 bp, Homo sapiens
agatggtggtgagtctgggagtgaggactcttcgggcgtctcctggtgcctgaaggaaacagggtcaaaagcacaatcggaggctggttatggtctgggtcaggaggggtggacagtggccttactgggcgtcggggggccctgaagttctggggctcaccagaacccctcctcctccaccagtaggagggcagggcaggcggcacgccctcctcagtccgtaaaatactctcggagttcggcttcacactaacactgtgattgggtttctttctcttttcagactgctgtggatgtttttcgaaggataattttggaggcagaaaaaatggacggggcagcttcacaaggcaagtcttcatgctcggtgatgtgattctgctgcaaagcctgaggacactgggaatatattctacctgaagaagcaaactgcccgttctccttgaagataaactatgcttcttttttcttctgttaacctgaaagatatcatttgggtcagagctcccctcccttcagattatgttaactctgagtctgtccaaatgagttcacttccattttcaaattttaagcaatcatattttcaatttatatattgtatttcttaatattatgaccaagaattttatcggcattaatttttcagtgtagtttgttgtttaaaataatgtaatcatcaaaatgatgcatattgttacactactattaactaggcttcagtatatcagtgtttatttcattgtgttaaatgtatacttgtaaataaaatagctgcaaacctcagtcctttgtgctacttgatgtggctttcaaagaagagaagccttgtcctgagtttctcacttggcttcaggaaggccccaggttggattccagaaaccagtgaagatgtggccacaggaggaggtgtgctgaggtggctgctgaccgtggactccctgcgcagtggcctgcagatgttggggctgggttacagctgattgaagctgagtggccctggggggtctgtgaggggagttcctccccagtgatgaaattctctccttccaccctcaaatccctagaccttgactgaaatg

SEQ ID NO: 128378 - DNA, 1081 bp, Homo sapiens
catgcctataatcccagctacttgggaggccgaggcaggagaattgcttgaacccaggaggcggaggttgtagtaacccaagattgcaccattgccctctagcctgggcaacaagagtgaaactctgtctcaaaaaaaaaaaataataattaataataattaaaattgattcaatgacaatccatcttataatgtaaccaaatttgcttttttgaaaattgagtttaatttttaaaaaataggtgtaatgcgcatggtacaaaaataaatagtgccaaaaggtgtaaatagtaaaacttaagacgttcctaccctagctatctaaccccccacccccaccagcaaccacatttaccagtttctagtatatgcctctaggatacttgatacatgaatatgcaaatatagttttaagcttgggttttgttttgttttttttcctttttacacaaaaagtaatacatctccctcttggagattattccatatcaatacctatggcctccttttcccccaaggctgcgtaatatccagttgttgggatatatatcctaagttaactgctgatcaacagttagactgttgctggtcttgctaccatcagcagtcccttaatgaacatcccggacgttgttttagacatagggtaataatgcacataggaaaacttcctggatgtgggctatcatagggttacagttcatgttcttgccagcagtgaatgagagtgtctatttccctacaccctcaccagcactatgtgttagcaaacgttttggtacttaccaatctgataggtgagaaaaagcagtgtacttttaaaaatgcagtgtacttttaataatgcacttttcttcttaggaggggctttgatttttcctatgttagaagatgtttgtatttttccccctatgaattatcctgtctgtgtacttggccattttttttctattgggtggttggtctttgcgtgttgatgtgagattccccttgatatgtgaagaaaattagcgttttgtatatgatctgagatgcacagttttgttttcagtttgtcttttatttatggtttttatttgag

SEQ ID NO: 128379 - DNA, 1890 bp, Homo sapiens
tggaggaaccctgaggtttccattttggaagcttggaagaaaataaatgtgtttggctctttgagcttgtacacagagctatagcatgtgcctccttcactcaccctacacactccctgctggtggtgatgcagtgtgctttagcagtcagattcttgatgctttcattagagcagagccatcctaggctttcaccccctgatacctgtcctcttgacagaagaataggagttggggcttatatggaccaggggagcagtagaagtctctgttagggggtcgggggcatggcacagatgacgaggctcattagaaattagtagggaagggaagagccgcttgagtaggaaattgttttggattgttgggttttgtatctttcttttatagttgactatataatttattgcctaaaccaagacactttcagagttgtgggctgggggtgctaataataattatgttgggacaacagtgtaacttagaatgtcctgggcaaagaaatacagctgttctgtttattgtgggactctgacactatcaagacttcagtttgcttttgtatccttatttggaatctcctttaagctcctgaaaactggtgatgagaatgtaaattgataaatcactttcatgtaatgttactgtggaaacacgttttgtatcaggcaattcagggaaccagtatttcataactgtttggagtgtgggccctggggttacacttgcctggatttgaatcttggtttttgttgctaacccagtaaccttaaggaagcgaatgagggctgggcatggtggctcatgcccttaatcccaacactgtgggaggtggaaggatcacttgagcccaggagtttgaggttgcagtgagctgtgatagcaccactgcagtccagcctgggcaacacagcgagatcccatctctttacataaaagggtgaagaagtctttctgtgcctcagagctttatctataaatagtgataactggcattgttgcaggattgtcacattggggttaaagaggctgtgctctttctttgtagaccttcaatgctgctgaggcaagtgtgacgccagcatattaactgtgttgacaggctgcatggtggaagtgcacatgttcttaatacttggagagctgtctttgaaaagatttctctaaagaataaatttctttatactgactacttatcaagttggaatatgtgttcctctggggtactgttttgccctggaacataaatgtacactcaggtatcaaacaatttaaaatattttagtgatgtagtaatacaaatagtgaaaccaaaagcaccagtgtttaggaagagtatatgatatgagataagacaagagcagtggtcatattagcagccctgttgtcttgccccttcgggttatattacaactgggtaagagtatttggagaatttttgcacaaaatatatccaaatttggctactttaaattatttgtagtcattgcaactagtagttcttgaaggttatatttacagttgagagacaataaattaaagatgtgctctttatttacagctcaggatggtggcacacaggcatgtcctgccgtggtttcacccttcattctgttgaaaactggatgataacaaactcaggtgtttactgctccaagagctgctttataaattggatgcatacgggggctggttctaggattaagactggtagtagtagggtaaaatgattaaggggcaaattcttttaaaagtaatctatagtaaatttgttcactggcttccacatttcaggagtgaaattgcacgcagtgaattgctgcatagcggtatttgttagcaagttctatttactacttagtagtttatgtcggtacatccataccacta

SEQ ID NO: 128380 - DNA, 2040 bp, Homo sapiens
gtgggacctctctcagttgtatgagggatagattctgctgcctggctctagtcatataggacggccaatcaggagattggaggactcatggtgagtcaagatggctggggcgggtatgcaagataaatctgttccacttccttgtcagagttccaggtggttatttttacattgtttctgttagtagttctttcctcttttgtctatatttgtttgaagtctgtctccctctaattctgaattgacttttccggaagttattcaagtctgattttctttcctcccttgtcagggaaaagaagttgtgacaaattgcttggatccttaagcttaagtgggaaggatggcttcaacacagaacatctgtttcattgctgttttatccgtcagtaaaactgttacttcttttatgtactaaaagttcttagcacttaactaatattagctctttgtgctctgatgccagacttcctataaattaatggaaaatttttgtggttttggtttattctagacctcagactttacgtagtatatttcactttttcacaagaggaaggatttgccacacagcattcaaattactattataggatatgaattgttgcgtactttgtctctttgaaaaagaatcaaggtttaccaagcttgattttagccagtcaccgtatttcctagctaaataatggaagtaggggagaatctatacaagtcagagagttgttcttttttgtttcatggggcctttctctgagactgctagggactctgtgcttgattggttgtcattgttcaaacttcaggtggtttcgagttaatttttttaaactaatgtttaatttcctttttccctgtagcttttacaaagttgatcacagtaaatggacaagaatatcatcttcaacttgtagacacagccgggcaagtaagtgacctctggtatctcagaatcttatacagcatatctgacagtcttggtcctagcactgatttttaaaagtaccagctatgccaagaaaacccctcaggttgtgtgcagacagtccctgactcccaatggtttggcttgcagtggctcgacttaacaatttctcatctttacgatgggtctattgaggtatttgatacattttcaactcatgatatttttggtttacagtaggtttatcacgatgtaaccccatcataagtcaaggagcttacacagataactaaatgttagtatgctgtctacttggtcttttctaagacatttctggcagttatcttttaataacttgtttttctgctttagaattgctttaaatatattaacattgtaagggttaatacttattacaggatagtggttttctattttctaaactttaattctatattagagagtcatattagttgctttctttctctttgtgatatgtgttctcctacattagggcaaaagtacatcttttctagaggaaaggcataagaggggcatagggcagaaattagctgatttaatcttatgaggacctgggccataaaataccagtttgactggagtccaggctctggtttgagtgttggctttagtttatatagtagagtctctgggtgggtggatttgagagtgattactagattagggagtttcaatttatttgatagacagtagataatggccaaaagtcaaataatccccccagaaaggatattcacatgtcggttaatgtagcagggatgtgtggaatggatcaccagggaattggctggaagcaagggggaaaggagtacatgaaacaaagaaaagcccttttgacagcttagctgccccattaccatgacatccaggcctgcttttactagaaactattctgtaagactgaatttacccttcttcactggagggtgaggaatgtaaagaagctgggatttcagctcctaactcctgcccttgcaacatttttttgagacagagtcttgctctgtcacccaggctggaaggcagtggtgctatcccactacaacctgtgcctcctgagttaaagcaattctcct

SEQ ID NO: 128381 - DNA, 1047 bp, Homo sapiens
gagtctcactctgttgcccagagtggagtgcagtggcgccatctcagctcactgcaacctccgcctcctgggttcaaactatcctcctgcctcagcctcctgagtagctgggatcgcaggtgcccatcaccacgcttgggtaactttttttgtatttttagtagagacaggaccaaccatgttggccaggctggtctcgaactccagacctcaggtgatccacccgcttcagcctcccaaagtgctggaattacaagcatgagccaccacacccggccagcaaccactacttttaagccaactttttaataatttaaattttaaggaatgcctttggtgtgaaaacattgtgcaactatacctatccatagtttggaggagaaacaagcataaattaaacccagtagtgtaagatgggtgttaccatgcctctccttcactctcactgcacgtcctgttgtgatggagttaagtatgccaggcatatacagcatgtgtgtaataatgctccaaggatgcaagagagaaggaagggtttggaggtgaaattagggagagaccacttcctcattcctggtgataaagtcatctgaactatgcatctcatgcgatttcttcacagggcatgtaccctgttctaaagtcctccagtagacattttaggtagcagaagagtgagaagctaaggctctagttgttgatttattaacatacaagttcaattattggcgattttgtgaaatccataacatttcttaatttctagatactgctaggcctttcatactgaatgacataggatttctagcttcaaaggagtttttaagataaagacttatgttacatattttcagattaccctttttttttttttgacacagggtcttgctctgtcgcccaggcttgagtgcagtggtgcaatcttggcccactgcagcctctgcctcctgggggcaagcaattctattatctcagcctcccaagtagctgggattacaggtgcccgccaccacacccagctaatttttgttaattttagtagagacg

SEQ ID NO: 128382 - DNA, 1483 bp, Homo sapiens
aattatattatttccttttttctttgtaactcttgcccatatctttagggagaaaatgatcgctttctttcctttctttccatttgtaagcaaaacaaaaaccccacaaacccttatcctacccacataagggtataaaaagcccactggagtccttagaagtaccttgcaaaagcccttaagaagtttgttcccttctttctttctaattaaatttcatttctttaagcagtagcattcagtgtaaataacagtttgttttttttttactccttctaatttttcagtttcaataacatgagaggagttttcttcttgctatttttgttacctgaagtagttctgctgtattttgagttaaattctcctttacaggctagcatatataacatggtttcttttcaacacaattcattttaaatttgtggaattcttaaactattgtattcctatatcacaggcaagcctgtgattaggtaccaataaatactaattgaattgtttcttaatttctgttgaactgtgttttgtatttcatttgtataaaattgagatcttttgtagtatctaaatggctaagagtgacctttggagatctacgctttaatttcgttcatttgttcagaaatctcaatgtttacaatgtgtcggctggccctgtgctggcttcagtggagtgttcactaaatgaatatcattccaaataacttaataaaacagtagctatgagaatgacttttaaggaatgggtactaccttagggtggtcttgaaggtttctctgtgaaactaacatttgagctcagatcagaatgacaaagatgagtcatatattcagagatgggggcagtgggggttgctagagtaaaggggccaaggcaggcaggaactccaggagcagaagggatgtgactggagcctcaggatgggttgtcgggggctgttggcggatgaggtcagagtggtaaccagagcagggatggcctggtgtttgtgggccacggttagaagctgggaatttagggcaggcgcggtggctcacgcctgtcatcccagcactttgggaggccgaggcgggtggatcatgaggtcaggagttcgagaccagcctgaccaatgtggtgaaaccctgtctctactaaaaatacaaaaaaaattagtcaggtgtggtggcgcgtgcctgtaatcccagctactcaggagggctgaggcaggagaatcgcctcaacccgggaggcagaggttgcagtgagccaagattgcaccactgcactccagcctgggtgacacagcaagactccgtctcaaaaaaaaaaaaaaaaaatgttgagaatttattctaattgcaatgaggattggaagcagagaagtagcgtttaattttcaaatgctcatgtaggttgctttgtagagaataatttcaggtattagtaattctagagacattttgaactgtattgggctgcggataaggagtaaatagg

SEQ ID NO: 128383 - DNA, 2125 bp, Homo sapiens
tggtcggtgcctgtagtcccagctacttgggaggctgaggcaggagaatggtgtgaacctgggaggcggagcttacaatgagccaaaattgcatcactgcactccagcctgggcaacagagcaagactctgtctcaaaaaaacaaaacaaaacaaaaaaacaaaagtcatagaggtttgttgaagggccctacagaagggaaattggagacttcttacaaaagagtagtggaagatttgtcttggggcttatactgtatagggaagaaagaaacctggtggagattggagattcaaggtcatggtttagtatatttctaaccttttcgtctgtagccaccttagtaagaaacacattttacattgtgacccagtaataaatgtatgtataactgagatagaaggttcataacacctttcttgtttgcagtccatgctgggattcctatttcttaaaaaaaaaaatagtatgggtcatggctcagtatattgacttcatgaatagttaggccacaccactgatttgaaagcattgctggtagagatggtttggattagatgatgagaatcagaaagggagaccactggggaatactgtgtattgattgataggtgggaagaagggcaggtgccagaggaacagcagtctgggtggtgaccaggcacttcttggtgtgctcaggaggtgggttgctgaagttgcatggagaggattactggtgcaaaggccagtgggctttcaggcccactgttagcttgtgtccatggtcatcaaagccccttaaagttatgttgtgaatttgaggtggtgaaagcagccctggaatgggttgtgtcctagatgcattacatcggttctaatggactcccccttctgcagaatgccttgatagactagttaatagattgaaaatctggtcttccccatcatatcccaatgaacaagcaatgtataaactgggaaaatgctgggcttgtagggagtcggtgggaggggggacagaccgtggctggagtgcagtggcacgctcaacgcacactgcagcctcaacccttcggctcaagcgatcctcctacatcagcttcttgagtaactgagactatatgcacacatcaccacactcagctaatttttatattttttttgtagagatagggttttatcacgttgtccaggctggtctcaaactcctggggtcaagcaatccaccggcctcagcctcccagagtgctgggattacaggcatgagccaccacaccgggctaataagttattttttaggagaataagcatgataacaaagtcaatattaatctgaaaacttaaaataattctgtaaacagtgcctattttgcagtaatcatgaggtataagattgagtcaacacccctgaaagtacaccttctgtagtgaaaataccagctgagaaactcactgtgccattttatcattggaaaaaataatacaatgctgttccctgataaaagctcagaagaattttttaaaataatttttatttttaaaagttaaggtgggttttggtttggaggaagagtatttgacagttaattgtaggaattgagatactgccttttaaaccatttatagtaatttatgtcattaaatgagtgatttgtgtttgaggataaacacacatctgagtatgggctacttttccatttatttgggatcactcctgtgtagttttcatgtaacatttttccaaagagttgatctggagtgtgagattatcttcagcaagcgagtaacagtgtttccagacctgaatttgctaaggacaaaagccaaagtaaatatatgaagttattgagagaaaaaggttaaaggtgatcacagtagagatcaccaatgcctttttgtggttgcaaacaaactagaaaaacctaaccaaaagatctgaactacgtctccagaagacactccttaaagccagaaattacaactggaactgagaacacttgaaaatgagcggtggggtttatttatgaagattcattagcatttaatgctgacttgtcaagatttcaacactagttaataatagcactttttaatggaaatggcaaaaaacagcatgttagcaaatatagccttcctatccctt

SEQ ID NO: 128384 - DNA, 1032 bp, Homo sapiens
gattgatttttaaatataatcagctgtgcgcagtggctctcgcctataattccagcactttgggaggccaaggcgagtggatcacctgaggtcaggagttcgagaccagcctggccaacctggcgaaaccctgtctctactaaaaatacaaaaattagctgggcgtggtggtgggcgcctgtaatcccagctactagggaggctgaggcctgcaggagaatcacttgaacccgaagggggaggttgcagtgagtcgagatcgcgccactgggcgacagagcaagactccatctcaaaaaaaaaaaaagaaatctaacattttaaaggttctggaatactattttagtattttaattttcttcaatatatgttgggcttctggttattaaaaaaaaaaaaggagttcctgtaggattggagctttaaatctaaactggtattagtttagaacaggaagtgctagaaaagcctttacgttgtgctcttatgggcaagttaagaaagcagggcagtttaaagatagtgatagaattcactccgaagtgtcatgcttgcttggtttgcgtcttatctgtagtagaattgagtctttctctcccgcatttctctttttgttgtgcttacatgtttgcagaaggactcctcatggacatttgaaagagaagttggtgttttagcaagatacaccatcccaccttttgcaggattgagagttgaatgttaataactacctgatggcatagtacataatttgtgaatggggatgcaaatatgggcttttacagttaatacagttttatgagatgaaatgcttttctaagacttctgtgtcttagatataaatgtgtctgcctattttgctagctttatttttttttttattttttattttttgagacggagtctcactgtgtcatccaggctgcagtgcaatgtcgcgatctcggcacactgcagcttcaaccttccagcctcaaggatcctcccgcctcagcctcccgagcagctgggactatgggtgtgtgccaccat

SEQ ID NO: 128385 - DNA, 5620 bp, Homo sapiens
aagtcactaattgttcaaatatcaacatggaacctgggatccagcctttattggcagcctgaatccatgctcttgtctctgttctcttgatttcctcctctgcattttgaggagttgggaccgcgaggtgttctggctcttgggtgagccttccctagtcagtcaagtaagtacttattggcaactatttggaaatagtagtccctgaataatcacgttataggcaacaagtacctcggctacctgatttcaacccaagagaatgacctaaagatcttgactgatttacccttttcaaatgtcgaaatggtagctctagtctttggtgagcagggctagttttatcacttttttttttttttttttggctacagaagttccttatgtccagttgaaatccattctgttttatcttccctctattcagcgtcctcctgaggacggagatgtgacaggccaccccttagccttgtcctcacaaactgttgcttgttaaatactgtgctaacttagtctccggtgggatacagggtcacttttagtccctattttctgtcttcagtatttcatatttctgcaacctaccccacttctccatatttattttcaagcgtagtcatattaaacgattttggagaggttaagttgctcccaatcttgtatttgatttttttttttttttttttccgagacggagtttcgctcttgtgacccaggctggagtgcaatggcgcgatctcggctcactgcatcctccacgccccggactcaagcgattctcctgcctcagcctccagagtagctggcactacaggcgtgcaccactatgcccggctaattttgtatttttagtagagacgggtttcaccacttggccaaacgtcaggcttgtctcaaacgcctgacctcaggtggtcctcccaccttggcctcccaaagtgctgggattataggcgtgagccaccatgcccagccgcatttgattttaaagtgtattatgagccaggatattttgtagtatgtggggtcttttttaggggaaggagattaggttttgccagcaggtttcttctagtaagccacccttttgagaattactcagcatgctcacttctgggagcttactggcatgtttgcttgcaaatggtggtgctgtaccagagaaatttgagtacctgtgtttctagattgtggtattttgtgatgctgagctgtttgtcctatattctgggggtagagccacataaaaagcctccacacctttcttagaatgttctcttgattaaatacattaagccagtttgactagtaggatacttgtcattgtgatttgtcatgccacaaactttatttttaaagttgtcttcagataaaacaaaaaagtgctatgtttgtttaactagttggctttcttttttttttttttttttttttgtgacagagtctcactctatcacccaggctggagtgcagtggcgggatctgggctcactgcaacctctgctgcccaggttcaaccgattctcctgcctcagcctcccaagtagctgggataacaggcgcctgccaccccgcccagctaatttttgtatttttagtagagactgggtttcaccatcttggccaggatggtcttgaactcctgacctcgtgatccacctgcctcggcctccctaagtgctgggattacaggcatgagtcactgcacccagcccactacttggctttccgttttctttttttctttttttttgagtgttgtcagaactaccaataggtaaaatataattctcaggtagtctatacaattctccctgccagtcccctgtacttttcctggtatttacaatgttaaagcttttaaggacacgtcacctataactctgggagtctggctttcagggagtgctttgtattaactgttgccgtgatggccaaaagtaccagctccctgacattccgttatttctaccacaacggagtagtcccgcgataggaagtaactcaacttaaaatggtagtgttacgtaaactgtcttcagcctggtacatctttcactgggattttacctgtacagagagctttggtaacctagtttaccattagaccataattaaaagctggttgtcatatataagcctcttacatacagttaataagagggatgggatcacaggcatgtgaaagatcatagggggaaaatgaaacagctttgtggtttggaagaaggcaattcagcaaaagtactcaaattattactttgtcaaaatgtttaggtagtatttagagtcttcatgaggaaagatgtcattaaatatttggttgttcccagcagattctgacttactgtttattttttaagttaacctatcatttgttgacactttttattgaaaaattgaaaggcaaaacaatatttgctatgtatgacatctaccagtatgtgaaattgtatattcaggtgcttaatattctgatgttgtatacttgtgggtgggggtagtcctgaagtgcccactttgtattgaaacttgaaattactgtttttcagtctcattcattgttctgcacaagagcataatcagaattcagatttctgattatggctttccagtgccaaatgttattttgctgtccatatgggttatatctctctgtacttcatcaccccaaaaagaaactctgtactcattagcagtcactctccatcctgcttccctgtcagcccctggcaaccactaatctttctgtttctatgaatttacttactctggacatttcatataaataagaacatacatatgtggtcttctggggctggcgtcttttacttagtataatgttttcaaggttcgttcatgttgtagcatatgtcgcttcttcctgtttagtgctgactaatattctgtcatgtgagtataccacattttttctatgcatttgtcaattggatatgtgggtggtttcttttctttctttttttttttggctattattttttatttatttacttttctgaggcagggtcttgctctgttgcccaggctggagtgcagtggagctatcatggctcactgcagtgtcaacctcctggactcaagtgatcctcctgcctcagcttcccgagtagctaggactgcaggtgtgcgccatcacacccagctagtttttttatttttttgtagaggtgggaaccttgctttgttgcccaagctggtcttgaactcttgacctcaagcaatcctctggtctcagtctcccagtgttgggattacaggtgtgagacaccacttggagctctactttctggctactatgaataataatgttttgaacattcctgtacaagcttttatgtagacatgttttcatttctcttgggtacattcctaggagtggaattgctgggtcattatggttaactctgtgcttaatattttgaagaactgtcagattttttccagaacagctgcacaattttatattcccatcagcaatgtatgagggtttaattttctccacattctcgtcaacaattgttacactgcctttttcattttagccatcctattgggtgtgaagtggtatcataggatttgcaaataatttctcctgtctgtgggttgtccttttaccttctcgatggtgtccttcaaagcagaaagtttttaatttgaaggccgatatatctatttttctcctgccacttatgcttttggtgtcacatcttagaagccattgcctaatccaaggtcatatagatttactactatattttcttctagatattttatcctgttaactcttacattagatctgtgatctatttgtggttaatatttgtatatgatgtgagggagggatagaactttatacttttgcatgtggatatcaagttgccctagcttcttttgttaaaataatgttctttcttcattgaattcccttgtccgagatgaagtgaccgtcaatagaagaactcactcattccattgatctgtatgtctgtcctgccagtaccatacgatcttgattactgtagttttgtagctggtttttaaataggggcatatgagtcctctaactttattatttctgaagatgtttttgggtattctcagtcccttgcatttccatattgaattttaggactagattgccagtttctgccaaaaaagcaactgcaattttgataaggtgtttcacggttttgcaggtatcttttaatgtcttaacagctggattctcatctctgctcctgaattcattcccttaacgttattttaatgaagtaaggagtacttgaatagtttttcaggtagttgaatattctttgataccgaaacttcataagtgatagtttgcaaagaatagttacactatgcaatctgaaatcatattgatgaatttgcccaactccgcaggtctgctttatacttggaatggatcttctaccatgcctggttttgtagcgttactggtcatttggaaaatatttgttcatcgttacgcagatcttccacatgttgacacattttattatacaagcatttttaaaaatcacatttgttaatatcaccaccaatctctgcaaagtcttaagttttagaacactgttcgctatgagtggtgcaagttttccaaaattctaatttcctccttgagttcaaataatttccttggcaacatgctaccagtttttacttgaattgactgttttgtttctttaatttccaagaaaatgtctgccagctattcacatttgcaataatgatagtttgtcatcattcttgcaagtaaaaaaggcattccatgataaaagtggccagttcagatcacttctcaaatgactgcacaagtgctttttttggaaacaaccatcatacttcagtatgtaacagaggtgctttatgtgtacatctcattttgtcgtgcagaatattaaaaagacaggtaccaaagggtcaagatttaatataattttactgctttttcaaggacactgttaagtagaaacagctcttttcccactgtgaatgcatggtagtaaagaatacagtgacttaccactcagtttgtaactactgtttttgattcatgccaaggggtgccgagctagcagttttccctaccattgcttttgcacccttagtacaaatgggaactttgtggaaaaggcaaatgataacttaatattgctatgaatatcgttttgacctcatgagacccctgaaaagattttggtaaaccccttagaggtccacagaccaccctttgagaaccattaaactgttgtaagctaggatcttgttcactgctgtgcaaaatcgaattgacagtgactgcatcctaaatgctgttcacagcgatatggttcccacagtgttagaagagcctcctaggagaggccctgtagcgttgtgagagacaaagatggcaaggcaggaaagaacttggcgtggttagaatggaaggaagcacgagggaggccagagaacatcaggagagttatgatatctgtgtgcctattggtttggcctctgattgtgttgcatttttggatgagttgtgtttggacctggtgatggcgaggctcccagagagtagtgaaaattgcaa

SEQ ID NO: 128386 - DNA, 1049 bp, Homo sapiens
gcgggcaggtggcggccgggcggagggcgtgggaggcgcggggcgggggccgtcggccgccgaggagtccgggtctcgtctggggaagtgaggcggcgccggggagccgcgctagaggctgccgcgagggagtcacacctgcctccccgccttcgccgcgggcgcgcgtgaccggggctggcggtctcccccaccccgcccccgatgtaaggaaaagaaagtccgtgggattttaacaaaggaagcagcgcctcggcttcattccatctgtggtgaagtttacccttgtaaagaaaactagggatttagaggacgtttgggcactgaacgcaagttttctgcataggaaacctaggcgatcccccaaaagaggtccctctggaggccctcgagatgctgctggcggcctgggtaggaagacagagaaaaaggaatgtctgatctctcggtgccctatttttgttcgggaaggaataaggtcaggtacttgcaaccaggctgttgaagtaattccaaagtctttttgttttctttttcttcccccaaaaggttgacatacatttgaaacagttcctagcagtcgccttattgctgaataaggtggcttagggtcgggttggggggcggacggggtgttacagaacgagcggttttctggcctgtgtgaaaccagagcgattgaacttagacacgcttcagggtgaggctgtattgtctcccgacatccggaagcctggagaaattagttcatcttttcgggctgttttgaagtaactgtctatagaaggcgtgcaccgggccacagttgaggggatggggaggtgaaagcgagggttccgaggctcccgtgattgcggaacggggtgactatctgtcatgggaagcttgtacctgcctgccgctcactggatgcactccccaactgcgctttccaccgcctgtgccagggtctgtgctctttgaccaagatcagccactgcatgcttactcatccttttaccacctctccgtcgagagccggggggaaattaagggctgaaagaagcttg

SEQ ID NO: 128387 - DNA, 1003 bp, Homo sapiens
tctcaggtgatccgcccgcctcggcctcccaaagtgctgggattacagatgtgagccaccgcgcccggcctaaacctttttttaatacatatttgtaagagtgcacaactgaaatacttcacaccttcactaaaacatacctacatatttcttagtaaaattttttaagagtggaattctttttttttgttttccaagttaaatctgacatatttagaatgacaagatgttacgtggatccaagctgcccgaacgattgggtgggagatgggagcttgggccacctgctccttcccacatcgccctcctccgaagcctctggatcatcctcctaaggcactgccagacacaggtagaaacccctggggtagagaaccctgctgttaccatgagctttgaaactttcatcttccatccactgacaggtgccaaacaaaaggagacagaaacggagtgaccgccgtgaatgtagacgccctaggaggagaacttgaacaaagtctctgggtcacgttttgcctcatgaacactggctgcaagtggttaagaatgtatatcagggtttaacaataggtatttcttccagtgatgttgaaattaagcttaaaaaagaaagattttatgtgcttgaagattcaggcttgcattaaaagactgttttcagacctttgtctgaaggattttaaatgctgtatgtcattaaagtgcactgtgtcctgaagttttcattatttttcatttcaaagaattcactggtatggaacaggtgatgtggcataaggtgagtgcacggtatgttcagatcacagtgccttatgtccgaatacagcaatatgtcaccgccgcagccggggcgcacgcgtgtgaaacaacaccgagcttgaatgtggaagtctttgaaccttttaccaaatcagtttgttttctttagatttgtcaaaaagttgtaatttgaatataaataattactttaaaattgtaatgacacttttacacgtaagtg

SEQ ID NO: 128388 - DNA, 1678 bp, Homo sapiens
ttaaaaatatagaacttaaagacatttcagagcctgatttttactgaattatgagatcattttctgagaaaaaaggagcattacccttcaagacgtttgaaaattagcctaagcctatagtgtgcaacagggaattcgctatgttgagatggactagatgacctaatagggctttctttttttttttctctaaatttctaggagtctcatgatttgaatattgatgaactctttgacttgaacattttgtttcttctaattgttcatcttttcctgataattataaggtacaccaggaggatggaatcaactataccctttataaaaggtggatttttgaaaccgtagaccttattttgttatactcaaacatgatcctagacttttctctcctgccatatccctcctcctttaaaacagcccatgaaaagttaatttttaaagattcttttaattctgttcagctggcttctttgttcctagtagacaaaaattggagctctccaaggagaattcaggatgtagaggcgggtggcgtgaggactagcttagcagtggctcagacagctgccgtcaaatgctttgggtttggaaatgtataggttcttaataaatattacttaatcctgacagcaggaccaggaatttaacatgaacaattaagaataaaggattcaattcttcgtggcttacaggtcttaatatcccaaatagacctgttcttccctggttctatacgcgttcttagtgagtgaagaggagatggaaaaagattacagtatcaatgctctgcaatagtttgtgaatagttaaatagaagcatagacctacaaactggttcaaacaaaagatacagtcctttgtaattttctcatgttaattcaggcatccaggtagactgttagaaaaaactaactttaatttgttggacatactttttcattcaaatctggacctttgaacatgacaagagtgtgttctgggtctagaacgtttgcgtttatcttccgtttagatgtctgatatgccaaagcctgccttcatgaagcagaacctggatgagcttggaataggaacgtaccacaacattgccttcatacatccagacactcccatcatcaaagccttgaacatatttgtggaaagacgaatatcagctctgcctgttgtggatgagtcaggtttgtgtgtttggcgctgacaggcagaaataattgtttatctcagggtgcaattattgtaagatgacctggcacaggagatacgtggggaaaatgaaaacttgggtatggtgaataaattcagcaccaaggggcacgcaggatcgtaaaaaaagtttaattggtttattttcatatgtccattaaaatatgatttcatatctaagttttcatttaaaatagacaaggttatttatcagtgtttaacttttagtaattatgtcattaaaactgattttaaatgaatttctttttgtcccttaagacatttttctaacatatatttttcatttttaggaaaagttgtagatatttattccaaatttgatgtaattgtaagtattttaattttgttcaatctgtcacctagaatgcattttaaacattcatgtaatgtgtttttatgtttttatcttgtttcttaatttaataatttctaaccttttggggtgtgagga

SEQ ID NO: 128389 - DNA, 1121 bp, Homo sapiens
aaatgctattatccaagctatgttttgtttcattttccaaatattttttctatgttgtatatgtatatttataaataagaatttttttatttgcaggtacagatttatgaattagaggaacataaaattgaaacatggaggggtaagcactattggatgtttaaaatcttttagtatcgggaaagctatgtttagtatgaaaagtatgttttcattttgcagatccttttctctctgctccataaaatgttatataaaacattctctttatttctgttaattttgatagtatgctactgtactaaagctgaacaatataagtattgtcccttctgtttatagacatgtataggacaccttcagcaggcaaggccttatcctagggccaggaatgtgaagatgaatgagctaaccaagccccacctcgctgcccacaatggggccaccgctcactactaagtctaagccctcagagatttgccttggtattaagaaatgcatcagaggcatgcctaacttgaaccaaagcaagcatctgttcttatttaaacctagtaattgtttctttacaaattgtggagaaacttaggacaaatgaacctcaaactagatggtttggagcaaatagcatggaagtaatttgaagaccatattctcttcattgtcacattgacattcaccctgtaaaatcatgatactcttttctgccatagaaccatttcttaaattcgcatttcatgattgtaaggtggtggtctcactgacacttgtcatggtgggttggtggagaggaccgggggtgggaatcacggcagacccagtctgtctgcaacagcggagcctttggagggtgctcaaggaaacactggtagaaatggagggaccaactgaaggaaaattttgaattcaaaattgaagagtttggttctgtgtttcccataatatgcttgataggagaagcaacctttgtagctggctgtgaaatcagaatacatcttggagttctcttacacccccaggggccctttcaaatccatacgatttagaagtttcactgagtgatgggtttggtttattacggctttgtcaaaccaagctaaacaaatttggcatgggatctg

SEQ ID NO: 128390 - DNA, 1020 bp, Homo sapiens
caccaggccctttagacctccccagggacccccaggtgtggcctgcttctgttcccatgccccacacctgccgtgcgtcctcagagggctccccgggctcttggagccccttacctgtattctgtgcctgccacccaggacttacaggatgaccaaaaatgactttgcttttgtttaatttcattttccaattgtttcttgttaacgtatggaaatacaattgatttttgcaaattggctttatgttctttgctgagttcactttggaccaggtaaccttcagagtcacttttaaaaccctaagattcttgattatttgacacaaagaaggaagcatccaaatacaatcttatagtagggaaaacagtaggcagttgttttaagagatgcggtctcgagaactgtgactacatgtttcaataacaaaataatgagaagttctgaattcccaaaataaaggaactactggctcaacctatttcagcctcacgcccatcccccagaaggtttactttttaaaataccagattttctgaccaccggcatttctaccaacttaaaaataagcgacagtaggccgggcacagtggctcaaacctgtaattccagcgctttgggaggccaaggcgggcagatcacttgaggttaggagttcaagaccaccctggccaacatggtgaaaccccgtctctgttaagaatacaaaaattaaaattagccgagtgtggtagaagtcacctgtagtcccagctactcgggaggctgaggcgggagggtcgcttcaacccaggaggcggaggctgcagtgagccgagattgtgccactgcactccagcctggatgacagagcaagactccaacaaagcaagactctcaaaaaataataataacaagtaacagctgatttgacttttacccagctttccatgtattactcattttggctaaaccctagagaaagtcaagtgagtaatacatgaaaaatgcaatgccttatggatgtccaaggtgactgatcca

SEQ ID NO: 128391 - DNA, 1008 bp, Homo sapiens
agcagtgtggttgttgtgagtgttgttagcccacccgtgagggattttggccggtgtgaggttctggagggggcggcatacctcccaggcaccttcatgtcctatctggtagctgcctgcagcgtggccctggcggtgtggcctggaatggggagtagcagacaccttctcctgacctggctggtctttatgcatcgctgctggctagatgctagatgctggccggtggcatctggagcccctccatgcagagtgtccgcgcccgtcagtctggaggacacgacaggttccatggttcctgggaagttcctggagcggctgccgcctgcgtggctgggatcacagactgaagggctctggggaagtcacagattcatgtacaataaatgacaccagaaagggagttggagcacgggctttgtgctgtcgctggagacaagatgcaaaggtgcccgcagaacccaagtggcttcatagaattagaacatttgctatgtgcccagtatagccaggcccgtgcgagggatggccagcccgttgcaatcctgtaagagttactgttaccagcttatgtagtggaaacacaagctagaaagtcagaagcagctataagagcatgacatgatcaaaagggaccttggttagaagttgcaagaccaggatttggttctggctgagtcacggctctaccatgtggctctgagcaacttgcttgaatctctggacatctgttaccccacctgtaacagaagggccttggagaatttctgaggccatttccatcctaacaccctgtgactgcccagttctctgggtttaggcgctagaggtgagggcacccgcagcaggcccgggccagttgggaacagaagctgacaggcaccgctcggcagggggctggggctggtggttgtccccaaaggtgtaattgctgttctgggtctagcggtggcctggggatgaggccaagctaccctgcatgtcaaagggccaggggaggagcagatg

SEQ ID NO: 128392 - DNA, 1023 bp, Homo sapiens
acctcttccccagccaggcaacatttcattcagaggtgataatttaaaatgctgcacccaggtccagggcctacaacccgctgagaagtgaaatacccacagtaggagagttaacgtaaaggaaatccttgatcagagcttatgaaggggacactggctatttaatttcacttaatctggttttccaaacttacgtgttcccttacgcccacccatgcttttttttttttttaatttggcctgttattccatataaataaaaatgactttgaaaaccatgagtcatctttatatagtatagacagtcttagaattgggggtgtcctcatgggtttgaagtccaagcttactctgggtgcttagaatgtagcagttagaagcttcctctgtaatcaggagatggatgtctgtgtctgatgagttcccaacctcagtgacagtggattccacattgcaaagaagaaaggaactttttgatcactaataacatgccaggcaccatgttaggtacttcatattaactatctcaccctaatttccactaaaatccctgaagagaacgatcacatccactttacagatgaagggaacagaaacctagttgctggaatccgctggcattcatttcacttctgcccgtgagtattaattggctgtgccctctaggaaaacataaaatatgtggcccctctgcttttaagaactttgctgaagactctttaggaaatgcctttgggataaccttggaccgtctaagagagaccaactaagaacatcttagctgccttggtctatttgcctgtgacacaaatggagagagcaatggtctgtatatgcaggaagacaacaacagctcaattttacaactcttagaaaaactaaacagcaagttctgggctcaggactctgtaaatgctttgataacttattgaataccaagctaagggggtgttatctaattgtgaaaaacagggcaaatagtcacattccagtttttatttcctttaagcttgggcaatggtt

SEQ ID NO: 128393 - DNA, 1063 bp, Homo sapiens
gtctcccttgccgactgggaagaatgactctcacggatgaatggcatagctgacacaggaaagagtatgtgtaggatgcaagcgaaaaccctttaactaatactactattaataattatgtataacagctggacacagtagcatgtgcccatagtcattttatttcaatttatattatttgttttccttactgttcttttctacctcatagaattaggaggtagaaactactgacctcatgcttgctccctgaggctagcttttacctgaggtagcttttaccttcttgtcttccacaggtctatagtgagcgagagctgctactttttacttgggcattcattcaaagtgttgaagaataacagcctctaccatcccttattcactggctcatcagctgtcccaggttttgctcttctaggtatttgccatgttgtttgtccttttagtttcttttctatgtgtttgattaaatttgcttctttctcccatcagcattaccttgtggttttcttctgcatttgagacacagtgttagacatttgatgcattcatgttcttttcgattgtcttacagagaagagattcataaatatcagggatgtctgaggatcattcccagggagcatatgatgtctggaatttgctctgaacctttcctaattcagcaatcgccttatgtgtaattataaactactattggtagctatgttttcttctagctttctgggtagataaggaatgggaaagaataatgtgtatttttatgttgtcatcacctggtaatttcacaggggtatgtgggtactgtactgttgtaaattaatatttgtactcacatgactacagctgagttaaaatatgagtgtgcctcttttatggaaaaagctaataaatatttgctgtttgacaatttgtaatgcaagagtatcttacaagaaaatagctggaaactactgaaaggtaaataaatacattttaaatgcattaaatattatgaaaattagtttattctggtagaaaatgaaagctgtcctgtgaaatagaattttctcattagtct

SEQ ID NO: 128394 - DNA, 1036 bp, Homo sapiens
ctgtaatcccagctattcaggaggctgagaggatgatgacttgagcctagagtgtggagtttgagtctagcccgggcaacagagggagaccctgtctctttaaaaaaaaaaaaaaaaaaaaaaaacttttacattttcaagttgattttgttagaactatacaaaatcacctcttttaaatattttctctcacagtgttttcaaatttattgttaagaaatcatggactaagaggaagacttcgtacttttgttggcgtgttgagtattttgtttcataatgaaaccgtctaatgaaactgtttaaactggttagccgtctttcttgcctctccttcttcacaataagcattcatttccgaggatgtggtctgctcacacattatactcttctctaagatttcgcattgcacagaatgtgaacaatgtcctttaacctcttctggaacagaaatacacttcaaaaattatacaaacaagtatgtattaattgttaatactaagcgctatgctaaatatatggggctgaaaagatggaaatgatctctgtcctcagggggcttgtttatggtaagtatagcagtgcttaccctacaggcaaattgtctgttgggatatcttgggttcacatacctgtaaaggatgattctgctgtcaatgtccccctccaaagtcacaatgttgagcatctcattttccagccatgacatttcacctttctggttccctctgtctggtaacaactccagcaattatttggccacaccaggtcctctaatccataggcctatccacatttttcatcttgcctcatacttccacatcctcacatctctgtttccctggcttaaatctgtgatttgtcataatcatcccactgcatataccttgccccattcctgtactgttgtacctccctggcaaaaacccacgtctcagcttacaaggcacctatccctgagcagctaccagaccatgactgaagaaaaacgtaaaaccatagtgacttgtctcactttaataaattcaagttcaca

SEQ ID NO: 128395 - DNA, 1072 bp, Homo sapiens
cggggttttactatgttggccaggctggtcttgaactccagatctcaggtgatctacccaccttggcctaccaaagttctgggattacaagcgagagccaccgcgcccagccctaacttcttgacctatccgaaaacagatagttcctttattgcttctgaataccattatgcttaattgtataaaagaaatgatgggattttataaatgtatatgtttttaaatttagtcttacgatttactatgtaaaaaatactctctaaagaattataatatggtttgggaaaaagaataacatctgcctgatagagttgttgaaagttagtatattttacagctcaggaaaccaaggaatcatgatgttgagctgttgtggataggatgagccagggtggttattccatggagaatctggacagagttagccaaatcctgttggtgaggtctttgagcagaaaactttttcattttgcccttaggtgctggcaggtagccaagagtgaacctaaggaaagtagtttcccgggttttttgtttatttgttgttgtcagtgaattctgtaagattagtctgcctgtttttatcacaaagaccattatttaagttttgaaatgagacaataaattcctgagttgtttcttgtaccttttccaaaaataaacatggctgttgttctgtgctagtttttatactattgttgaataagatggtcatgacctctatgcatagtattaaggtattgcttagcccaaacaagatagtaacagatttgtttagaaatttgcaagcatgttgctaaccatattacagtaatttttttcatttattaacaaatatttattaaattgttgctatattctacgcattattataatctccagggatagacaaaagctctttccctattggagcttacttcctggtatgggagagataaacaataaataataaactcagggaataagtaattatgtatacgtaagaaggtgataaattccatggaataaggaagaccaggtttaatgtttagtgggtggattgaagttttaaatagggtaatcttggtagggc

SEQ ID NO: 128396 - DNA, 1035 bp, Homo sapiens
gtgacagggtttggggaaatgggggcatagtactggagtggtccctgcagagaggtgacaaggctggagggaggcagggctcagatgctggagggctgtgtgtgccctgggaaagaattcagggttctcaatgtgttctctaagttcatggcttttttttggggggggggggatggagtctttctctgttgcccaggctggagtgtggtggcatgatgtcggctcactataacctccacctcccaagttcaagtgattctcctgcctcggcctcctgagtagctaggactacaggcgtgcaccaccacgcctggttaatttttatagttttagtagagatagggtttcaccatgttggccaggctggtctcaaactcctgacctcgtgatctgcccaccttggcctcccaaagtgcagggattacaggcgtgagccactgcgcctggccagttcatggctttttgatgttgcttaaagctcctaaccctttttttcccaaatagttgcttggaatgatttgatacatggaagctcttctgttatcttggtatatcataatttattcaaatcttttttattattgggcaaaaaaataaaatttcaaatataaagtcttatatttgtttccttttgaaacctcattgaggagaagctggacatcagctcatgagtgctgcatgaaacacttgcagtgattttggtaaaaagaactcacatttttatgtaccctctcttccaaaaaagaaaaaaaaccctgaagtttaaaaagtctttattcggctggacatggtggctcacacctgtaatcccagcactttgggagggcgcggtgggtggatcacgaggtcaggagatcgagaccatcctggccaatgtggtgaaactctgtctctactaaaaatacaaaaattacctgggcgtggtggcgcaggcctgtaatcccagctactcaggaggttgaggcaggagaatcgcttgaaccagggagtcggaggttgcagtgagccgagatcgcgccacagcactccagccta

SEQ ID NO: 128397 - DNA, 1018 bp, Homo sapiens
ttcttaactattttgaaatggactaagacttaataaattcctttgtaataaaaggcatttatatctcattttctttgttatcaatgtgatttatatatggtcagctgaacatttatgcactcaaaatactcatttcaaacattctttgtgcaaagcattgtgctcgatgctatggagatacaaataagtctgtaactaaagtaagtattcctctttgctagtattccagctcttacccttcatttctttttcttcctacaggataagctacaatactcttttaaagtaaaatattctgtagtatttgcttgatagtttgttgtaaattttagcaagtactagatacaactttagaatagctgtaaagtgtctttatatatgtctcatacagtttgaataattgtgggactttattttcagatgatttgaaaggagaactagatgaatatgtccaaaaatacctccctggaaaaattaaagtcataagaaatacaaagcgtgaggggttgattcgagggagaatgattggcgcggcccacgcgacaggtatcacttctcgttagctttgctctacaggtgttggatgacaagggctcgagcctcagcgcctgtcctgattctgcaaagtctatgaagagtagtgtttcaaacggacattgccagcaggagagatgaggcttgttctgtttgggaaagacctgttcataacgccaagcctgccatcccaaagcacatagtgcagggggctgaactctcaaatcctcagtgtctattttcatagcaacccttctttgatacttactgcccctcaaatatattttatatcttattcacttatataagcagaaaagcccagaccaaaatgtaactgaatttttatgtttttaaatacaaaatttaaaatgtatgaacccaaactgtcgattggaactatgcttttaactcttagtgcggagtgcatccctctggagccacacatcatgactttaattggttaatggacgtaagattgacttac

SEQ ID NO: 128398 - DNA, 1045 bp, Homo sapiens
tgtcgatgatttatatgttgctaactagaagaaaggtgtatcccattggcaggtgagagccactgaagctaagagggtggggggcagtagaaaggaaaggtgggagatggaagaaacagaaatgagcaagaggcgtccccgagagcgccaccagctgcgcctccctctctccggggagaactgctgtgtggcagccatcatccatagttacagtgcatgtcctagtcaccagtgagaaggcagctgtgttctctgtactctgtttactgaggcagagagatgtcttctaagtgtgtgccaaacttcaaaatattttgattaaaataattgtaataaaaatacctacatacaactggccaccgtcatggcaccaaaacatcttggaatactcaatatctgggcttccaaagagttgagttgttacggtgagactttgactctgtttactgaagagattctgaattgcctgtcagttttttcaagagtcgcgcgtatgatttgtatgggtccctcaatcacagcaggacactgcacgcagcattactggctgagggacgtccttgttgaccaccggcagtgaagtgtagtggagcagttaggccgtctggggctgggagggtggcagtcgtgtttcatgctgtgtcagcgcgtcatcccattggacgggtggttgtacctaaattgagtgttgtgacactctcctgagcctctgttgtttcctccccaggagaagtccttgtgttcctggacagccactgtgaagtgaatgtgatgtggctgcagcccttgctggccgccatccgtgaggaccggcacaccgtggtgtgcccagtgattgacatcatcagcgccgacacgctggcctacagctcgtcccctgtcgtccgcggagggttcaactggggactgcacttcaaatgggatcttgtccccctttctgagctaggacgagcggagggagccactgcaccaataaagtaagatcgctcctttgtttgacaaattcctaccagtgcttccttaaaagagaacaaaatgatattaa

SEQ ID NO: 128399 - DNA, 1050 bp, Homo sapiens
cacacaaacacatcaagatgtgacagctaaaaatgctcccaacattatgaaatgtctgttggggacacagtcatcccagttgagagccactggtctaacttgtgtgagtccaactcccaacgtgtgatgtttgtcaggtctctccttggtggaccttagagcccagttttgatccccaaggctctgtgagattgtcagaaggaatgaccatatcaggtggctttccatcagaaatggttataataggaaaagaactttcgagacttagaaaagtagccttcgtatgccagatactagcatattattagcaatctagaaaattcagttgtatggcctggctcattctctgatactggataaaatgattcataatcattaattcaatttttattagttatgttccaaaatgacactgagtattttaaacaaaagtagtaggtaagataactgactataaggaatgagtacagtaattttcctttttctaggtcaccaacaatggctggaggtttgtttgccatgaacagacagtatttccatgaacttggacagtatgatagtggcatggatatctggggaggagaaaatttggaaatatcatttcgggtaatttaatttttgcatgctcaattaataactgtgtagtggaatatgattttcatccatgatctcatattttctttatattctccttgattatttttttttcgagatagggtctttctctgctgcccaggttggagtgcagtggcgtggtcatggctcactgcagccttgacctcctgagctcaagcgatcctcttgcctcagcctcctgattagctgggactacaggcatgtgcctgtaatttttctattttttgtagagatgggcgtctcactatgttgcccaggctggtgtcgaactcttgggctcaagtgatcctcctgcctcggcctcccagagtgctccatgactatctttattgacaaattgtccttaatgaatgctactttgtcagaatctgtgatatggataatatctgttcgaaatgtcaagagtatacatgt

SEQ ID NO: 128400 - DNA, 1048 bp, Homo sapiens
ttctgctgagctcagatgacttctgggaacaccaggcatgaaatccatgtccccactctgaccctcactaccacctctgctctgtgatttggttcccagagctaagagcaaatagcagatcactgccccatttctccacttgttggcctggcctctgacacacgaagttgacacttccatggcctctgtccggggtgtattcccatatgcctctgcgctcttggaaagcgtcacataacttaccctcacagaaggcagctatgccggcaaggcaaggatctacacttgaggtcctacacttgcgtagagaagttcccataaagagaatataatgaaaggcaagctgaagcctgtcattacactctgttaagtccacagtgtcacctgtcatagcttatggacacctcaaaacttttcatatcaaacgcttttcataagccacttggaaaaaacagctttcttacccttccacgttgaaggactttgggtcgttttggccctctattgacaaaaatgggttgttggggtttggcgtgggacccagatatctgcatctctgggtatacattatccaaataccatttaaatgatttacagcccaacttctttctcagttccacacgctcactgatattgccatagcttttcgtcttcaggtcaggtcttaaggaaaaatactgctcctgaatttaaaaaaagtaaaaataagaaaatcgaattttttgttaaaaatgatgatacaactatatagagattttttacacgattaagtccattactaacaatgataataacatgtaccttaaactgtatctgagaatcaatgaaacaggcgtatatatgagatcagtgggtctcaaactcgtgagtctcagtcatcgatgttcttaaaaattacggaaaactcccaggagggtctgcgtgtgtgggctgtgtctgttcatatttatcacacagaaattaaaacagagaaacctacaaattattaattccttaaaataattaaatactcattacaaacacaaaatgtagtgagaacagtgacact

SEQ ID NO: 128401 - DNA, 1047 bp, Homo sapiens
cactgcacttgccatgtcacccagttgtgttcctgaagataatctgtgattcagcctgtgcacttcctgactgccccgatgaggcatcgacgaaaatggcagccgtgtgcccttctgtctccagagggtcagccagaggctgtcgggctcctctgtcacctacacagtccaggaattaagagagttatgtaattgttaaaccctaaaattggaaaagagttaattcagtcaaattcaatgaacaaaattcagccactgcttaggtttcttcccagaatagcacctcactttctcctgccttagctatctgaagtggaatgaaccaagttgaaatctgcttccctgtaagtctagtgcattggtctgtttctgctttgagaccttacagaatcaatatgtggaagaatatgcaaagtgttgttcagtcttaaaattcgttatctaaattttattttatttttcttctctagatctggatctataatgaagagcatgaattggttttaaatagtctcctttgtctagatatgtcagagactcgctcatcagacccgccacggctcatgaaatgccacgggtcaggaggatcccagcagtggacctttggggtgaggagtgctcggtgatgttgggagaatgcgcagaggcccacaaggttgagtgagggagtgtggcagatgaactcattttctaccttgggggtggtcttctcagtctgcagtacagtggtccccccagaaaccacaggtagtacaaaccctgtatatactgtatttctttctagagatacacctgtgataaatttatcaattaggcacagtaagaggttcacaacaataactgaaatgaaacggaacagttagaacagcatactgtggttgcgcagtggctcccgcctgtaatcccagcactgagaaggcggaggtgggcggatcgccgtagcccaacagcctgtttgttttctctataaaaacaaatcagtatactataatacaaattgtgattgcggtcagaaaatatcttattgtattgtgctgcagataacaa

SEQ ID NO: 128402 - DNA, 1048 bp, Homo sapiens
ttttggctagaggtttatcaattttattgatctctcaaatcagcttttagctttattttctctgttttgtttcattcatttctgttctggtatttaatatttcatttctgcctctttgtctaacttgctctttttctgttaagatggaagctaaagtcattgagacttgtatccttttctaatataggtgcttaatgctataaaacttccaagtactgcttcagctgcatgccacacactgttgtattttcatttttggtcagttcaaaatagccttttgatttttttctctgacccataaggtattgggaagtgtgctagttttttataatatttggagatttttccaagtgtctgttattgatttctattctactttgcatgacttgaatttctatacgtatatcacaccttgctcaatatcccagaatatggtctatcttggtaaatgttccaagtattgtgttgctgggtagtgtcaattaggccaagatggttgtttttctgtctacttgttctatcaattattgagaggtgtgttgaaatctcttactacaattgtggatgcgtgtacttcttgcaattttaacagaactttgggattatttcttcttgataagttgaaccttttattcatgaaatgaccctctatatcatctgtagtaatattctctgtgctgaaatctactttgtctatctattcagatgtctttcatatatctatcttcccatccttctaattttaatgtattcataaagtgagtttcttacaggcagcatatagttggatcttgcatttttatctaatctgccttttaactgtggcatttacattcattacacttaatgtgattattgacactgttggatttcaatctgccatcttgctgctcttgttttccatatgtaccatcctggcctttgaagtcaaatgacagataaaatatttaggatgtggcaaactgttttgtggttcagataaaatatctgagtgcatcccctgcaatatgagaccatctctcctcttaagatgtggtttgggaggaaa

SEQ ID NO: 128403 - DNA, 2924 bp, Homo sapiens
agacatcctttcagtcttgagtgaggaaaaatgaaggagggaaaacagagttagctggcagttcatctcacccagaattgcatgccccattcagtaaatcaggggaggtgaaaggcttctgggttttagggagagggctaggaaagcagttgcccttccagtcccctccatccacttgcagggacagcattatgagaagtcacagaaatacagctttctctggtcaggctcccgttctcagatctcgctgtttaaaaatactgcctccctcatttcctctgtgcaagcacaatgcctcttttcagggttcccccagggtcccatggaacctcaataaatcaggtcttccttaatttacgtctgtttcgtttgctggttttaaaatgcaagggagatggaggcagaaacgctattgccttccttgctgtcctttcttaccctgtgtctttgccgtgggcagctctgctatgactataagtttgactttgaagatgaccagcacaagattccgtgtcactgtggagctgtgaactgccggaagtggatgaactgaaatgcattccttgctagctcagcgggcggcttgtccctaggaagaggcgattcaacacaccattggaattttgcagacagaaagagatttttgttttctgttttatgactttttgaaaaagcttctgggagttctgatttcctcagtcctttaggttaaagcagcgccaggaggaagctgacagaagcagcgttcctgaagtggccgaggttaaacggaatcacagaatggtccagcacttttgcttttttttcttttccttttcttttttttttgtttgttttttgttttgtttttcccttgtgggtgggtttcattgttttggttttctagtctcactaaggagaaacttttactggggcaaagagccgatggctgccctgccccgggcaggggccttcctatgaatgtaagactgaaatcaccagcgagggggacagagagtgctggccacggccttattaaaaaggggcaggccctctaacttcaaaatgtttttaaataaagtagacaccactgaacaaggaatgtactgaaatgacttccttagggatagagctaagggataataacttgcactaaatacatttaaatacttgattccatgagtcagtttattgtagtttttgatttctgtaaaataagagaaacttttgtatttattattgaataagtgaatgaagctatttttaaataaagttagaagaaagccaagctgctgctgttacctgcagaactaacaaaccctgttactttgtacagatatgtaaatattttgagaaaaaatacagtataaaaatagttattgaccaaatgctaccaggctctgcagcagctcgggggcttataaaatgttcatagggatgttacaatataattttgtgttataaaatatgccattataattatgtaataaccaaaatttcaacctagagtgttgggggttttttggaaaccgcagtctattagtactcaatggttttatacaccttacttctgacagagcggggcgtatgctacgactacaacttttatagctgttttggtaatttaaactaattttttcatattatattgttgcatccctacttcttcagtcaggtttttttgtgcttacaatttgtgataactgtgaataactgcttaaaaatacacccaaatggaggctgaattttttcttcagcaaaagtagttttgattagaactttgtttcagccacagagaatcatgtaaacgtaataggatcatgtagcagaaacttaaatctaaccctttagccttctatttaacacaaaaatttgaaaaagttaaaaaaaaaaaggagatgtgattatgcttacagctgcaggactctggcaatagggtttttggaagatgtaattttaaaatgtgtttgtatgaactgtttgtttacatttctttaataaaaaaaacactgttttgtgtttgcttgtagaaacttaatcagcattttgaaccaggttagctttttattttgtacttaaaattctggtactgacacttcacaggctaagtataaaatgaagttttgtgtgcacaattcaagtggactgtaaactgttggtatattcagtgatgcagttctgaacttgtatatggcatgatgtatttttatcttacagaataaatcaattgtatatatttttctcttgataaatagctgtatgaaatttgtttcctgaatatttttcttctcttgtacaatatcctgacatcctaccagtatttgtcctaccgggtttttgttgttttctgttctgtataatagtatctaatgttggcaaaaattgaattttttgaagtatacagagtgttatgggttttggaatttgtggacacagatttagaagatcaccatttacaaataaaatattttacatctataagagctgcctagagcttctgtgttaactcctcatattcaaatttgagctcttaaattgaggattgtctgaagttcactgaccatctgatagatctttcacaattagagtgttgatgcgatcaacttggttttcttagattttcaaataagtttagatgtaaattcataattcattctaattatgatactttttccttcccttcgactgaataaagaagggaacttctgtatctttttagggtgtttaccaaatttagaatatccttggtgccttgttcaaagcctgtttttgtttaattggtaaatttagtcttggttatgttgctgtttttttttttttttttttttttttgaggcagcttttcagactttattctatgtggtagactttctttctatcttattgaattatttaacgtattaaatataaaggggttaagaaaaaaactgctcagaatccccttt

SEQ ID NO: 128404 - DNA, 1035 bp, Homo sapiens
agctgcctcaaaaaaaaaaaaaaaaaaaaaaaaacagcaacataaccaagactaaatttaccaattaaacaaaaacaggctttgaacaaggcaccaaggatattctaaatttggtaaacaccctaaaaagatacagaagttcccttctttattcagtcgaagggaaggaaaaagtatcataattagaatgaattatgaatttacatctaaacttatttgaaaatctaagaaaaccaagttgatcgcatcaacactctaattgtgaaagatctatcagatggtcagtgaacttcagacaatcctcaatttaagagctcaaatttgaatatgaggagttaacacagaagctctaggcagctcttatagatgtaaaatattttatttgtaaatggtgatcttctaaatctgtgtccacaaattccaaaacccataacactctgtatacttcaaaaaattcaatttttgccaacattagatactattatacagaacagaaaacaacaaaaacccggtaggacaaatactggtaggatgtcaggatattgtacaagagaagaaaaatattcaggaaacaaatttcatacagctatttatcaagagaaaaatatatacaattgatttattctgtaagataaaaatacatcatgccatatacaagttcagaactgcatcactgaatataccaacagtttacagtccacttgaattgtgcacacaaaacttcattttatacttagcctgtgaagtgtcagtaccagaattttaagtacaaaataaaaagctaacctggttcaaaatgctgattaagtttctacaagcaaacacaaaacagtgttttttttattaaagaaatgtaaacaaacagttcatacaaacacattttaaaattacatcttccaaaaaccctattgccagagtcctgcagctgtaagcataatcacatctcctttttttttttaactttttcaaatttttgtgttaaatagaaggctaaagggttagatttaagtttctgctacatgatcctattacgtt

SEQ ID NO: 128405 - DNA, 1050 bp, Homo sapiens
ccatggtcattgagtacatcgggactatcattcgaaacgaagtagccaacaggaaagagaagctttatgagtctcaggtaggtgtctggtccccgagattgtatacacagcaccatcatcctctccctttctccgtgccagccagacaccctggaaggcagaatgaaatctgtcatgctgcattcagctttaaacaaaagccatatctgtatattagtgtatttttatcagttgtatctctttcaattggtgttacagtttactttgatagacaactgtaaattaatgagcctggcttcacacacaacctactgattccatgctttccattcgtgccatgtaaatgtcatctgtgcctaatagaatatccacagtaaggatgatcaggctgccgttccgttcagtttcgactgagtcctcctggtgtggataggaacacagaggggagtttcaggtcgacattgatgacttactgactgacttttccctcagaaccgtggtgtgtacatgttccgcatggataacgaccatgtgattgacgcgacgctcacaggagggcccgcaaggtgagacagcgaggaacctgacggggagtgcttttgcttgtggggccagtgctggtggagagaacactgaagccaagggaaaggctctcacggcagcctggcggtgactaaacattcagagcaaatgagttgagaatttttatttaaatgttatatttgtgcttctaacaatgggcaaatagaaatttaattagcaaaaactgctttatcaataaatgggaagtttttaaagctgcttctagctgttttacaatacagttttctgacatggtggcttgcaggtatatcaaccattcgtgtgcacctaattgtgtggctgaagtggtgacttttgagagaggacacaaaattatcatcagctccagtcggagaatccagaaaggagaagaggtaagagtgtgagagattgcatctgccatgttgttcagatcctgggcgaatagttccctcctcacacaggtcacttactcacttgtttcccaat

SEQ ID NO: 128406 - DNA, 1112 bp, Homo sapiens
agaagtttgtaggatcttctctttattgatatttggacatttcacagaactacacctcagtggaggtctttttgttgattgctttcctcccttgatgagccctttcaacctggagcatcgtgaccttccgtctgagaaatgtgttttgtattcattcttttgcaagttctgcccctctgtttcctctgtgtttgcactaaaacccctgagattcaggatctcacagtgtggacctgagactagaagcagcagtgtcacctgggagcttgttaggatgtgcaggttcgggggccccagcccagcctcactgaatccagctctggaggtggggcctcctggatgattctcatgcatgtcagagagtaatttctgtcttatatcctttctccccttctgttctttgtttccttgtctctctgttctttctgagacttcctctactttatctgctaatctttcttgtctatttttagagattagctacgagccctttctgctcttgatcttgtttgatattttgtttttacattatgagtggagtatctgtgttttctctgctgttgcccctctctgttgagcctctctcggattctgtgggtgaattagtgctttgcctctactccttccagttctagctttcccctgctaagtcaattacttttcattttaaatagtccattcactcttatacccattcgtgttctcgaggagtgtgcttttactgtgattttagtgggtatcttaactgtgttcaacctgtcacctttaacctgaagcatttttgagagctctggtttctgtctctttacttatttcatcctgccaccctcccatctgtccacctccctggggatcccgtggatgatctaatatgtatcctgtttttctgtgctaatatcttagaactatatacacttttatgtacatatataaaaatggaatcatgttatatttatttttctccgtcttccttttctctgtaataatcagaggtccctctcgatcaactgacgtagcttcatttcattcttttgaatggttacctgatgttccatagtgttgatgaactgcagttaaaccattgcattactgatgagtgtgtatttgattta

SEQ ID NO: 128407 - DNA, 1009 bp, Homo sapiens
tttgaccagcttgagattgtctgtagtctccatcagatggggtgactttgtgtctgctttgcttcttttcagcttcctggggttgaggcatgtgaaaattataccttccgatacggccgaaatcctctcatggaacttcctcttgccgttaaccccacaggttgtgcccgttctgaacctaaaatgagtgcccatgtcaagaggtttgtgttaaggtattttgttttaacttcacatagtacagcccagggtttctaggcgtattagtggtttcctgtgcttgatttgtctgctgcttacaaaccctgctgtctggctgtgtatgtgcccaactacataagagaactcgccgtgtgtctctgctaggcagctttccatgtatgtttctgtcagtaagaatctgaattaacctggttttgggcattactcagaggtatcttcagttttccttgtatttttttcctgttgatatgccattgtctgcaggcctcacaccttaaacagcaccagcacctcaaagtcatttcagagcacagtcactggagaactgaacgcaccttatagtaaacagtttgttcactccaagtcatcgcagtaccggaagatgaaaactgaatggaaatccaatgtgtatctggcacggtctcggattcaggtgaagaaatactttgtgtacaggaagtggagagacagggtggagtctagcaatctgaagctattgatgtccagtatgtgaaaatgatttcacatagctgcagggacagaaacgtgttttcaaaatcgtatcaaatcctgtcccttggtaacactagggatttaatatgtagtcttgggacttggtgattggcttccccaaagggaaagcagaccagtggaatccacatctttgcatcttgttgagagctcctgggaggcaggtagcattgtaatttgcacacactggatttgtggagtgctcagtagagctgtttcaagcacttgagagaaatacaaatgaaaatattttcca

SEQ ID NO: 128408 - DNA, 1067 bp, Homo sapiens
tatgtggagctgctttcttaagtttagcacttaaaaaaaaaaagtctgaaaatactctaaagataattccaaagaaaatatcaatttaacattttaatttaaatctgaggggaaaggaacatagctatagacattaccaattagactaatcattttaaaatctggtatgttatatggccactatgaaagtaaatgaactgtttgcatgaatttcagttacattaagttttttcactttaatgtccttaatctattattttccccaaaatttaggtctttaaaaaaaattgctgccatttaataaacaggttcattagattattaccaaacagatttattagattattgcccaacaggatttatttggaaattagtaaatccttgtgagtggttattcttcattttgctcttgttttttatactgtatcctatttcctataaaaattatgtttttgtccctgtgtaggtgtctgggataagattttggagcctgtggcatgtgtgagaaaaaagtctgaaatgctccagcttttcccagcgtatttaaaaggagaggatctgtttggcctgaccgtctctgcagtggcacgcatagcggaatcagtgagtgtcttggtcaggctttgagattggaattgctttcctgattcagtgtgaccacttgaacacatgctgtaacatttgtggcactcttcagaaagtgactgagcctgtgcattaacccgtttctcttagaggaataaggcattggtgattaatcgggagagctcagccgtgttggtattcacccagttgaggtagttaaccaacttcaggttctcttccaggctggaggcaagcaggggtgaaggacaccaggcttgtcacatcttctgggtgtgctggatgggtgaggacactctcctcttcccttgcctttctgaagtttctcccacctcagaatgtcagtgtgcccatttcctgacacttgggtatttatggccactctcctgccctcttcctaggatgaagtcactagagggcagtagatcgcagcagcactgatttctgtcctctcttgacatttc

SEQ ID NO: 128409 - DNA, 1594 bp, Homo sapiens
acaagaattgctttccgggcttgtgaattatttttctttgtcatggtttctttatgttgcccaggaatccattccttcattgccacaatcacctatgagagaaacgccttccaaagcatttcatcagtacagcaacaacatctccactttggatgtgcactgtctcccccagctcccagagaaagcttctccccctgcctcaccacccatcgccttccctcctgcttttgaagcagcccaagtcgaggccaagccagatgagctgaaggtgacagtcaagctgaagcctcggctaagagctgtccatggtgggtttgaagattgcaggccgctcaataaaaaatggagaggaatgaaatggaagaagtggagcattcatattgtaatccctaaggggacatttaaaccaccttgtgaggatgaaatagatgaatttctaaagaaattgggcacttcccttaaacctgatcctgtgcccaaagactatcggaaatgttgcttttgtcatgaagaaggtgatggattgacagatggaccagcaaggctactcaaccttgacttggatctgtgggtccacttgaactgcgctctgtggtccacggaggtctatgagactcaggctggtgccttaataaatgtggagctagctctgaggagaggcctacaaatgaaatgtgtcttctgtcacaagacgggtgccactagtggatgccacagatttcgatgcaccaacatttatcacttcacttgcgccattaaagcacaatgcatgttttttaaggacaaaactatgctttgccccatgcacaaaccaaagggaattcatgagcaagaattaagttactttgcagtcttcaggagggtctatgttcagcgtgatgaggtgcgacagattgctagcatcgtgcaacgaggagaacgggaccatacctttcgcgtgggtagcctcatcttccacacaattggtcagctgcttccacagcagatgcaagcattccattctcctaaagcactcttccctgtgggctatgaagccagccggctgtactggagcactcgctatgccaataggcgctgccgctacctgtgctccattgaggagaaggatgggcgcccagtgtttgtcatcaggattgtggaacaaggccatgaagacctggttctaagtgacatctcacctaaaggtaacgtctgccgttcacatgctgtgcagtgctacttactctgatgtcaggctaatgaatgtattttgtcaattttccatgtttgtctcatgttagttttatattttataatgtgtatttttcatttacaaatgccaatgtttgtgttctcacaccttgctctctttgctatacagttgtctaaacactttcataatcaatatatctttgaacatacgagttggtgaggtaaatccgagaatgatttgtagataaaggttgcctgtcatttgcattggggacctcctttttctttttctttttctttttttttttttttttttttgagacggagtttctcttttgttgcacaggctggactgcaatggcgcgatctcagttccctgcaacctccgcctcctgggttcaag

SEQ ID NO: 128410 - DNA, 2044 bp, Homo sapiens
actctgaattctgtgaagacatttcagtagagaccaaactagaagtccaatgatgtgatattttggttatcaacaaaatacagcagtagcaagacctttgtctgttcttacgggttgtgtcagagctggagggaagcccctggaagtaagctttctgaccacctgtaggaactgacggggtctgtcagatgttacaatatctaaaatagtttaatgtgttactagatatttaatgttaattggaatccctttatgaggatttctgtttataaatttctttttttggatattagttcgttagagctaatttttttcctgaggttctttaagtctaaataaaatttgttggattttcttagaatctatgtatcatgcaaagaggatttatcctaagtgtgtatttttcttcagtggttcactgttgccttctgggtgaataatacagcatttgcatttggttttagaacattagcagtgttgtggctgcattttccgaccttcttcacgtccgaatccctaacagctatgaggttagcagtgctccagatgtcccatccatgggtttggtcagtagccacagaatcaacccgggtttggagtatcgacagcatttacttctccgtgggcctccgccaggatctgcaaaccctcccagattagtgagctcttaccggctgaagcagcctaatgtaccatttcctccaacaagcaatggtgagctagtgagctttttgttaaccccaaatccattcctgattcaaaagttaagcttactctttgagatactgattatcttttaacaacggacaggtaacatgctggcgtatagtccttggtgaacttaccatgtgtgggtgttctgttttctgtgctgtgattttgacctctagtgctttggcctgtgtattctgtcatgctgtcaccaggggctatgtgagtgccagccatctgtgcaggctgccagaagaagcctgtgacgggcttgcccttgagcagcttttgttcttcctgtctcccaacccccatcccgctgcacctgggccacctggtacagatggggctggtgacctgacgtgggttctgtttcctgttctcctctgctttccatcctcacctacctcttgttttacctctgcaccagctctatagggcccttctcttcccacagaggtgttcatgccccccatctctgagaatggaacaacttccttagaccgaccatgatgtcgctttccttcctgcctcactggcaatcttacaggcgtgctcagtccaggccctggcttcctcctcttggcttctagctgttctgtcactttttccctgctcctttttgccttcacactgcacctgaatgatgctttctaattcctgagtccttatttaccttcttatccttggccttggctctttcctcatttctgactctgcaagtcacacttatttaagactcttatacatatgtcattgtatctttcataaaatgtttttttaccatcttaacctgcaagcaaaagtaatatctgtttccctctctgtcttactttgtacttagactgaatagtaatctctcttggtgacttagttttattagattcttcttttatactgccattgctttcccagctatttgagaataggcatgtttctttatttttgccctagtgtcagataatcgactctgtaaccattgcttagaagataaattttttttattaattaaagaataatgttaatgaaccatgttgtaatgagttgatactgcataatttttcaccatgtgccaccttgtgtcatcagtcagttttaattactaacaaaagttgattgcctttaggtctttctggatataaggattctagtcatggtattgcagaaagcgcagcactcagaccacagtggtgttgtcattgtaaagtggttattcttggaagtggtgtgcggaaatctttcaaagatctgacccttttgaacaaggtactttgctactccttttatgaccccacctcctacctccagcgaaaatgtccttggcagtgtctct

SEQ ID NO: 128411 - DNA, 2707 bp, Homo sapiens
tttcatagaactagggcatatcttaatgagaacttaaaggatattttgataatattttgcaatttcttgattgcattttaaagttatccttcactagctataaccacgaaacttgaagaattgcataaataaaatcaggtagaaaggaaattagcttcttaatttcagagcttaagtagtcaagctgggtaaagtaagcaagttggtatgtccataaaatcacgagtatctgttccactaagaagcctcctggccttgtaggtattgttttcttggtgtgcaagatacatcttgattacatttctgtagccttgcttctatgtgcaaaaaattcacagaactacgttttagcaaggtcattgcatattcgctcagtagcatataatttaaattttttggtctcctgcagcagaataatttaagtaatcctccaacaccccctgcctctcttcctcctacaccacctcctatggcttgtcagaagatggccaatggttttgcaacaactgaagaacttgctggaaaagccggagtgttagtgagccatgaaggtatgattatagcctccaaatttcacacctcggagaaatgtgcctctgccagttgtgtattgtgaaatggcaatagaattgtaaagttctacccatttatcaatattgactgaatgtatttatggttttgtgtttttgcttttccagttaccaaaactctaggacctaaaccatttcagctgcccttcagaccccaggacgacttgttggcccgagctcttgctcagggccccaagacagttgatgtgccagcctccctcccaacaccacctcataacaatcaggaagaattaaggtacaggttatttttttctcaaataattcttagttatttcttcttttaaaaaaaataaatgtatgtatgtggcataatgtctttaggaatagcatgtaaaaacatttgaagagtacaatttggtgaataatcttcaggatttaaagtttataagacattgttaccattaaacataattagtttgcatttttttaagcctacatcatatagagagttaaataatctaatagacagttaagtattagattatttaatctaattaaataatctaatagacatgaaggtagtggaaaatctccatgcaacatatttcagaaatcattgtcctttaaagggtattaatgtgatttattgggtttattgttgtttgtagatgtctaaaatgaaagagcagaagttgctatatcagagaacgccgtcgtggaagagagtttaagaactgtctggggtttgatgtctttgtgtcagttctttaactgtaagattctaattggggagaatcaagttcccttagtagatgatcgctagccaactctttagatccagagggttcttacaacttcatcaaataattatctcttctttggaaaatctgcccactaccctctatttgatgagacatttatttaacctaagtcccttactttattaatggggaaactttggaccgaagtggagaataatctgtcccaattgaggatccaggtcctctttctactgtacctcagtaggccagcctttcttgggtctcctgcatgacagctacttctctgcgtgaggagtgggagacagcagttccacagggttgtggaacttagtctgagacctcacaattggcctggtagactcaaacttgaactcaacagaagggaccagtcttttgtttttctcacctcactttatcagttaagaaaaataagggccgatcaagtcaatggctaagttttctcccatcttgccagtgtaaagagcagcagtaggacagctgttttcccagtcaggtgaatgcaggtgtgaccattgcatatgtgttggacttctctttccttttttttttgtctttttaaagttttccttttttattgttaaatccaaccagcagctctttccttttcaagctgcaggagtgctgccctaggctcaacgatctgggattttgaaaaggtgctttcatgctctctatgttacatgctaatcagaacatcttcctctttggcaggtcttcaaactttggtgctgaagctttcgttaaaaggaaacataccatttaaattattttgtaactaaatattgttcttgtatttttttcccagtgtggctctgagctgattcatttgctgctcatcgtataggtgctgcccagagtatccttacagctgtattcacagatgtcagcagggttggtacaggaagcccccagtggtggatttgcagactttgatgtgtgtgtttatgttttttcaggatacaggatcactgtggtgatcgagatactcctgacagttttgttccctcatcctctcctgagagtgtggttggggtagaagtgagcaggtatccagatctgtcattggtcaaggaggagcctccagaaccggtgccgtcccccatcattccaattcttcctagcactgctgggaaaagtaagaacaacacttaaccttattatttccctttacactacgccaatttactaatgtaaatattttgattttgaaaatccattaacactattttcctcttttttttctctctttttaaaggttcagaatcaagaaggaatgacatcaaaactgagccaggcactttatattttgcgtcaccttttggtccttccccaaatggtcccagatcaggtctt

SEQ ID NO: 128412 - DNA, 1031 bp, Homo sapiens
acggtaatacaaatggattgataggtgatagtcaagattttcttatgttcataaggagtagcctcagtaccaagaaaaaaatctgtcctcagtactttgttgtgactctgaatccaaagaaacacattgtgaattctgttctacacctttgtggttgttacagaaggtgggagacagttgctaacagtgctgttggtggtacccagcctcagttgatgccccagtttttgctgagcatagataagaaatatgtttttcttgttagatgcctggcagcattcatttagtacagagcttatttttaagtctcaaaggtctgtagtctctctcacttactccagcattttgatacttgaaaattttaagtctcatttttctgaagccttattcaacaaagttgcttcgggtcttagaaagttgagctacactgagttccttttatcatgtacattactcttaaatgtgttttttaatagcagctctctctgctccctctaatggaaccaatcattggagtgaactttgcgcactttcttccttatggcagtggccaatttaatagtgggaatcgacttctaggaacttttggcagtgctaccctggaaggggtttcggactactattctcagttgatctacaaggtatgtttctctgccaaggtgttgtcttgcttcatctttgggtaacatgtcagaattgatagagcttgtcttatttttgtatttagtttacatctactcttccaagttttattaaaacttaagttcagctacagggttaaaattttacctggtgaagtatttctagcataaacatttgaagttgtttttataggtaagaatacaaattgcaagaaatatctattatgtacttccatggtagtggaaatccttatttccttataacctttattaacacttaaaatgaattcaaaaatcattgtaaatggtggggatttaaaaaaagtagtagtttaccttgaaaaatgaaattaaacaattttaagtatatctaataatttaggtattaat

SEQ ID NO: 128413 - DNA, 1140 bp, Homo sapiens
atacctttacaagaatctgtcccctttatttcagttaacttcattaagatagttccaaaactggagtttgagtcatgggaattggtctgcttaatagctcttgcctgtttatctttcagaaggtgcagtgccattaccagtgcattcataaagctgtccctagagagcttctcaaattggatttcattttcatattttaattaagggttgagtggtatatttagttgtccagttttttcattttaagattgttaatgaagctcatctttttgcaagtgttgctttttttcttgtctttgaccattcagtagagattgagtgttgacttgatagatttgtgtaatttttgtaaattttactggttatgcttttacagttgtcaccagtaaatataggcaactctccagcacagtctccatccactttctccaagacatcttataccctgaggagtactgaataacttgcagccttctgtctttttacccttctatgtataccacatgctgctgcttctgcctgttctgttctcccttcttatatacgtctggacaatatatttttatcttttgaaatgcagttcttgagtcatctttttccagatacctttctcacctctcccaatctcaaatatgtgttgatgctcgtgttctcacatagcgatttctgttgtaccacttaacattatttaaatagctccttgaaggacgtagactacattttgagcatgtttatattaaaatttgtgggtgtaagaatgtttaatggcatggggaacaaccacgtcaagtttaaaaagtagcccctccccccaaattaaagtgtgatttaaataaatatatagtgatttaaatatatataaatatatacatctatatataaatatatatataaatataaatatataaatatatatatataattaatttttaggttcttgccactcagagtgcagtccttggggatccgcagcatccacatcaggtgggagctttgtaacacatgcagaatctcccgccacacacctgcttctcagaatgtagacttaggaagatccccaggtgattcctgagcatctgaaggggagaagtactgctctaggcaggtgattctcaaagctaaagtgtgaggagcaccagg

SEQ ID NO: 128414 - DNA, 2876 bp, Homo sapiens
ttaatctgggtggggggtgtgatattcgtgctggtaattcatcttgtcttaaaatgttgtacaggccgggcgcagtggctcacgcctgtaatcccagcactttgggaggccgaggcgggcggatcacgaggtcaggagatcgagaccatcctggctaacacggtgaaaccccgtctctactaaaaatacaaaaaattagccgggcgtggtagcgggcgcctgtagtcccagctactcgggaggctgaggcaggagaatggcgtgaacccgggaggcggagcttgcagtgagccgagatcgcgccactgcactccagcctgggcgacagagcgagactccgtctcaaaaaaaaaaaaaaaatgttgtacaatttatatatttaagaaatgaaatcttaacatttaaatggttcaagtttgagttaagtctgttattctaacattgtatattgtaatttctaggacatcaaaattagctgcttgtgtaaccttttttattgtatattttttatgtatagtataaatagtatatatgagtttcaccataagattttaatattttactaaaccgtttttgatatttcatatgtgaagcacttttacagataactttataaaaatcctgttgttaaagagattgacagttgttagttaaggcttatcaattcaatttttttgtgacttttgcagttacccaagcaaaatatgtttgcttctgcagggccaaactgccctctgtgtaacctcaaccacagtcatcagccagtgttttacttcagtacctatgctgtatagaaatgagtaatgatgcattttgttattccagattcgtaaacaacagaaagaacatgctgaattgattgaagattatcggatcaaacagcagcagcaatgtgcaatggccccacctaccatgatgcccagtgtccagccccagccacccctaattccaggtgccactccacccaccatgagccaacccacctttcccatggtgccacagcagcttcagcaccagcagcacacaacagttatttctggccatactagccctgttagaatgcccagtttacctggatggcaacccaacagtgctcctgcccacctgcccctcaatcctcctagaattcagcccccaattgcccagttaccaataaaaacttgtacaccagccccagggacagtctcaaatgcaaatccacagagtggaccaccacctcgggtagaatttgatgacaacaatccctttagtgaaagttttcaagaacgggaacgtaaggaacgtttacgagaacagcaagagagacaacggatccaactcatgcaggaggtagatagacaaagagctttgcagcagaggatggaaatggagcagcatggtatggtgggctctgagataagtagtagtaggacatctgtgtcccagattcccttctacagttccgacttaccttgtgattttatgcaacctctaggaccccttcagcagtctccacaacaccaacagcaaatggggcaggttttacagcagcagaatatacaacaaggatcaattaattcaccctccacccaaactttcatgcagactaatgagcgaaggcaggtaggccctccttcatttgttcctgattcaccatcaatccctgttggaagcccaaatttttcttctgtgaagcagggacatggaaatctttctgggaccagcttccagcagtccccagtgaggccttcttttacacctgctttaccagcagcacctccagtagctaatagcagtctcccatgtggccaagattctactataacccatggacacagttatccgggatcaacccaatcgctcattcagttgtattctgatataatcccagaggaaaaagggaaaaagaaaagaacaagaaagaagaaaagagatgatgatgcagaatccaccaaggctccatcaactccccattcagatataactgccccaccgactccaggcatctcagaaactacctctactcctgcagtgagcacacccagtgagcttcctcaacaagccgaccaagagtcggtggaaccagtcggcccatccactcccaatatggcagcaggccagctatgtacagaattagagaacaaactgcccaatagtgatttctcacaagcaactccaaatcaacagacgtatgcaaattcagaagtagacaagctctccatggaaacccctgccaaaacagaagagataaaactggaaaaggctgagacagagtcctgcccaggccaagaggagcctaaattggaggaacagaatggtagtaaggtagaaggaaacgctgtagcctgtcctgtctcctcagcacagagtcctccccattctgctggggcccctgctgccaaaggagactcagggaatgaacttctgaaacacttgttgaaaaataaaaagtcatcttctcttttgaatcaaaaacctgagggcagtatttgttcagaagatgactgtacaaaggataataaactagttgagaagcagaacccagctgaaggactggtaagtgtaaatcataaaaacgacaacttttttcttttgttttaaattatacttacagcagattagtaccagcaactgtatttccacattattctacaacctttttattctaaaggaccattttttattttgtcatttctacctctctggaacccatgtttttacttatatctaaactatattaaataataatttgtttactattttttaaaaagcaaaggcatgtattgcatttcatatataacgtgatgtgtagcaactggttattaccacattgagttgatatgactaaagcaaagtaagtaaatgtctatgtactttattgtaaataagtgattaat

SEQ ID NO: 128415 - DNA, 1118 bp, Homo sapiens
ataatattgtagtttctatgtatattcaaaacaaggaaatgctgagttttatttactacttagttttgttttggtttttgtttctgagacggagtttcgctgttgttgcccaggatagagtgcaatggctcactgcagccttcacctccaaggttcaagcgattctcctgcatcagcctctggagtagctcggatcacaggcacgtgccaccatgcgcagctaatttttgtatttttggtagagacagggtttcaccatgttggtcaggctgttcttgaacttctgacctcaggtgatccacctgcctccccctcccaaagtgctgcaattacaggcatgagccactgcacccgaccagcacttagttttaaatatggacctcagaatttgaggcctttcagcatctgatgctcttttagcatcatgcatctgccggttagatacattagtcatgtatcaggtatatggcttagtattctactgactgctttttagaaatggaagtgatagtcccttcttagagtagtgtgatatgttgagttaggatgatagaccatgtgtgatattcagattagaagatcatttagaccagacctgtagcagtgggtagggtgacagatcaatgaaaaacctgagtaaaaaatttaaaaacatattctatatcctaatagtacttaaatagtaatatacagcttttggaatacatttttaaaattgtatgtatatcttgatacgttaaagcatttgataatgccagaggaaatactttcatgtaagcagtaatgcttctgtgaagtttttatagttttaattagaatgagtaacatttctctaaacacgtttaaccatgcagactgatcttggtcagtcgtccatttttgatttgctttaacattagatatagaaatgtatgaaaatgtatgaaaattcttaaattgggaaatgtcttttgttttagaatataaaataactaagctctcaattagtttttaacacagactggaatgagaaaacatttccttagagttcgttataaaactaaatcaacttatttttattctgaagtcttgaattcattttatcgtaaagtggagtgaggcacataatagagtaaaac

SEQ ID NO: 128416 - DNA, 1027 bp, Homo sapiens
aaagatttggaagattggatttcctgattactcaagtcaaagtatttaggtctgtgctcttttaaatacctttagaattgttcatgttatctaagatttttttcagttaagacactgagtgattaaagcaattataaattcagttctaaaataaaatgttcccaaaccggttttgaatcagaaaaagaaagttacaaggaatagataagaggacagttggaagttggagttacagagtttgtcttttctctcttaggagaaaaacagaaattacgcattaaagaagacagtaggggttatttcaatatctgaatttttgaaattatgccctctaagggttgttaaccacatggcactgtttcttaaattttgatcatggaccaccatgagaattatggggtaatttttttaaaatgcagattattttgctctactgcagacctactaaataagaatatctggagatggttgcctgtgtgtctgtatttttagcaagcgtcatgaatgagtcttacgtgtattactatatgagaacctctgtcaataaagtaagcatagagcctcaatttagtctagttatcttgttgaaaaacttttatataaaaaatgtggatgattatagaattgaatataaaatttgcacgaatttaagatgtatatatttcaaagaaatttgaattcttaagggtataattcttttcaattgttgagatactttggacatggttaagaagcatttttgagatcaaagtagagatagtggtttccaatgattttcattattgagcaatatttattaacactatttctctatcatagagattcctaactgttttatgtcttgaatatttttggattccagtgaagcctttgaaattctcagaatgttttatatgcagaaaatttaagacatagcattacgaaggaaatgattatacttgaaatatagttattaaaatataattaaatttatgtatatatgttccttaaagtattaacaaatttagcaataaaccataatttgaaa

SEQ ID NO: 128417 - DNA, 1038 bp, Homo sapiens
tcagtcatggaaggatgaatttaagaaaattatgatggaaataaagcttcttactgtccttttgtgtatgacaaatgcttggcgattttttgctatataaacctctttaacttgtttctaatggtttactgattctaaaaacaacaaaagcaatgcagtcaaaatgcctcagtgcctctaagaataagaattagcaatcaaagggcacgtgtctaagcagtgtgccttattctaaataataaaattgacattccattttatatatccccaatttcatcattttgctccctttttttcatttagatgcaaataggttttttcgtagtagcttcttattgagaggttatacccttaagaaattggtgcatttttcttttaagagtgataactaatttagtagaattccttagtattgcaaattcttatttgtgatgttatatttactaaagaagccattctgattagcattgcaaaagtttggatgaaaggaaattaattgcattgctttagattattgcttataatctcccttaaacttgactttttgttttaattcctgcaggactaaggtattaaagcatgattcagttaaggactactgagatgcgattaaacccaggataaggttgccatctcagaaatctgtaatgattattaaataataaaatttaagagcttgtaatatttgaattacttcttagtgtacgttgaactaattactatgaaataagtaactttatatttcttttctagattttgatgcaattacagatcctataatgaaagccaaaatggtggcccttaaaggtataaataaagtgatggcacaaaacaatctgggcatgccaccaatggtgatgagcaggtaggtggagtggctgcttgtttctactgggcatctagacattcatgaaatcattactagtttttagaaaaaacatacagaaaatggaaagcccttgtctaggaatgaacaacactatttaagttgtcatggcatcagctcgatatgatcagatacaaaatgctataccaatt

SEQ ID NO: 128418 - DNA, 1403 bp, Homo sapiens
actgggccaagcatatattgaactgagacatagggctcctgacggaaggcaacggctgcctttcagtgctccacctggcagcgttgtagaggcatcttctaatctgagacatggaaacttcattccccggccagactttccgggccctagacacacagaccccatgcgacgacctccccagggtctacctaatcagctacctgtgcacccagatttggaacaagtgccaccatctcaacaagagcaaggtcattctgtccattcatcttctatggtcatgaggactctgaaccatccactaggtggtgaattttcagaagctcctttgtcaacatctgtaccgtctgaaacaacgtctgataatttacagataaccacccagccttctgatggtctagaggaaaaacttgattctgatgacccttctgtgaaggaactggatgttaaagaccttgagggggttgaagtcaaagacttagatgatgaagatcttgaaaacttaaatttagatacagaggatggcaaggtagttgaattggatactttagataatttggaaactaatgatcccaacctggatgacctcttaaggtcaggagagtttgatatcattgcatatacagatccagaacttgacatgggagataagaaaagcatgtttaatgaggaactagaccttccaattgatgataagttagataatcagtgtgtatctgttgaaccaaaaaaaaaggaacaagaaaacaaaactctggttctctctgataaacattcaccacagaaaaaatccactgttaccaatgaggtaaaaacggaagtactgtctccaaattctaaggtggaatccaaatgtgaaactgaaaaaaatgatgagaataaagataatgttgacactccttgctcacaggcttctgctcactcagacctaaatgatggagaaaagacttctttgcatccttgtgatccagatctatttgagaaaagaaccaatcgagaaactgctggccccagtgcaaatgtcattcaggcatccactcaactacctgctcaagatgtaataaactcttgtggcataactggatcaactccagttctctcaagtttacttgctaatgagaaatctgataattcagacattaggccatcggggtctccaccaccaccaactctgccggcctccccatccaatcatgtgtcaagtttgcctcctttcatagcaccgcctggccgtgttttggataatgccatgaattctaatgtgacagtagtctctagggtaaaccatgttttttctcagggtgtgcaggtaaacccagggctcattccaggtcaatcaacagttaaccacagtctggggacaggaaaacctgcaactcaaactgggcctcaaacaagtcagtctg

SEQ ID NO: 128419 - DNA, 1459 bp, Homo sapiens
ttaaaataaatgagtgagtaatcagtatgaacagcaaagctgcaagtagttactagatggtacctggcttgtgctccatatggaatttctggcttgtgctccatatggaatttctaaagagtgacaggtttgtctttcatattttaacttttcctactgtgttttaatttctcaatgtcacttttagacatgccactttcttaatgaaaaacttttttttctttgctttgtttcttacagcatttattctgtttcacttttattgcctacaggtctttaaattttgtctcaatatacattagtcacaagacaaaatcgtctgaatttttagtaaatttttgtaattcaaaacattatctcctttgctatggaaaatttttactgtaaaattaagagtctcaggtttttattccagtacttgcctcactcagtatctgctgtactctaggtttttagcaaatggcttaatatctgagaaaatactgaaattttaaaaaacatatttactatatttaggtcctgctgatgacccattagctgatatttctgaagttttaaacacagatgatgacattcttggaataatttcagatgatctagcaaaatcagttgatcattcaggtatatatgaatactgtttaccctttttctggtttctgatgtgagcgagaggtgtatgatgtgtggaacaagtttagccttttgtctgtttcccagtaactgtgtttttgtttttggctttgttaaaggactcagcattttctttgatctgcctcagctttcctgctttaggaggggtatagcaagttagttaatttctgtcgtctttctaattgcatcacatttaaggcatgttgccttaaagtcttgctgtatcttttttcttcttttgtttgtattttccctcacttcctgctcctgtggtaatcatccattttatttggtttgggtcttataggtcttgatttatgcactttccaggttgagagctcaccttttccatttggtaagaaactgagcaatggatgacggctgactagaagtagtcttctttttttatagtgatttcagctgaaacaacctgtaggtgcatgctgtttatcagtagtgctaatttgtcactaatccatactttgcttttccctttttgtgtgtggctaaagcatagtatagctgtactgtacttcgggtgactttctcagtagtttttctttaatgaataattttatttttgttaatatgtggtttacaatattacctaaatgtcgtagagctagttcctaatataagatcaaataagaacagactaaatttttactttttaatagtaataatattgagaaagcatgaaaaaaatgtagatgataaaccacttttacatgtgactcttacaaatttgagctgcagcatgttacaattttataaaatgtaatgtacataatcagaatgtgcctataga

SEQ ID NO: 128420 - DNA, 1050 bp, Homo sapiens
ttcaaaacctagattaattgttctttgcaattgaactactcttttcactttataatggaaaattaatgactaaaggcttttttttaacatgtcattcattgtagcctattatatcaattttaatgatttattcagatataaaatcctttaggtaggggcaaacttgtaaaacagtctttaaaaaattagttataattgtatagtagaattccattactttaaaacaaaaaactgctatatgactcctaaaaaaattatccagattttttttcattcaactacagtgttgtcattattgaaataattttctctaaaaagttcctggatatttgggcacgcaaaacttaatgtgatatgttacatatgaattacattttgaaaactatataatgggaccaagactgtttgacagaagtatttgacctggaatattacatttatgccctcctcccccttttaagtaaaaataagcttgagatggattaaaaatttcagtttctctttactgaatgactaatataattattaaagctagcctaaacaagagttccaatagtttcttggttaagcccaaacccgtagaatcctccttgacttttctttccctttcattcatccacgtttgtgtctgccttcaaaatacgtcccaaagccgaccacttgtctcagctttccttagaaccctggtgctgtcatcacctcacctctcagactgcaccagtgcccttttctaatcttaccagcccctctctaattcccacccctcatctgctctacatatagcagccagtatgttccctttaaaatattagtcatctcctatctttcagcctcccagcaacttctcattacacttcagaataaaacccagtcttccccataatctctaaaatcttaacataatcttgccctagctgcctcttttttatccttaccacagtttttcttactgttaacactctggcctctcgttggcaaacccggcttgccccaggggctttatgtctgctttgccttagtttggagggttatctccatctttgtgcatat

SEQ ID NO: 128421 - DNA, 1623 bp, Homo sapiens
gatagttctatgcctgttgatagacattaaggccatttttacttcttgacattacaaaatatgctacagtgaacttttttgtgcatgtttggcaagaatgtgttaaatgttgtattgcaaaattgtcctgtatggaggatcctttttccagatagactacatcataggatatagactaaagcagagttcctgggttgaagcagggtaaaggggtggaactgtgcttcccttttgtctttggtattgatttttgagaaattttggagagatcttggagttgcaaggaacccagcttgaaagtatattgaaatggaaaaatgttaatatgcctaaataaatagaaaaccacaagcctttagtagctgtaaatattgcacacatagtatggctaaactgactataaaaccgtctttcagattgatgatgtaagtagtcttatagtgtaagtgtggttatatgaatcaatagattacaaatctacctgaagtaaatattaaagccgtagatcaaagtcttatgctgtcctctgcaagtaatctataaaaattaataatactcatgaagctattctgcagtttctagaaacctttggtataattgtgtggttttatttccataattttgtctctagtaaagctaccaaaaaatcttatttttaaaataaggagaatctatataaaataattgacaggatatttctattttttaatacttctgtattcagtttctatattgttaaatataaaccttttctgttatttctgcttccttgtcaaaaaccatgacagaataatctattgtctttttagaattttctaaccatttttgtatgtgcttatcttcatctaggaagctttctttggaaaagatcttctagatacaagtagacaaagcaagataagtttagataatctgtcagaagatggagctcagcttttatataaaacaaacatgaacacaggtttcttggatccttccttagatccactacttagttcatcctcggctccaacaaaatctggaactcacggtatgtagaattattcacagatattttctttatatcatataacatacatcttcctttcagttaaatctttttgaaatgtttttgtttggcctcatatgcattttaaaaatcaacagcattgaagtataacttacattcagtaagtggaactattttaagtggacaggtgtataagatgtagcaaattaatttacctgtgtaactagtaccaacatcaagagttgtgaaggaaaacatttggtttacactttgctgagggcaatgtgaggggttataatttggccaacagtgactttttgactaaaaatctaagatagatttttgttaatcatacagcttaaattcaaaacagagaaaccgaaatggatgtgggggtacttgggaacttgctggcatactgtgttactacagtgaagtctgttgccctaggtcatggtttcttactgctgacagtttgcaccagtaattctttgttgtgggagggagcctttctggtgtatagaaggatgtttaacagcatctttggcctcatgatgatcaaaaatatctccagatattgccaaataccttttggttttggtgggcaaaatcac

SEQ ID NO: 128422 - DNA, 1042 bp, Homo sapiens
gtacgctaaattcatttaaaaaaataaagtaattgtgctacggtgttataactacggtgatgtctgtatgtggtgggaatttttcagctccattataatcttatgggaccactgccttgacatgcagccctttgttgaccaacatcattatgcagtgcatgactgttatgtgatgtatgaggcactaatatttgtcaaatagataagccagcgtaatttagtgtttgatatttacactgatactgttgagaagaggaagtgcacacaggtctttttgtattctgtttgataagtgataagagtggctttgccttttttttttttttttttggtcgtttttaacttctattttacctaaaaatcaggttattgatttagattagcacagatttaattttggaaaatgacttactattcaagataaagcagttttatcctgtgtactgtggaaatgtagggagaaattacttatcagtttacctaatttcttttttggataggtattggtggatttatggtgcggcaaagaagtcgaactgggcaagggaaaaccaaaagatctgtgatcagaaaagattcctcaggctctatttccgagcagttaccttgcagagatgatggtatagtactgacttaaaaaaaaattttttttttaatgtaaccctttggtcttgatatttctattggaaaaaactatcctaaataatgttacagtcaataagagccttattgcctcttattgttactcaataagagtcttattgccttttattgatgaaaggatttgagtgcgtatagagttcatatctgtaatacagtaatcaggttttataaggaaatggtttaaatccaatagactttattcttttgagattttttgacaagctcttttttcctgtatcaaattattaaatatattttctatatttaaatataaatggtttagggactgaataacttagttacataaggtactttctggtcatctccaaagcctttctttgactgccttagctacttatcatataatttgaaattctca

SEQ ID NO: 128423 - DNA, 1073 bp, Homo sapiens
atgatgataggtaacatgggaaaaaggagaaagtttattttaaattagtagttcattttggatatacagttttcagtaactaggtaatattcaattatagctgtggttgaagctcagaagagagttctagtctagagacctggacctgaagacataattaaaagcaagtgaatttgttaagtgcaaatggattgcacttaacagaactctgagttctgtgttccccttctctgattatgttttatttcatgggaacactgcactaagcagcacaatttctacaaccatttggggcttcttctatctcctttcatactttccctaccaacagggatgtacaattaaaatggctcagcaacaaccctactttttattccccattatgtagggattatatatttgataggtttttccagttttgtgtatacatttacttttttccagaaggagaacttatggattgtgatggaaaatcagaatctagtcctgagcgggaagctgtggatgatgaaactaagggagtggaaggaacagatggtgtcaaaaagagaaaaaggaaaccatacagaccaggtatagtgcctgaggtagacatttcaatatcatcaacacttggttaattaaagaaaaatacaatactgaagacttcaattaaaattaaatattcaggcttcagaactgtctaaacaaaaatatgtgcacataaattaaagaactaaactatttgaatacgactttttagctctagagttctttattttgaatgtgtgaatacttcacaatgaatcattattgaatgccttgtcccaaatgttaaccattttattaaaggctttactagattggcttttgttcatacttggactttgaaggccatttatatagttcctctggatgtgtacttctgtaacgcttttaattttcagtattcactttctaatatctttttttgaaaaaacttatttcagtgtttatgcaggagtgccagtaagtatacagtgtgaaggggaataagacagagttattatggctcctagaatttatagtccagttaaaaaccatgactgattaaa

SEQ ID NO: 128424 - DNA, 1690 bp, Homo sapiens
tgccttacattaatttttttggtattttttctattgattctaagcatggaaatgtagatggagattttgttgatgtattttcaaattatgtatcaataatagggaagcttacttgatttctttaaaatctggtcactatatctataaatatagtggacattaaatgtacagcataaggtaattatgtggactttaaaaaggcgttaaaatatgtgccattttctattattctgctcagtaggcttctaaaagcgtgtatgaacatgcccaacccagtattgggcctccgtaggtgctcaataaatgttagttgattgcctcttttctgcttctaggtacataagcaccatattaatttatatagtatatttgattatgttaggttaatgcataaatcacatggattggttgtttcttttacagatcactaaagtggttcttagcaaaggttggaggtgtcttgagtgcactgtgtgtgaggcctgtgggaaggcaactgacccaggaagactcctgctgtgtgatgactgtgacataagttatcacacctactgcctagaccctccattgcagacagttcccaaaggaggctggaagtgcaaatggtactctagggtttgtttgccttgttagtctttcaagttcagagctttctcataccactttggtttttaaaaattagccacacctatttaattgaataatacacatattctatgatagataccagtaatcagaaaaattttcacatacacattaaatcatttcccccattatgttcgtatgtagcttcctgaattacagtaactgagtaactaagaaaataaaattgagacttttcggggggatttggatttcaggtgtgtttggtgcagacactgtggagcaacatctgcaggtctaagatgtgaatggcagaacaattacacacagtgcgctccttgtgcaagcttatcttcctgtccagtctgctatcgaaactatagagaagaagatcttattctgcaatgtagacaatgtgataggtattgtgctattttttcatctttttaaagcttttctctttgaaatgtagcaaaaaaaaaaacaaatggaaaatagcttttccttaatcacaagttttaggtacagaactttttgccttgtagatttttagtcacctagaaacttacagaagcgatttcctgttttgaattctcaactccggactaaaattttgttttgttttgtttttaaatttagagacagagtcttgctctgtcaccaggctggagtgcagtggcgctatcttggctcactgcaacctccacctccgcctcctgggttcaagcgattctcctgcctcagcctcccgagtatctgggactacaggtgcatgccaccacgcccagctaatttttgtatttttagtagagacagggtttcaccatgttggccaggatggtctccatcttttgaccatcttttgaccgcccgcctcagcctcctaaagttttatgattataggtgtgagccactgtgcccgcccaagactaaagatttttaatttaggcctttttgagggtttaggaatcccttgaaattagatggagaattattgccttcatctatgccgtttcttatgaagggtttctgaatcttctaatagattataaaaaatatctaacacattctgttctccttaaaccac

SEQ ID NO: 128425 - DNA, 1104 bp, Homo sapiens
gaaatgctaagaaggaagttgaaaatcctgctaatttggagatctttgattaaaactagaaataagaatatgggaagcatcaacttccaagatgccctcattgtagataataccatttaggatctaggctcaagccctgggaaactccagggctttggaagtcaaatagaggaagaacacgtacaggagatgaagaaagattagcgaggaaggcagtgaaatatccacaggtggactgctgccaaatccagcagaacagtatgccagatgtcaggagcatgagtaaaatgagaaaagagaaatggcttttgacaacacttccttactaatagtagggaagaagacataggtacagattcaagttgattggaaattatgaaagtgaggtaattgacctgcagtggttgctgctcagtgaaatcagcatagtgattacctgagctaggttagagatttgatgggtaagaaagaacacctaacggtaatcctggagggaaaaaaataaagtgtttgctggagagaatgagttggattgctggacttcaatgtgtgtggattcagtttgtgacttaaaaatgaaaccagtctattgcttgtgtggcttttctcaaaatactgttattccattacctatctcttaccccaagagtagtcacattcttatttctggttattttaattcctggtggtatttttatgtgattaatgagatagtactttttaatttgatgatattctagaaacctggtaagtactatgtaccttgtcttaagttttggttacttaattggtaaaattatagcatgcaccattgaattacctaattcaaaatatattcttttattgtttgacatttgtcttgtttttctttaaaatgttatctttgtggagtaaacatttttctttatgctgtttagcatcttcatcagattagttcagggtattgctgaatgtggttgtttggaagtaaaatgctttagttttagttatatagattttaataagatactactttctatataatttatcaggtactttaggcattttaatttgcaaatttaggacaatttgctttaacgtttcttcacttttgtccattggatg

SEQ ID NO: 128426 - DNA, 2011 bp, Homo sapiens
ctccctggctcaagcagttctcctgtctcagcctcctgagtagcggggactacgggcgcacgtcaacacacctggctaattttttaaatatttttagtagagacggtgtttcgccatattggttaggctggtctcgaattcctgacctcaggtgatccacccgccttgtcctcccaaagtgctgggattacaggggtgagccaccacgcccagcctacagtaaatatttcaagaaaatttcataaatgaaaacataggtactgtattttgatatctcttggacaaattataagaagtttactttatattataagaagagtactttcagttttaaaagtagccagagaaccatagtgttaaacctaaaaaatacctacccctttggaacaccaagctaacaacacagccgattagaagtaccagactttccttttagttcacttgtgcttgttgtggtatttttggagatattactgttgctagtgccacctaatttgtattgtgaaattattgaaggctaaagctgataatagctgtttctgtagttatcaaaacaggattaggtctaatttcttgttctacttgatatcgaactcaattttatatatgagacttcttttaagaattccctaaatagtgaagtgtttgctgctgtagctccactgtatacaagtgattatatttaccaaaaagacaaactgtaaactcttttgtttcttttaccagttatcttcctttcggctctctctcttcattgctttcacttttcctaaattagacttactgtttataagcaaccttggttttacatagtatgttggaagagtgtggggctggggttgatttaggatttggaggtgtaaagtttgccagtgagacaccaaaccttctctggctgcttttaaaactgatagtactcttgggctgtaagagtgactttgatcatatttaacaaccagcaatagaatttgacttttaatagaaagttgcttctaaatagcctatcctccacgtgtcattattgttctcatttccccatcccacagtccttgtataacttactagcttggacagtttacctgagaaattggcctcaaaacagaaagaaacttaatgctaatattaaactgtttttgggttaaattatttttcttgggttcaaattcagtccctgccaggtagtgtttttttagtttctgtagtatttgatagcaagttgattctatttacaacttaataatgattacattaggaactattttgcttttaattcagtttgtagattaaggaggcattatatagattttttagtaatttttagtaactttttttaagtgaagaaattcaagattctaggttattactggtggaggcattagtgtgtttcatatcatagttcattgtttattgatgaattcatacacatatgcaaaaaaagataatagatgctcagcagaaaaaaagttcaataagtgctgaacagggtgcttaacatagcagtgaacagaaaggggcatgatctttaattacagtgtaaaaagtgctgcaactggattgtaggggaagagcccatacattacaggggcagctaaccttttctgagtggtttgtgtaagttcttgatcaaagctaagatctgaaggataatttaaactttggtaattatagctatattttagttttaaggtctaaggaatatactagataatttgtcagaatatctaagtataatgataatttttcttcagaactataaaattacacaaagtctgtcttctttttgaagtgagataaaattttggcatcaaagctaacttttaaattatgatgaataatacataattaccagaaaattcttacttctgaaataaaattattcaacattatttttatcttagagtacgactttctgtctcatatttttgagaactgtctactgccaacataatattaaactatcgactaaaaggaatttaagatgtatgttagccaaatctcagagaaaaaccaa

SEQ ID NO: 128427 - DNA, 1122 bp, Homo sapiens
tcaatccatttggaaatccttaagttgtaaaacataatgttttcattaggttttctggtgtgtggctgattctaatccataaatccttgtgtactttggctttcattcacttaataattgtctgctttgatgaataccttctgatttaagttctagtgtagccaaatgttttatatatctatagttagaaaatttaaaatttgtttgtacattgccataacaaatgttctgaattttgtagtatcatcccaacatacagtgaatactgaattggaaaaacagatttctaatgaagttgatagtgaagacctgaaaatgtcttctgaagtgaagcatatttgtggcgaagatcaaattgaagataaaatggaagtgacagaaaacattgaagtcgttacacaccagatcactgtgcagcaagaacaactgcagttgttagaggaacctgaaacagtggtatccagagaagaatcaaggcctccaaaattagtcatggaatctgtcactcttccactagaaaccttagtgtccccacatgaggaaagtatttcattatgtcctgaggaacagttggttatagaaaggctacaaggagaaaaggaacagaaagaaaattctgaactttctactggattgatggactctgaaatgactcctacaattgagggttgtgtgaaagatgtttcataccaaggaggcaaatctataaagttatcatctgagacagagtcatcattttcatcatcagcagacataagcaaggcagatgtgtcttcctccccaacaccttcttcagacttgccttcgcatgacatgctgcataattacccttcagctcttagttcctctgctggaaacatcatgccaacaacttacatctcagtcactccaaaaattggcatgggtaaaccagctattactaagagaaaattttctcctggtagacctcggtccaaacaggtagggtgattttaatgatattgacagaaaagatattggaacaattctataaaatcagaaggtatatgtgtagctttggtgtggatggcaactttttctgtcttcagatagaacttcagtgtaatgttgattatgtgtttcagccattattttttaaatgct

SEQ ID NO: 128428 - DNA, 1924 bp, Homo sapiens
catcattatgagtggcagcttttgtaaaacttctctttatcatcttcaaggataactaaacatcttaattactaacctttcatttccagaatgccatcagtatttagttttgaaatatccttttaaaataatgtgccagttaccttttaaaaaaaattgttttagagatgggttctcactatgttggcctggttggtcttgaactcctggcttcaagcgttccttccgtcttggcctcccaaagtgttaggattacaggcatgaactaccacggttggcccaccttttgatgcattataattttcatgttttttaaaaatgtaaatatacatgtggttcaacagagaaaaatctgaagaaaaacttaaagcatttttggtgatgatttgcccttactcatacaaaatcataattgttgacttaatgaacaaagaaaaaaactcattctgagctaaagaattaataattttttgttaagattataacaatgaaatggaagttgaaggccctgaagatcaaatggtattctcagagcaggcagctaataaagatgtcaacggtcaggagtccactcctggaattgttccagatggtaagaatgtttaatggatatactctgtttttgaagaaaatgtgtatatacaataaatatgtgaatattgactaaaacttcagtaaaagccaagatgcagtcacttaggaagagttttttagtaaaataatcttagacaaattaataggagaaaggacatgcgtgtatttgtagttcagctaccatctagacttaatcataagtacttacttggttaagggaccaagtgattttctattaaaaagcaattcgtatttttatttctttagttgtagttgctaagtagagctgttgctgatgatgagatgtttcatgctgagataatgaaaaatttactgtattggatcatctcagcagtcctattgagggttatttcacttatttccatgatgtttcaattaagctttttgtagtaaatattgataagagctattattgtacttgcagatctggaattaataagagaccatgttgggggaaaactacttgttacatttaatcacaggctcatctgaaagtctttggtgttgtatgtgaagttgtatgttcaattatatagtatacataaaaattataatgtatacataaaaagccactgagatgttttgaaatttattaagtttacgtataataactctcattaaaattattttctataatctttcttgtgaggtctagttgttaaagaaaaagagaaaaagacaattaaaaaatttttaccatagtgcaaagacttctaattttgtcttcataacttactaataagtggtacaatgtttcatgcttatattggaaattgacatttagtagaataaaactctttactcaaattactgttgagggaacagtgttacagaaattttgactccttagagattttataaatgtgttactcacagcggttcaagtccacactgaagagcaacagaagagtcatccctcagaaagtcttgacacagatagtcttcttattgctggtaagcagtatgttcatattgtctaatttgattgagttacaagataatgtctttatcccaaagacatttttgcgattgctgtatgtatatacattacggtaactaaatcttttagttaagagattctggaaaagaattgacaatggatctaaagaaggttagtttctcttgaaaggttttttttttttttttttttttttttggaggggggaggtcatgattaaaaatattttgtactttcagatctgttacttggtagttttcttttatccctacctgtagtctttcaataaagtgggaaagaagatgagatttcagtttgatatcagaacatgtataggcctgggcgatatag

SEQ ID NO: 128429 - DNA, 1064 bp, Homo sapiens
tttcctggagattttagtgcagattttgtgaggccacatcagacattgaaaacagctttttaaaaggtgtataccctaaggccaggcgcagtggctcacacctgtaatcccagcactttgggaggctgaggcaggcagatcacttgaggtcaggagttgaagatgagcctggccaacatggtgaaaccctgtgtctttagtaaacacaaaaattagctgggtgtggtggcacacacctgtagtcccagctactcaggaggctgaggcaggagagaatcacttgaacccaggaggcagaggttgcagtgagccaagattgcgccactgcactccagcctgggcaacagagtaagagtccatctcaaaaaaaaaaagcatgtaccctaaattagtgtcatgaaaataaaagcttaatgtataatccacaaatgattcatgactttttaaaggtttacatcagaactacaattacaaatgcataacaaactgtttttgtttttatttttcctggtgtttagaattgcagaatatgtatagagtgtggcacacggtctagttctcagtggcaccacaattgcctgatatgtgacaattgttaccaacagcaggataacttatgtcccttctgtgggaagtgttatcatccagaattgcagaaagacatgcttcattgtaatatgtgcaaaaggtaagaagatagttattctattcagttgttttgtcgattgttttattcatgtggtcatttgctctaccatcttacagcttctaagtttttatcactctagcaattccatcagtactgattgctgttatagatggaattaaatgatgtttttgagtctcaaaggcataaggaagtaaatgggcaaaagataagaccagaccacatcagaaatgagcactaatagggaaaagtaaagagaaaatagcttaaaaatgtcaagtaaaaatacggcagcatctctagtgacatgcacaaatgtgctttaaaaaacctttgtcagttagcaactcctctaacctctctcctctcatacttaattaactgttttcatatccag

SEQ ID NO: 128430 - DNA, 1755 bp, Homo sapiens
gttaaataagtaacccagattcctttagtggggaatgggtgctgggtgtgctcattgctactgaagggtgtttgcttcttcatcctttcagcaggtggtgtcaggaaatacatgcgtgtgtatacacttacagaagtttgtccaacccatgacccgcaggctacatgtggtccaggatggctttgaatgtggcccaacagaaattcataaaatttcttaaaacattatgaggtgttttttttgtgtgtgtgtgtgtgtgtgcgtgtgtgtgtagctcatcggctatcgttagtgttagtgtatcttgtgtgtggcccaagacaattcttcttctttcagtgtggtccagggaagccaaaacattgaacacccctacacttaacgtatatacacataaatattcatatacatatgcataacttagaaataatgaatttacaccagtacctccagttcttgtccttctccactgaattctttgccttctcattcttgcatgtctgttcttctacaataaaaattctgggttgtagcaacatcagcacatttattcagttgctcaatctaaaaagcaagtctgcttcagtttgctctcagtaatagattttattcccctttcttttcttagtgatttaattttttaaatatagaagatattagtatactttcaaaactcaatactatatgaagttttactcagaattgtcactgcctcttgtttattatttatactccatttctcccaacctcttggaagtaactaacttcattgttttctgttttaaacctcctgttatttttcgtctaagaataagaagatatattgctcttattttcagtgaaggtagcatgttgtgtatgttcttttgcatgttgcttttttcgtgtaataaaatctggaaatcacttccaggcaagttaggcaagttcaagagatctcattctccttttaaacagctgcatagcactccattgtgtatctgtgctatgggttactcaaccaatggcctgtgctttggtatttcagtagtttacgatattttgcattataaatgattttacactccctagctttgtgcatgtgtgtttttgaattctcagggacaaatctgtagggtaaattcctagaagtaggattattgcctcaggagtgtacacatatgtagctttgttagatactgtcagattccctttcttggggcttatggtactttgcattgccaccagagatgtgtgagagaacttttcttacgtctttgctaacaggatgacttgttcagcttttgaatgtttgtctgtcttctgggcgaaaagtggtgtatcaatgtagttttaatttttgtttatcctgagtgaagttgatcgttttttcatgtgtttaagggtcagttttaatttcttctcgtgaattgtctgttcatgtgttttgcctgttattgaagattttggcattttcccctaaatttaagagttctttataagttagggatgtaagcttttatctgtgttacatgatgcagatactttctgccagcttatttgttcttgttttttttgcttatttgtgtgagacagtgtctcactccatcaccccggccatagtacagtggtatggtcatagttcactgtagccttgacctgggctcaagcagtcttcctgcctcagcctcccgagttagctaggagttatgtgtaccaccaagcccagctaattttttacttttgtagagacagggtctcactatgttgtccagg

SEQ ID NO: 128431 - DNA, 1018 bp, Homo sapiens
atttatcagttgttagcatttcattgtcactgggcatgccctctcttgctttctctgtgtgtgtgtgtgtgtgtgtgtgtgtgtgtgtgtgtgtgtgtgcgcgtgtgtgtgtctgtgtttttgtctctattccccctaaccccctactatttgagggttaattacatacgttgtgcctttttaccaccatttcagtatgtatttcttaatagtaggaatattcttaaaaaatcacaatcctgctatcaacttcctaaacttacatcaatgtagtatgtttatctaatgtactagccatattccagttatgtcatttgatcttatgtccttcataacctaccccttcctccaagtaggttctaggatttagtttttgtcattggtatttttgaagaatagagttcttctcgatatacttgtttttttctttttttcaaacaaatttccccattttgtctttgatatccccttataattagatgagaggcatgcattattggccagaatactgcaaagtactgatccatcctcagggtatcacagctggaagcacacattattccactttccctcatgggaatcacctggtcaggctgttgtccaatttcttttccccctcctttgtatctaataaagcagtatgtaaggacactttaagaccatgcaaatatcttgcttttcctcagaatttccttctagatttgaaaaacttactccctaggctgggtgtggtggctcatgcctataatcttagcactttgggaggctgaagcgggtggatcagttgaggtcaggagttcgagatcagcctggccaacatggtgaaaccctgtctgtaataaaaatacaaaaattagccaggcatgatagtgggtgccatgtaatcccagctactcaggatgccgagacaggagaattgcttgaacccgggaggcagaggttgcagtgagccgaactcatgctactacactccagcctgggtgacagagatagactctgtctcaaaaacaacaacaac

SEQ ID NO: 128432 - DNA, 3139 bp, Homo sapiens
cactatcatggaatgtgcctggatatagcggttactccattaaaacgtgcaggttggcaatgtcctgagtgcaaagtgtgccagaactgcaagtaagttttcatttcaattcaaagctgtgtattgggtttaagagggaccctattactaggtgctaaaggtttgtgtaatataatagaggttgttcatattttagctatattcattcagtgacttcatcatacttaaaaaaattactggatattataacatttatccagtatatatccataatataatttgttattatattataatataaataacatttatataattttgaaagaagtctaaacaaaactgattttaatcatttaaattgctctggtcgtctaaagagctaatttaaatttgccaacaatttaaaaaataagcgatattaacaatttaaaacaaacagaagaataaagtagtttttcttaaggggtactggggaggagatttaataggatttaaacgtctaactacagaagtagaagaattagagttgagccaaaaaatcagtcatgtgtttgaatttccattccaggaaggacaatttctactattattttaatgtacatctgcatctctctaaaagccaccttgagtagatcctggtcagcataattccaaaacgaaatatgtggcatttacaaatttgtaagggggttatattttcctatggtatttcatctcttggtcatttctccagtcttttctgtgatttccgcttgcacccccatgattctaatgagcatgataatttggggatgttaccagtatcttcatttacaggctgagaatttttgttgtaaccagcaagaattatgcccaactgccatgatcagtctgtttttattatttagtttgataagaaataaacgtcagtatcttagagttacgtgacataaataggactatgtacctccatattttggtaaaaattagataaaatattcagtaaacatttattcgataccttatatctgcgctcagtttcttgggaaggattaaaagaacttgaaggaagagtacttgtcctccaagatctttccacgtagctgaggagataaaacgtgactttttatggagaggctgaactgaataataattggaggctaactgacccatcttcctgttgacatctatttatcccccagatttcattcagagattcctctctcagctcttcttgctttccctgttgtttcttttcccctcctcttgaatttaaaatcatagtatctgaaagtgattatagtcaaaaatctcaacagagataaagctgtaggacaggggcccaatctttgggggcagaagagtgtttagagaaagattttaggttttcaactataattcttaataattatgacaaggttcgtattttgaaataattattcagcatttaattgcttaatagacattctaagcacttgaacccgcattacctttaattctcgcagtaatctttattattcccattttatacctggaactcagagagctttagtctaagttgtttagtgacacagctagaaaacagcagcctgaatacaaatagagatctgatgccaaatttgatcctctttacgttatacgacagtgtcttttcaattcgctgtgccaagatttgttcctttccacacagtagcacctatcagttatagcaccttcctctcaaaaattctattttaaaagtaaagatcagaggctattcatcttgccttaacccttcctcctttgcaggaatcctaaaatggctagagcaagttaaccataggtgagcattgagtaaagatcaccatttaggaggtaatccttatggcagggttacctctgttactatctgcagagacaaaacagatactgaggtatttatgaactgtgcagttcccaggactgattattttcatgattacttatgttacaaaacataagtttaaagataaggcatcattaatgctatcttattttttagacaatcgggagaagatagcaagatgctagtgtgtgatacgtgtgacaaagggtatcatactttttgtcttcaaccagttatgaaatcagtaccaaccaatggctggaaatgcaaagtaagttgtttatttatttatttttttaaatcctctctatgttttatatggagaccagacaaatcggatacctattcaaatctgtacatcatcaccatcagctttttaaaaacagctttattgacatataactgacatataataaactgtacactcttcaagataatgaacatagtcatcaccctcaaaagtttcctggtgcctcttggcttgctttgtggctgttcaaacccaaactctgtcttcctagtctgctttttcactatagattagtattcacttcctagaatttttaataaaagcttcatatactatatactcgtttttggtctggcttctttaactcagtgtaattattttgaaattcatccatattgctgcacagatcagtagtgattcttttttattactgagtgctggagataccacaatttgtgtattgaatcacctgttggtgaacatttgggtccttcaaaattttgagctattacaaaaaatgccgatgagctcattaactaacttcctacctcacttggcttctgccccttcagggtgaggcgttcagagccgggttgggggcagtggggtagtggagatagcccttggaatccaaggtgcggtttagcttttaagcttagtcttcctgggctgctggtgttgcgaggttgagggatggagatgaccctcaggtgctgcatgggcctggagcgggtttttcctggagctggagagggcatgatggcccgtgtgcgggagtggaaggcacagcattgtcattgctcttcttggaactgctttttctagtgaggaggtggagggcctgggaaaggagggtgatgtggccagaaccccaggtccccagctgggggaggaggtggagcagacgcagggagattctgtacctgcaccctgtcctcgccagtgaggtttggcacctagaactgcaagcagtattaccaggttcttttgtggtcttcagcaagtcctattaggcatctgcctgagtggtgggggttgaggggagg

SEQ ID NO: 128433 - DNA, 1033 bp, Homo sapiens
tttcttaaaatgtagagatggggtctcaccatgttgcccaggctggtctcaaactcctggacccaagggatcctctcttctcttcttggcctctcaaagtgctgggagtttagttgtgagctactgtgcctggccttcctttttttttttttttttttttttttttgagaggagttttgctgtgttgtgcaggctggagtgtggtggcatgatctcagctcactgcaacctctgcttcctgggttcaagtgattctgccgcctcagcctcctgagtagattggattataggctcgtgccaccacaccggctaatttttgtatatttagtagagatgtggtttcactacgttggccagcctgatcttgaactcctgacctcaggtgatctgcctgccttggcctcctgacgtgctgggattacaggtgtaagccactgtgcctggcccctttggtttttaacaagtatatttgggagaagtgagacagcccttccaatggaatattaaaactggaaattttgaccttagaaactatatgggctttaatagatagaacataggcaaagctttcaaaagtatagttgagacaaggacttagattcaagtaaaaattcaatcattagaacattagctttacttggattatcaaaatgaactgatttacatagatgagtaagcatcacctcaagagtagtgaagtcagagtgcttgttttggaaattttacattaaagtgtatatgtcatcaaattttgaacagtttaatgcataatagtattttccccagcctgaacattcttagagactggattaagacaatgatatttcagtgaaaaccatctgttttatgaattacttcataaaagtaatttttattttgggctattttgtgacagtgaaaagtattacagggaaggtaacaaaggctaaatgagctttttggtggtggattagaaccagaggaatcaatataaactcgtagtgtttgatacttagtacagaaatgtaggtgtatgtatttgcatgagtttgta

SEQ ID NO: 128434 - DNA, 1114 bp, Homo sapiens
aggctggagtgcagtggttcaatctcagcttactacaacctctacctcccggatacaagcgaggtgcctcagccacccgagtagctgggattacaggggtgtgccaccacacccagctaatttttgtatttttagtagagatggggtttcaccacgttggacaggctggtctcgaacttccacctcccagagtactgggattacaggcatgagccaccgtgcttggcccccacctttagctttcttacttggatttttttctagtcaaatataaaagaaaataacttttctaactgctaactagaattttttggatttgatatgtgtactactttttaaaatgctatggaaaagtagaattccaaatgtataattattaaacttaattgttcttatgggtaatcactgaatagactgtagaaaatagattgaaaagcttagcttgtgctttagacataatttaaaagcacaagtatctatagttatcgcttaaagcagttgaataaagctacttttctccttctctgacttacatttcatttttactagtgaacagctctgcgctttttgttactgtggggaaaaaagttccttaggacaaggagacttaaaacaattcagaataacgcctggatttatcttgccatggagaaaccaaccttctaacaagaaggacattgatgacaacagcaatggaacctatgagaaaatgcaaaactcagcaccacgaaaacaaagaggacagagaaagtaagcagtttcgactttaaatgttggaatagattaagactgcatataatttatttccattataatgtttataaattttcaaatgggattgttcttgttgaacagtttctcctgttctccacatttatgggatactctgactcaccattaacccaattaatccaacaaactatccttttcacaaatttttcttgttattttttaaaaagtttatattaattgtatatgaaagcggtgtgatcacaaaactaaacttttggaagaaaacttcaaagaacataacacaagctgagagggagggagttcatggaatttataaatggaaataatgtaataataaaacagatcaataaagtccttcttt

SEQ ID NO: 128435 - DNA, 1076 bp, Homo sapiens
cgtgaccatcctggctaacacagtgaaaccccgtctctactaaaaaaatacaaaaaattagccaggtgtggtgccgggcgcctgtagtcccagctacttgggaggctgaggcaggagaatggcgtgaacctgggaggcagagctttcagtgagctgagatcgcgccactgcactccagcctgggcggcagagcgagactctgtctttaaaaaaaaaaaaaaaaatcaagttgtataagtgaggtggacaagtgaatccatagactatagtgtgtgaatgtagatagaggtcatcagaatagcagctacatcactacacttaagacgttgagctaagtgcttttcatgcgttcttttttttttatttttggatcataaagacagttttatactaggtggtattgtctgtcttaaatgacgagcaaagtaaaattgagatgaagttaagtaacttgccaaaggtcacattgctagcagatggcagagctagaatgcagactcggaaccattggattccaagcctttggttttaactaacacagcagacaccttttgctattaaactttctcatgtcttagaaccaatttgtgtaggataaattagagtcattggaggtggaaaagtaaaggtttaaaagagggtatgttatgaacttatttaagggaaagggttagatctaatttatctttgcatccccagagataatgcctggcacatagctgatgctatttaatgaagtgcacattgtcttcaagttctcttaggaatctacttacatgtgattaggttctcttttttattgttgttgttgagacagggacttgctctgtcacccaggatggagtgcagtggtgtgatcttggtgcagctgcaacctctgcctcccaggctcaagtgattcttccacctcagcctcctgaatagctgggtctactggtgtgtgccaccaaggccggctgaattttttttgcttttgccatgttgcccaggctggtcttgaacttctgggcttaagtgatcctcctgcttcccaaagtgctgggattacaggcttgagccaccacgccaggtcaatg

SEQ ID NO: 128436 - DNA, 1050 bp, Homo sapiens
tttgttttttagtcatctgcatcacagtcaccaaaagcaccttttacaaagcttttaaaaatacatatatctggtcatttcacatcaactttattaaatatagaagttaaacctggtatgtgaactttgtgaagaacccattatgtagttaaaagccactactgtagacagagggagacttcagaaggttacctaaaaaaggggcaaaaccagagtgaggaatacttaagtgaattatgaggacacaattatattcatgtgggtctgtcctcacatttagagtataaggaagtgctggatttaagggagaaaatgactgtaaactctgatattttctacttgatatggtaaaatgctggaaaaatgccctaattacttattttgtataccttcaaattgtgccttatgttgaatataagtctaagccttaaaatttaacatttaactctatgtacttattatttttttttttttctgtagacctcgaagtagggggaaaactgcagtggaagatgaggacagcatggatgggctggagacaacagaaacagaaacgattgtggaaacaggtatcagaactcaagaatttataagaatgtataatgatgctttgcatatgtttgtacactgcatgtagcatttgtataacaatattctgtgttaagcatttgtttttatactgaactctaagtttcccatctgccttgttttgataactaatgacaaagtgaaaaaactgagccctctatctctcttttttccctaagccctggtttagtataattattttatatctgaagataaatgttttatcaaggaaataaagactgggagaaacagtaatccaggctgttagtataatcgctcatagtatattctggcctatgaaccatctagtgtttgtttaaagcttattttgttaatatgtgttctgaaaaaagtagtatgtttcgttatggaattaatattgtgaaaggctaggccaaactagaccaaatagtttctggtctgttggacttttaggtgcccttaaataagctgctgtatgtt

SEQ ID NO: 128437 - DNA, 1042 bp, Homo sapiens
ccgagtggtattggtctgcagctataggtggggggaaccctgagtacgataaactatcttctagaataatttttttaatatattgaagcagtagtgcctagtttataagtagacatatgtatagtataaactatatagtttatattcagagtacaaaatccaccttggccactatttttttttttctttttttgagatggagtctcactctgtcacccaggctggagtgcagtggcacgattttggctcactgcaacctctacctccctggattcagcgattctcatgcctcagcctcccaggtggctgggattacaggcacacgtcaccacacccacctaatttttgtatttttagtagaaacggggtttcgccatattggccaggctggtctcgaactcctgaccttgtgatctgcccacctcggcctcccagagtgctgggattacaggcgtgagccaccccacccggccaccttggccactattacaaaagtaaagctaaataatactgaagtatatgttccatattttgtaaggactgttgatttggaaacagtgtattctaacaagataaattttaaatgtaactaatagtatatgtttctgaataaatagttgctgcttctaatataaagtgtcatatttgttttaaaatcattgctcaagttgtatagttgttttgggcacgtattttcaacttctagaccaatacaaaatgtaaaataagtaaaagacgtgatatagttgtatcctttctaaacactgacctattttttttttttcctttgctaccttttttttttttttgagacagagtctcgctgtgtcgcccaggctagagtgcagtggtgcgatgttggcttactgcagccttcgcccctcgggttcaagtgagtctccggcctcagcctcccaagtagctgggattacaggcgtgtgccaccatgcctggttaagtttttgtatttttagtagagaccggttttatcatgttggccaggctggtttcgaactcctgacctcaagtgatctgcctgtct

SEQ ID NO: 128438 - DNA, 2438 bp, Homo sapiens
gttggaggctacagtgagctgtgatcatgccactgcactccagcctgggtgacagagcgagaccctatctcccaaaaaaaaaaaaaaaaaaaaaaactatgacataaaataatgcagttgttattggaggcggggatagtggggtggcaaagattttctttgtacgcagatgtccccaatatatagaagaaagatttttaaaaagctaggtcagcagaaatctctatgaaatgtttttcattatgagcaatacacgaaaaacagtcaaagcaattccctaggagttgtatatgtagtaatattattccaaagttttttattgctcaaacttttaaatgttgttagagtagatttttacatattataactctactggctagggttttattagtaggcctccctcagtgagacttgttttaggtggttttaaaatgatttcttacatcttttatccttggtcactttaaatctttacaccttattgtaatcgatttacattagaagcagcatacttgatggtctcagtgaagtctgtgtggtggtgttcttttagtggagcctagcaaaaaaagaatttccttgatttcctgatctttgggattctagtcatatggaccacatttggaataagcacatagttgaatataaaatgacaaaatgaaacataaccatattcttaaagttctcattgaattgttctaccatagttgaagtgtttggtcagtatggccaagtgtttgtttgtttttgagacggagtttcgctcttgtcaccctggctggagtgcagtggcacgatctcggcttactgcaacctatgcctccctggttccagcgattctccttcctcagaccccggagtagctgagagtacaggcgcccctccaccacgcctggctaatttttctatttttaatggagatggggtttcaccatgttggccaggctggtctcgaacttctgacctcaggtgatccacccaccttggccttccaaagtgcagggattactggtgtgagccactgtgcctggccctaagtgtttcttatattagactttcatacttatagagttgtagaatattagaactattaatagatgagaattcaagaagattgagtctaacccctcattttatagataactgagccccagagagattatggaatactagaagtcatatattaaggtgttacttttacagtaaataaaggagatggtagtctactgtattggtgtagacccatagtaaatcatgcctatgggtattcatgctattgtatagtcatctctctttgtatctcgcctagccctgtgactcactttaaccagtagaacatagcaaaaatgacactttgctatttttgggtacaagccttgagcatgtcaggcagcttctacttttgtactcttgggagctctgagttgctgccgtgcaagaagctgtcataccttgctggagagatgatgtggagaggaagagattccaggactatatggaaagagggaggcttaactatctcagtgtcctagctgccttcagcccttagttgacttgcctgttgaatacagacacaaaagtgattagtaagattagcgaaggggccggcgtgggggcttatgactgtgcagtcccagcactctgggaggccaaggcatgtggaacacttgagcccaggagttcaagaccagcccgggcaatatagcaagacactgtctctacaaaaaaatacagaaattagctgagtgtggtggcatgtctctgtagtcctagctacttaggaggctgaggtgggaggattggtcaagcccaggagggtgaggctgcagtgaaccattatcttgccattgcactcaagcctgggcgacagagtgaaaccttgtttctctctctcacacacaaaaaaaagattaacagaggaaccacctagctaagctcagtccaggttacgaaatcataaataagtaaaatgctggttgttttaatctgttttgctggaagcagatagttttctgaattaagggacgctaagaacaaagagtatttggagctgggtgtggtagtacatgcctttagtcccagctacttaggaggttgaggtgggaggatcacttgagcagaggagttggaggctgcagtgagctatgatcctgcaactgcaccccacccagcctgggtgacagaacaatacccggtctcagaaaaaaaaaatgcatttgggatacgagtgataaaaatcattattttccatcctcttttactgaaatagttaaatgaagtttctccttaaccttaccctttatttttctaaagtattttgaaatacagatttttattattgaggactttaaatagtatttaaaaatggaattgtcacagtgtagattgggctatagttaggtcatacagaatagaaagataaaacaattatgaatatc

SEQ ID NO: 128439 - DNA, 1055 bp, Homo sapiens
catgagccaccgcacccagccctttttatgatttttaaacttggattttaagtgtttttcattaattagaatctaaaacggtatttgcgcctatactttgtaggctaggtttaatctgcggaccaccaggggactacaggtctcaatctctgctttatgcccagttattttattttttaaatgaaagttttcaaagcaggtatttacagtattcttgaggataggaaccttactaaattactttgtattctgtttagcatttatgcatttgaatgtaggcactcaaatacttggtgatttaatgatgcctattattaaaaaaacactgtggtaataatatggagacaggagttacctggaggcagagataataggctgttacaatagttgtagtgtgagagatcaagccaaagcatagaatgttggtagtgcgaatggggaggaagattccagtcactgcaaaggaggaattcggcagtttctggcatagatgttgtagcaggcatccaaatagattggatgcctgctaagcattcggggaagtaggactggagttgaggaatcgattaggataagtatttaaagatgtgacttaacatgtaatcactgagaatatggcgtatgggaattagtaaaggattaggatgctttgttgcccttaggagataggggaccagttatacccggaaaaacaagaaaggaaatcagaatatattctcatgacaaatggacaacatatacatacaagatgctcatggcagcagtattagtagtagagaaaagttggcaacaacaaaatatgcatcaatggactaccatgcagttttaaatcaagacatagagatagatctgtgggccctgaagtgggagaatgtctatgatacattgttgaactagagaaaaacctttccaaaagttgtaaagcagtaagtttagcagtaactttattttgtgaaaagcacataaacccaaactgtgtgtatattttgtgcatataaaaagattgggaagaatacataataaatattaatactctgggggccgggcgcagtggc

SEQ ID NO: 128440 - DNA, 1077 bp, Homo sapiens
aggaggcagaggttgcagtgagctgagatcatgctattgcacaccagcctgggcgacagagtgagactctgtctcaaaaagaaaaaaaaaaaagtaatagaccaatcttggatttataattggaagtgttgatccctttatttgcagaatttgaaggacttaagagcacaagttgagagaaacaaatgacacagctctttttgcactttgtaatattctagaaaaagcctcaggtaaaaggaaaattgtttcactttgtttctgctgttaattttgtgatggcagtaactacatatgatctacaagtgtaaaattgtttaacaagtcttaagttttctatacttctatgtaactttttagatctttcatttggtacatgttatttaaagagctacaaagtgctaaatatgtcctgggatgaacagtcaaccctggaagatttattgtggcctagaggggtgctcaaagatttggaggaagtagtatttgaattagaccttgaaggattggtgggatttagccaagtagaatgacaagaaaatgagtgtgtgagggagcaatgtgaatgaaattattgagggaaggaggtgtaaaaggtggggtggcttctgactgtgtgactagaacagaggctgtgtgtagtggtgaggccaagctgtgatagttcttgaatgccagactcatgagtttgggctttatcctgtagtccaggagttataaactgtttacagggagcaggtaagcaatttaaatgaacagtaggctgcttctaagaatctgaatgacaactgacactttagaccttgggttggggagaaaatgggaaataataacagccttggggaagtctaggagtccttatgccctgcttaaggtgaaactgatacagaattctggctgatggttgctatttgagatgctgtttctagatttttcaagagggcggaaatttggatttttatgatttttttttttcttttttgagatggagttttactcttgttgcccaggctagagtgcaatggtgtgatctcggctcactgcaacctctgcctcccgggtacaagtgattctcct

SEQ ID NO: 128441 - DNA, 1280 bp, Homo sapiens
caggtcttaaccattggcaggcctctgtcagaatatgcacatattaaagatctcattatttttgtgttaatgttaaaaaatttttctgaagcttttttcttattttttccatccttacactgtaaattcacattaccaagttgggaagccaaagaaacattctactctactatgtttcttaccagttcatgaaagttgatgttagaaatgggtgtgggtgtgggggatgggggtggttgtacagaagcagcaggtggtaggtataggatttctgaagcactatccttggccttttttgagtaaactctttataccctgaaccactttcttttcagagggcaattgctattattagagagccaccttaagcattattgttgtagaaaaattaggcacaaccagtgattgtcattacaaggaccagcaaaaatggctaggttgctactctgtatttgtaacgcccttcccccaacaaaatttctccttttcatagctgtgaatttgaaataagtgatagaaaactgtactgcattacaatatataccatttaataaaacaagtttatagttgagagacagcactattattcatgctttttgagataatgcaaatttgtaatttttatgacagcaattcttaataatttattgtccaagagatctgataaaatttttgatattattggtctctgggactcaataggcactgaaatgttttaattcagttgaaaagttgactcaggattgctaccctctcttacctgttaggaggttgttgtttaacctgacctgaaattcccatgaataagaacctgttttttttctttttttttttttttgacagagtcttgctctgccgcccaggctggagtgcagtggtgcgatcttggctcgctgcaacttccgcctcccaggttcaagtgattctcctgtctcagcctcccaagtagctggagtagctgggactgcaggcacgtactaccatgcctgactaatttttgtatttttagtagagacggggtttcaccctgttagccaggatggtctcaatctcttgacctcatgatctgcctgcctgggcctcccaaagtgctgggattacagacatgaaacaccgcacctggcccagggaatttctaatatttgagaagatgttatttttagtctattatacaaatttatatattgtttactaatatataaatttacatattagttactaatatgtaaacttaccaatttacatattggttactaatatgtaaacttgataaacatgga

SEQ ID NO: 128442 - DNA, 1707 bp, Homo sapiens
ggaagaactgtgaatgtctctcgaagttgtagaatggcgtgtgtgcttactcatttcgtgagatgatattctcattgaactgtcgggagtggaagggtgcgctgggacgtgaaggaagccagcacgtttatggataggctgtttctttggttcgggtgcattcacttagtaatagtattgttgtttggtgatttgtagtaaaaatagtagcgtgaactgaggcatagcagagctgggttgtgggaacccattgagctcttgacttgaatgtgctcttttcttgccccgctgtccttttactatgaaaatgattcagggccttcaacttgcctccatattttattgccagctgttacctagctatgataatcgtgagggaagcaagtacaggatgtgtgtacattattacattagcttgttcgtgatacaaagttaggacttatttattatgccacttgcgttgtaatacagtggcaagtataaaatgcccttattctgtattaactgaaatttgtagaaggaagtggaggtttaagtaatttttagacatgtaagccacttttttttgcatcctttaaagcaactcaggacaagccatattggggttttaccttgattgcctcccatttcactatttgcaaagcatttcttcatctcttactgaacattaatttgcaagtattgttttaaatttgcatttgaattcttactccagaaagattagatctatgttgtcacaccccacaccccatactcctgtaagggcgtgcttgtgcacgcgcacacgcgcacactcacacgcacgcgcacactcgcacacaccctacttttgaaatgagctcatttgtattagtgcagctcctgagtgcactggacgattagggtattgccactttattattttaattctgaatctcatgaagaaataggcagcctttggagaagataaaaaatttctgctgaataacagtataatctaactatgaaaaatcaaaacttttggaaatatttagaacaaatgtaagtctgtagagagctttttcttttagatttgaaaactagtactgctttctttataggaaattaaagtctactggtaaatttgacgggtctaaactttttagagcgttttttttgaaattgtgtcttttgaagggaatggaatctccagttgtttttagcaacatgtaaatggaaactaacatatgaattggaaagcaaagaggtttttgaattgtgtatctctatactgtataagaatccatgcagaaaagaccctgtagttggacagtaaagaccctgaaagtgaaacttatgtgtaaccagtgtaaattaggtttgtaaccagtgaaattatgtgaaattgcaaataattcacctgagaaatgaaaattaatcttctttgctaaatctcatagagatattttaagttgctaatgttacttagatgttcattaacttagtgagttacattaagtagagaagatgccttttttttttttttctggacgaagtcttgctctgtagcccaggctgtagtgcagtggtatgatctcggctcaccgcaacctctgcctcgtgtattcaagcgattctccttcctcagcctccagagtagctgggattacaggtgtgcgccatcgcacctagctaattttttgtatttttagtagacacagggtttcaccatgttggccaggctggtct

SEQ ID NO: 128443 - DNA, 1031 bp, Homo sapiens
ttcgccgccgccgccgcccgggcctgacgggcctgacgcgcgggggaggggcggccggccgggggcgcgaccccctcgccgcccccgccgggccccgcggccggccctccccgcgccgggcccctttctcctcctgccgcgggcggctcgggggaggggccgcgggcggagaccccgggggccggcgcccctcacgccgcccgcccgcccggctgccccgcccgcccgcacccgccggccccgcccgccccgcaccgcccgccccgcccgccgccccccgcccggcccctgcgcgcggaggtgcgcgcgcccgcgccgatgtgtgtgagtgcgtgtcctgctcgctccatgttgccgcctctcccggtacctgctgctgctcccggggctgcgggaaatgcgagaggctgagccggggaggaggaacccgagcagcagcggcggcggcggcggccgcggcggcgggagccccccaggaggaggaccgggatccatgtgtctttcctggtgactaggatgtcgtcggaggaggacaagagcgtggagcagccgcagccgccgccaccaccccccgaggagcctggagccccggccccgagccccgcagccgcagacaaaagacctcggggccggcctcgcaaagatggcgcttcccctttccagagagccagaaagaagtaagttgagtgcgagggagccaggccgggagccagcggcggcgccgggccggagctgtcaccgggcgcccgccccgcggcctccgcgccccggcgccccccggcggggtgggggcggggcgggcccgcgggcggtggcggctcccggccccggccccgcgcccctcggtagccgcccgcgcccggcctcccccgctccgcgccgcccgcccgggctcccgccggcgcccggctccgcacactttacttttcagtcgggccttttcactgggtcttctccgcgactcttcttttggagaaatttctcgtagccgcgtcttggcctagctggatcattgagaaaacaagcccgga

SEQ ID NO: 128444 - DNA, 1461 bp, Homo sapiens
gaggaggcaggaatcctccagtgtccccccgtgcagcgtgcacaccccaacacgctcaggcttgaagctgccgtctagctccttgatagcccagcaggcgtgggccaccagcttggtcaagtggttcatggggggcagggtgtgggtattcatcacagaatggagggcccaggacggatcttccaaaggccccagagattggatggccagggagggcagtgtggccaggacctctgcagtggctgtggcgtaggcctcccggagctgcgggcgaggcaggccgaacttcagcagctgctctgcctgttccagcaaggcttccgtcagcagaaccacgaaggctgtgccatccccactattctctgcttgggtttgggctgcttcccggaggagccatgccgctgggtgctccagctccagggccctgaggatggcagtggcacaccccgtgcacactgtttctcctttcatggtcaccaggaacttctgccggccatgggggccatagcaaggccggatgacattggccagggtctggactgcagccaagctgctcagcaggtggggctcctcctcttccggactccttgggctctcccttgggttcagtgccagccgctggggcagctccagggctgaagggactgtgctgtccatggcccgcagaaagaggagaggccaccgtgggttgcagagatgctctagaaacagcagcaggggcacccttgacaccgatcgttgaaagtactcaagaggtcagtggaagcaaggagccaaatgcccattgattggtatctgaagatgttagcacagaccagcgctccactgtgggtccaaggatgagctccaaagagcccagtcctaaagccaccccagggttgattctgtaaaggaactgggtcttggggcctctcaaccttggtggctgaaatgggatctttaactgatgaagtcacaaagtggaaaatggaaccaggatagagaatgaggtcgcagaagtctggttagaactgaggaggccctaccagcaggcaaaagtcaggccttgtccagcaatggaggtacatgcacctctgcaccaggtctgagacttgtttaaacgttagatacaataaggaggagatcaagtgaaaaactacccacttcaccctgtctggagtgcaggggcatgaccatggttcactgcaggcccaactccctggtctcaagcagtcttcctgttcagcctcccaagtacctgggactataggcgcacaccaccacacctagctagtttttttattttttatagagacagggtttctgtatgttgtccaggcaggtctcaaattcctagcctcaagagagccttccaccttggcctcccgaagtgctaggactacaggtgtgagccaccaccacacccacgcttttttttttttttttttttttttgagacagagttgcactctgttgcccagg

SEQ ID NO: 128445 - DNA, 1048 bp, Homo sapiens
aggtcaagaactggccgggcacggtggctctcgcctgtaatcccagcactttgggaggctgaggcaggaggatcatgaggtcaggagttcgagaccagcctggccaatatggtgaaaccccgtctctactaaaaatacaaaaaaatagctgggtgtggtggcgcgcacctgtagtcccagctattcgggaggctgaggcaggagaatcgcttgaaccagggaggcggaggttgcagtgagccaagatcatgccactgcacaccagcctgggcaacagagcaagactccatctctaaaaaaaaaaaaaaaattcgagaactggaaaggaactaagcacatgaaaagaaattttatgttccttcatgtttttatttaaagaaactgaatcaagtaccaaacatggaataaaggcaaacattcatttttggggtgattgttcccttcttggcaatccctgttttattgagggtatcactagttattcattccaaggattttttttttttccacaggaggtgggcgtttctttgtcttcttagagtcaggattccagatctgctgatgtgtgggacttttcttggccactacgatttcatctacagtcacgagctgtagcaccacctcagccactgctcgaaatccttgggctttgactattagggtgtcccacaccccttcctgggccacatttattatcccttcagctcccacacccattaggaggttcccaccttggtgcactccactcatttctgcaaccacgtctgagacagctaagcctgcattctctgccaaggttttaggaagatacttcagggcccgggcaaatgctaggaatgcaggcccattgggcccttccaatctgcttcctttatcagagagcatttttgccaaagccatttctgtggccccagctcctgggatcagtctgggatcttgacatggctggaaataggcatcaatgctgtggtagacggcctgctctgcactccgcagcccctgggtggtggctcccctgagaaccacggtgagggcaggtgtgcctgta

SEQ ID NO: 128446 - DNA, 1002 bp, Homo sapiens
gcgtgatggtgcatgcctgtaatcccagctactcaggaggctgaggcaggagaatcagttgaacttggaaggcagaggttgcagtgagccgagatcgcgccactgcactccagcctgggtgacagagcaagactctgtctcaaaaaaaaaaaaaaaaaaaaaatatatatatatatatatatataagctgggtgtggtggcacgcacctgtaatcccagctatttgagaggctgaggcaggagaatcacttgaactcgggaggtggaggctgcagtgagctgagattgtgccactttactccagcctaggtgacagaggaagactctgtctcaaaaaaaacaaacaataacaacaaaaagaaacccacagtaataaaattgaaatagaaggaggtttgcaatcaaaatgactgactaggaatgaaataggaaacataatatgttgcatctgcatagggaagtctgagattggctgatattgttctcttctgtaggggaaatactagtccagaacttggggtgcctgccaagaggggagcagccacagtagggaggggggattctggaatgctagggttctggagtctgtggacacaggaggcagaggacatgtgttaagatgttttaagaaatgaatgttgatctggatatgaaaatatttttcagccgggcgcagtggctcacgtctgtaatcccagcactttgggaggcttaggcgggcggatcacaaggtcaggagatcaagaccatcatggctaacacagtgaaacctcatctctactaaaaatacaaaaagttagctgggcgtggtggcggaggcctgtaatcccagttgctcaggaggctgaggcaggagaatggcgtgaacccgggacggagcttgcatgagccaagattgcgcctctgcactctagcctgggcgacagagggagactccatctaaaaaaaaaaaaaaaaaaaaagaaagaaaatatttttcactatagagaggcatatgtcccc

SEQ ID NO: 128447 - DNA, 1131 bp, Homo sapiens
ggcctctcaaagtgctgggattacagtcatgagccaccgtgcctggccgcctcacagtgttcttttatgtgctcctttagcccccatattttctataaactagtagaaaaatttagaccattcatgagagttaggttttttttgttttgtgtttgtttttgtttttcaagaataccttgggctgggcgcggtggctcacacctgtaattctgacactttgggaggccgaggtgagaggatcacttgagccctagagttcaaaaccaacctggggaataagacaaaacccaatctctacacaaaatacaaaaaattagccgggcctggtgccacgcacctgtggtcccagctactcagaaggctgaggtgagagaatcgcttgagcctgggaggctgagattgccgtgagccaagatcgtgccactgcactccagcctgggtgacagagcgacaaagaaatacaaagaacaaacaaataaaaaacccaagaatactttataggtggtgctgtgaacttgcttttgctttttattcaggaggcacaaaatctctcactatccaataatgttagaactgatcagagttcaaatgttgtcagcctgacccatctattctaaagttccctattaacatttcacccaataattttagcagatattgataatcagtggctagaatgattttgttagggtttactaaatggcagcattctaatgttttcattcctttggcatatattagctatagttcttctatagagaagaattcccccgtcatgtttgcaaaggcaggataaatacttgattccttccccttattggtatcaaattaatgagttgcttccttaagcacctttaactatgaaaatatttttggaatatcattacgaactcatggatttttctatgtttgatgtgtttcaatctttgcagtcctactttctaaagctaaagttaacccaagtttaaccaatgatagccttttccaccgggcatgatgccttgcgcctgtaaccccagcactttgggaggctgaggtgggcagatcacttgaggccagtagtttgagaccaggctgggcaacatgacaaaagcctctctctactaaaaatacaaaaaaattagcggggcg

SEQ ID NO: 128448 - DNA, 1053 bp, Homo sapiens
tgtgcattggccatttctatttcttttgtgaattgtctacaacatgggtctgtttatcttaattttttttttttttttgagatggagtctcgctctgttgcccaggctggagtgcagtgccgccatctagctcactgcaacctctgcctcctgggttcaagtgattctcctgcctcagcctcctgagtagctgagattacaggtgtgtgccacgatgcctggctaatttttctatttttagtagagacaggatttcactatgttggtcagcctggtctcgaactcctaacctcgtgatccacccgccttggcctcccaaagtgctgggattacaggcatgagccactgcgcccagcgttatcttaatatttttatctcaatctatcacttgtctttgtttatagtatcatgttaatatatttttctacataattagaatcattttgagaaaaaatattacagcaattcttcatttattcatagtcattccttttggagaattttctggtcatatgggtattaaatacttcaagacccagctcaaatgaccctttcaccatgaagtcttccctgacttcctctaactcaagcgtcacttaatcatccatcccgtgttcccacgcacacatttagcacttcattcagactttgttgtattaaatgtgtttacaaagatatttatcctattataagctttttgaaagcaggaacaatatttcatttctatgaatacaacagagcctatattcaatacaagggcttgatttgtgctttaattaccaatgcttttaaatcttttaatatttttgagagaaatatttctggattatgtgtttgcatacttttttttttttctgagacagggtctcactctgttgcccaggctggaatgcagtgctgcaatcatggctcactgcagccttagcctccagggccaaggcgatcctcccacctcagcgtccatagtagctgggactacaggcacatgtccagctaatttttttttttttttgagacagaatctcattctgtcacccaggctggattacagta

SEQ ID NO: 128449 - DNA, 1057 bp, Homo sapiens
aaataaaataaaaagccgtgatctcaccatccaaagatctccaccattatcatttggagtgtatcattccagatgagtctctatacattgttcttttttttttttttagagatagggtctcagtctgtcacccaggctggagtgcaatggcgcaatcttggctcaagtgttcctcccacctcagcttcccgagcagccgtgactgcaggcacacactaccacacctggctaattttttaaatttttttgtagagagagagtctcgctttttgcccaggctggtctcaaaatcctgacctcaagtcatcttcccacctcggcctcccaaagtgctggattacaggtgtgagccactgcatgtggcccacattgtccttgagggagtgttttggctttttgttgttttttctttgctggacatactgttctttatttgctttgttcacttaacaatgggttttggacatctttccatatcaatatatcgatccaatcattttcaaagctctgtacatcatactttgcttaacccactcctgttgatgggcatttcaattgtttatattttttcctaaatccttacagacacagcttggcagttacccaattatttcctttagataaataaagagatatacttcttggttaaaggatgtttacttttttgagttttcaacacgttaatacgtaccactaaaggtagaaaaaagtgaggccaatgataaacaggtctcgggcagaatcatttgatctgcaaaactcaattcttggacttttgatttatatgaggtaatgaatttacattttgcctattctggcaaaatctgacatttgtaatttcaaattctttctaaagtgagacagtcgcttgactatacctatattagtatttcagtaacataaggctcagatttcagctgtgatgggaactgcaaaatggtatgattcatgtgagtgctaacaaatcattcaaaatttaggaagtttgcatctgttttatatagatatatctaaattatgaatatgggttaatatttggagtattcttagcctaatg

SEQ ID NO: 128450 - DNA, 1123 bp, Homo sapiens
accttgcttttcaaaggagactatgaaaaatagttttaaagtggacacatttccctccccatcaaattgggttttatactttaggaagaagggaagaatggatatagtgtaatcaactaccagaaagggtgtgtactgtagtcatcagattttggaaaggccctagatctgtggctctttatttttgaatcttacaaattgaagtgggagtgcatgtgagcctggccggaggagagtcccctagcctcttccaaccttcccaccaggctctaatttccttatttattgtatttgcttgtacagctccattttggcaaaagtgaatttagattttctttcacattccagtaagtgtctttttaaacttttttgcagactttgcattttgtaacctacccttgagctactgcattttgactgagatttttaaattttacacaggtgatattcttgaatttcatggcccagaaggaacaggaaaaacagaaatgctttatcacctaacagcacgatgtatacttcccaaatcagaaggtggcctggaagtagaagtcttatttattgatacagattaccactttgatatgctccggctagttacaattcttgagcacagactatcccaaagctctgaagaaataatcaaatactgcctgggaagattttttttggtgtactgcagtagtagcacccacttacttcttacactttactcactagaaagtatgttttgtagtcacccatctctctgccttttgattttggatagcctgtcagctttttactggatagaccgcgtcaatggaggagaaagtgtgaacttacaggagtctactctgaggaaatgttctcagtgcttagagaagcttgtaaatgactatcgcctggttctttttgcaacgacacaaactataatgcagaaagcctcgagctcatcagaagaaccttctcatgcctctcgacgactgtgtgatgtggacatagactacagaccttatctctgtaaggcatggcagcaactggtgaagcacaggatgtttttctccaaacaagatgattctcaaagcagcaaccaattttcattagtttcacgttgtttaaaaagtaacagtttaaaaaaaca

SEQ ID NO: 128451 - DNA, 1122 bp, Homo sapiens
aaatcagatagatgaaaaaacagttacaaatacaaaaacacgtttatactatcttttttttttttttagatggagtctcactctgtcgcccaggatggagtgaagtggtgtgatctcggctcactgcaacctcctcctcctgggttcaagtgattctcctgcctcagcctccccagtacctgggactacaggtgtgtgctaccacacctggctaattttttgtttttagtagagacggggtttcaccacgttggccaggctgctcttgaactcctgacctcaggtgattcgcccaccttggcctcccaaagtgttgggattacagaggtgagccaccatacctggcctgtactgtcttttatatttgcctagatagttacatttccctgtgctctttattttctcatttggatttcaggaactgtgtcctttcattcagcctgcaggactccctttagtattttttgtacagcagatttgctaaccaaaattctccataataaaacacaaattttgatcaaatatgtaagacaaaaaacagaatggtctttgtactctctctgtaaggaaggatattattaaggtgagccttatgaaactgacaatatgttaaaatgggtttgtggaacaacttctacattagaatattatattatagaaacgttgaaaaacaccatcatgttcagtaactaacaaaaaagtttactgaaaactactgaagatcctatagctgtaaaactagttagatgagtattccattggaacaatagcagatagaagactgggattataaagattatttatcaacaatagaagtttatcagagcttgttacagaaaagcttaagttgaagtagtaagatttaggggttatagagtctcaatgccattgtaaactttttttttgagatagagtcttgctctgtctcatctgtatttttagtagagatggggtttcaccatattggccaggctggtctcgaacacccaacctcagggaatccacccaccttggcctcccaaaatgctgggattacaggtgtgagccactgcacccatccgaacattttttaaaatttattttaatttaattttaaattctaggatacatgtgtagaacgtg

SEQ ID NO: 128452 - DNA, 1053 bp, Homo sapiens
gcctggaagtaaatttggtctcttagcgatttttttcaagaagggattttaatcatttttgccacaaaatgtaacatggcatgttcaccttacccttgattcttttctatagaaaaatgcacttggtttggtttccttgacaaccttgtgggggtgccttctttagtttgctacagtccatctcctactgttagttccttccttttgctgctgaagcgaccagaagtggttgtggactggaaaaatcctctttgcttgtgtgaattctttttgaaatacacgtcatatcaagctttgtagctctttattttagaacttgcttttctacctaaaacacaagccaaaatcagcgttgtcgatactacagctcccctccctcaattattgacacccttaactcatgccctcccccaatgggttcacctcaggtcccctcaggtctggttgtgtcaagagtgaaaccagtgggtgaaagtatttttcatttccacatttgcatgtgagatttttgctttgtagttttagtcttgcagaactattaaaatataaaggaattcttggtagtagcaataaaataatgctcacagagttgtcatacctttaagattagtaagtcgtggaccttactcatctttcttgctataaatacctaaaatgtcgtgctcagttttgaccttttgaggtaagtgattaatgtaacttggctaacttggagattcaacttctatagatcattgttttgtggcccaaagtcatgcttcagaagttggtgtcaagacttagaaacggtggcagggaatctccatatgaattccccatatcgagtgtatggccagaaggagcctgaaagagcccgaatttaccaacttgagcacatcagtagttcttacatttcccagagagccaaaatgatttttggatttagttttgcctcaaaataggacaaaaagtggtaaaattcagataaaaataaccaagccaaaggaaaagaacggacctaggaagtcaccctgagctttagcccagtggctgctgaagttggtccgcacattc

SEQ ID NO: 128453 - DNA, 1003 bp, Homo sapiens
ccttggtgccatcatccctgctcctcctttccttcctctccccttcccatgaatgtggggcttgatttgttttaccccttaagtgggctgaagatgtaaagcttaacctcttccaaactagatgctttgaggtttcagctgtcactgagaacagcttggtagctggtgcagcgtaccagcgtgcagaggcagcattgttcagctggagcctcactgctggagcctcatctaccagagggctccttccatactgcctccatgcttcgctgtagaatcaggaggcgaccacagcagcagaacactgccaccctaggatccagagctattgcacaaaattcacacacaggtgtggctgtgacgtgtggccataagcatcttcttcctttatggcacagtttctgagtgtagcagagcttgatgggggtgagcccaacacccacacttctcctcactgccttcctcccttctcagcacctcgtaactgaggctggctgaaggaaaggaagcaccagagatgattcccgaggtgtttttaggtcaggaggcactggcatgaggcaggctctgcagttgggtatgacctgccctgctttacctgggaccagagattcctgggaagggggctctcagcgctgaaatggtgatgtggggaagacgtggtcccttccatctcaggggaaggtttcctgaggtatcattagatattcttttttagactaaaatatttcctaaggggtcaccttctcctttctttgcctttcctccatggaagaatatttgactatttgatccaagctcccttgccactccaaatctgttagaaatgtaagtcagaattgagccccttcatagtggctcacatctataatcctagggctttgggaggctgaggctggagcattgcttgaggccagggttcgaaactagcccaggtgatatagcgagatctcgtctctatttcaaaaaagaaaaaaaaaaaaagaattgagccttttgttattga

SEQ ID NO: 128454 - DNA, 1067 bp, Homo sapiens
agcctggacacctggatggtaaaagcttcccaggtgactctaatgtgcttctaacttgaggaccgccatcagcgccagcccactcttggatcagccagcgtttagtaacttgcacgctttacttgagggggaagccagtttgaattgctttgtaatgtaatggatgtctttctacttctcagttctattcaggaggtacttgagtacctactaggtacaagacactgttgttaaattaggggatttaagtatgtacgagatgattcggttcttgccttcaagagcttataaaaaagctaaaaatacggaaataactctaatgggaaccactacaagctaaatgtcattaaagtgaatcatgcaaattatggtaattgagagaagggacagattgcatttaattagaggggatcaagaaagtctttgagaagctgccatctgagctgagtctgagagcttggcctgcagagctgggggtgggtggacaggccaggtggagggaagataatgagcgcagatagaaggagagtgggcagatgcctgcggtgcctgttttgaccagagcctacggtggtggggaaggtagtgggaaacaaacctaggagggagggtggggccagcaataaaatatctttagcctgctccagcagtctgggtccagcagtgggttgggagttgttaaaaactcttcatgaagtttgtgaagcagatgtaaatacatcctgctatagcaaagggattgatttttctgtaacaaattgcttgaattgaatatatataattatgttaatgcattttaaactagagaagcctgttgcagggtaaatgagttatagatataaaataaataaatacttactattgagagacagagccttgctctgtcgcccacgctgaagtgcggtggtgtgatcacagctcactgcagcctcgacctcctgggctcaagcagtcctcccacctcagcccctcaagtagctggaactacaggtgtgggcgaccacttgcagctaattaaaaatttttttttgtagagttgaggtcttgctctgttgctcaggctggtc

SEQ ID NO: 128455 - DNA, 1048 bp, Homo sapiens
aaacaacattagaaaatggcgcaaaatcgttaggtcccaggagagaatgtgggggcgcaaacccttttcctcccagcctatttttgtaaataaaatgtttaaacttgaaatacaaatcgatgtttatatttcctatcattttgtattttatggtatttggtacaactggctgatactaagcacgaatagatattgatgttatggagtgctgtaatccaaagtttttaattgtgaggcatgttctgatatgtttataggcaaacaaataaaacagcaaacttttttgccacatgtttgctagaaaatgattatactttattggagtgacatgaagtttgaacactaaacagtaatgtatgagaattactacagatacatgtatcttttagttttttttgtttgaactttctggagctgttttatagaagatgatggtttgttgtcggtgagtgttggatgaaatacttccttgcaccattgtaataaaagctgttagaatatttgtaaatatctttctgctgtagtgtggtggtctgttggttttctccctgtcgctgtgcctcctttaaagaatattgacattgttttacatcattggagaatttgattaatactcagcttgtgggaggaaatgtcttttcgcgaatggtgtgggctgcctgccccgcagtgaccactccatcgctgggggtatcgtgggtctggataacccgtcagagatggtttttgaatctggggtatagtgggaaggagtgcctaatgatttctgatgttccttcctagaagttcaggattcatgactgtaagctttcagtaactactctgatgtttgctgaatggactgctagcttgaaaggtaatttgctcaattaatagatttaggttgatttcactcttcatattattcttataattatgttactttaaaaattgttatttatggtatttcttctaagttgtgaagtatgttttttttttgttctgttttaaaattttttccttagtttcactctcaaaggaggtgaatgaaatatgttttgttctcaga

SEQ ID NO: 128456 - DNA, 1005 bp, Homo sapiens
caaacaaaatctgtttttgacctccagctcaaagccagtcagtgagaaactcagggacctctggtgggttactatgcatggtgtctgcatgtggcaataactgggtaacctagagcacaggtcttgggtctgagacctcagcaacctggctggtgtggagtagaatggggatggggagaccaacccagttgcaagtctaatcccattatgcacagttaggcaatctggtgaacagcatttgatgtattggcaaactgagctatgatccaggtaggtgctaatatcagagacagccaaatccacaggcagaatatggcaacagggagaacctcagcatcggggggaacctgagcaggagggagatcctgggcagggggagaacccgagcaggaggggaacccaagcagtggggacagcctgagcagcagggagaaaccaggcagcggggagaacccaggaagcggggagaacccaggaagtggggagaacccaggaagtggggagaacccaggaagcggggagaaccggggcagtggggagaaccggggcatgggggagaacctgggcagtggggagaactcaggcagggggtagaacatgggcaagggggtagaacacaggcagcggagagaagctgaagtcaggtggccagggctcgatgctgccaggtggtcagcaggctcctggcacagtcctggtctggccctcgagctgtgagagcactgtcttttgaaaaggcttatacactggactgggcatggtggctcacgtctgtaatcccagcactttgggatgccgaggcaggtggatcacctgaggtcaggagttcaagaccagcctggccaacatggtgaaaacctgtctctactaaaaacacaaaaaaccagctgggtgtggtggcacacacctgtagtcccagctactcgggaggctgaggcaggagaaccacttgaacccgggaggtagtggttgcaatgatctgagatcgtgccattgcactccagc

SEQ ID NO: 128457 - DNA, 1054 bp, Homo sapiens
gtccatcatgagtagaattttatctcataccgaatttaatattcttatgacttaagaaacagaatcgcaccagggataacaatagcttaagatatatttcacacattttgtctgaagagcttaggcaagagagaaaatacgtcattctattaaatactgactgcttcacttccaatgaaataacggattgattagcatttcctaagcaagctgttctgcatttatttgattcacttagcgtccatacatataactgatttaaacttaacattcttcctacacttttacagatcacatcagggaaaaaggaagattttcatggaataaattaacttacactaaaaacaatttgagcacagaaacattagcagaatgaatatttatgaatttgcaattaattttaccgattttattgtgtattacttactatgtaatatgtgactaatttaatgtactcatttatgtaatagatgtctacagaggaccaacaaggggcccagcactgtgtaagtgccaaaattacaacaataacagtggcaaacaaactccctattttcatagcgttaatattctagaggaggagctaacatttccaaaggcagctccacgttttctatgacctataaagaagaggtgagatgatgttgcctgcatgtggctgagtgaaaggcagccagcaaagacctctcagaggaaggaaattgacacctgacctgaagcccaagtgcatgaagaaactaagctacgaagagggacagagaggaggtcagtgaggctacagcagggggtggcaaacgttttctataaagggacacatagttgacgattttggatttatggcccagacagtctgtgtcacaatgacccccttttatttggcaagtaaaaagcagccacagtaatatgtaagctattatgccaataaaatttatagatggacaccgacatttacatttcatataattttttgtgtcacaaaataatgtttttttaattttgttatacccactgaaaagcataaataccattcttaggtcacaggctgtataacgca

SEQ ID NO: 128458 - DNA, 1058 bp, Homo sapiens
ccaaattggttttgcccatattttaaaatcttttcacatttcacttatatttccacacaaatgcataaatcttaaagcaactagagtcagctggaaaaaagaagtgttctaagcatttaccgtgaagaacagatcgttaagaaagtaggctgaggaaaattgggaagaatgctgaaatgagtagcaataactgatgagctatgctgatctaacacactccaagaaaaagaagactagcagtcagttgacatggtgttgtttctttctatgcgttatattcgttttgcttaagaaatttcctaatacaaaataactgtgtcattcttcgtttctaactaaattcttctatatgattctctaatttaatgtgtgcccaggtttctcttgacgtttcattgatgatccagtggcaaagaagaagaaacgatactaagatggaaggagttattgtgaaaatgtacatagataaaagcaggaacttattgcataaacatgtcgttcctataaataaaaatcaaacatatatatgtaagtcttctgatcagtactgcaaatttgccctccagaaaggttatgcaagtgtgcagtccaagaagcattatttagaaatgctactaaacaggttggcattgctttgagaaataactcattattcgtttaaatagcatttttaatttagtttcattatatattgtttagttgtatttcttctttgtaatttaccattctttatttgcaaatcattttgactacaataatcaataattaatatatcaactgttataattcaatattcctgtagttaatattctcatttgccttataggtttttctttttttgtgtgagatacagggttttttttatttttctattttgcattcaatcttttcctttatggcttctgcctgtttaatcatgtttaaaactgcctgtctactgtaaaattatataaatgtttatcttaattacctcataatcattttatgacttcagtttttacatttaaatcttcaaaccatctgggttttactttaccgtggtaagaaggatgagatag

SEQ ID NO: 128459 - DNA, 1037 bp, Homo sapiens
tggggacgctgactcccccaaaagcttgactgtgccggaggaggtcaggggcacttcgtcccccaggagggccgcgtgcctggaaacgcggctggtccgcggaaggctccgggcagctggccaggggacagttctgcacggataactttctaagtggaggacccggcgatccgcctccccagcgagcccacccgcctcgccgctccccgctgacccgcgcggcctgggcgcgcctgctctcgggctcacgttagtccggggcacggggccgaggggtcagggcgctggagtctctggcgaggacgagagagttgccatcttgttctgttgaaattgtttgtgtgccttcgtgtgtttattttaacccattaggtcatggtctgagaagaatcctctgacggtcccttattttaagttgctggctggcactttttttttttttttttttttttttggcgacagacaaggagatggggattgccttgctacttttgaaggttctgcagatttgcagatgctacttttgagggttccgtaagaattgaagaaattctttcaggggcaaggtccagagttgtttacagaagtgggttgggtccaagtgatgggggtgcagaggcacctttgcgggaacccaggcagtggtgcattttgagatctcgctttaagcaaaacaggcaataagtgaaaaattctacattaattgaacaaatacccagctggcttaaccacacccacggcagacacctgttgcctggcagagagaagcgccgtgggttcagaacttgactctggacggaggtgtgagtctctgggttcaagacacctcgcagggaagtaatcgccgcatggaggggcttactcttcaggaccctccccactcccgagacgacaagcccccatctaggggcggttcgcagtcctcggtccgtgggttctctgactgacctaattgcttgtttatgaaaatgcatctgcttccctcatttttcccactctttttcttttttagccattgtgttgttcagcataatttc

SEQ ID NO: 128460 - DNA, 1045 bp, Homo sapiens
ttacacctttattagaaaccttatggtctttgccctccccctaacccctctctgcgttttacttcagaaaataaagaatgaaaggattgctaattacatttctctcttctgctctgaataaggatattccatgtgatactcattgcatcccttcccctgtgtctaatgttaagaagtgtcatcggagcaaggtgaacctgagcctagagaattctacagcaacccatattttcagagttatttgtgggcccaagaaaacaatgagatgcacacttactcaaactttgaatgttcttatcaattcttgaattgataattatggctccacagcctgctgtgtaacttatttgaattttcatgttccaaggaaatccacgtggcttcagttgagtgatcatttaggacttacccatgcctaatctctcaagttgctttggaagactcttgctaatcacagcctctcttggattagatgactggcaaattctttgcactcacaacttgattgaaattcaggtgatattttacattcaagatgaggactgaatgatttactcctattactgacagctgagctgccgcacatctgacagctacaaaaagtggcagaatgttttctactttgcagtaacagtgaacccacatacacacagagaccagatctcagttcaggggactcaaagatctctgagctgtctggactcgcatttgaggtttgatatttaaaaaagagaaagacactttgcactgcccaaatggtcacggaaatgtcaaatccagttcagccatgcctgtaaactgctttctaatccagcccctgctcgctgacatccacattgtatgattgttctggacctgcagcctgttgtttcaccgggagttctacaagaatggtgacaatagcctcccggctggtccttgccatgccacattgcttagttgaaagtatgttcttataaaatctttaaaaaatgttttattcctcacatattgctttaggaatttatttctgagtacagctagaggattaagagaaggcagatgc

SEQ ID NO: 128461 - DNA, 1083 bp, Homo sapiens
ttggagcaggtgctatgtgtccccagtactttttccctggccccgcaactcacacattgagttgcttaatgaaaatggagtaaagactacagactaaacttcttggggactgccctgtgacccttggtttccaaggaccacaaggattttattgggtatgacaagaatgacccaatttgtataatcagcttttgcagaggtaaatacatttagtccagatcattttaaaattttctgtttattaaactaaaataaattcagcaacatagaagaattccatgacctcttttggttgtgggagccaattttatttgatagcaagaccacattttagaactcaagagcgtgcctcagatcttctaggtcccttgaacatactaagctcagaacagacaggcaggcagaaccaagcagaattccccctttaccattgtggcttcctgggatgatgggagaaagggttccattcgggaagtagaagtttcaaaaacccatcttggacagtggctcttggcaatggctgaacagtagaatcagctggaatgttttgaaaaacccagtcatctatgggtgttgtggagttgggaatgtttggttaagtgtagaggttctcaacattgcctggagccactggttcctcctgcccccgacctcttccccagtacccacccctggcctagagatacccaggggattctgattccactgcttcaaaatgcagtctgtgcactcatatgtttaatagtgcttctgttgtgcagccaagatgcagaaccagtggatcagaggcaaattttttgaataaatattgccatcaaagcctaaggaaataattataacatttataagggagcttcttgaaaaatatgcaatcaagtcttgttccctgggttgtggaggccgccaaatacatggaaagatgggcagagaacacagaataaggagaaaaatgaagtgaaacatgcatgagagagaaaagtaaatagtcaccagggaaaagatgaggaaacatgctgtgtttttaagttttctaacctcagttatagactgaatttggggaaaaacaagaatctttaaagaaat

SEQ ID NO: 128462 - DNA, 1117 bp, Homo sapiens
ttaacaatcagttacccagggaatgagtaacgggatgactaactcattatctcgagggtaacaccaagccattcatgaggcgtctgcctccatgacccaaatacctctcagtagattccacctccacctccaaccttggggatcaaatttgaacatgaggtttggggggtggataaacatccaaactatagcagcacccaaaagctgaaagtgccatgtcttattttttattttcagccttatccgtagcacgctttatggtagcaaagaggtctacaagctgtggccccaaaataatttaactttcttactgtaacctttccattttaaatttgattcactgtagagcatttccatgggtagaactgggtcaaagagaagtctttcattttagagttttgttattaaggaagaattgggtattttcatactttttaaagtttatttttggctatgattacttacagtggttcattttttatagacatctaggaaatgttaattactgcagataagattcccaattcagaagccaaccacaaaggcttttcttcttcttcttctatatatatataaaggagataatgctaaaatgctcttatgcaaattttaaaattccctagtacattaacaatgctaatgacagttaatgcattcctgaagcttctgtgtgatccaaaatattcaaaatgcttagaaatgttttaggtccaccctgcaaatatatgggaagtggaattttgttcatggaaattagttccttgaaaatagattcagtgccaagtttaagagatgaagaagagctgaaaagtcagtgtagtgcaatatagagtcttctgcggataaaggtcgaaaccctcttttcccagaccaccatagtgggtaggtacagaatctcagataatcactgcagtttggttagaagaggaaattgcccttcataaagcaacacagaagaaggtaaggagaaagtggtattagattgataggtcaactaatgataatgaagaaactttctcttgctgacggtgatgtcagcttctaccaggactaacttcagtgagcacaggaatggcattgctgttcaatagggttataccctcaggtgggatgacag

SEQ ID NO: 128463 - DNA, 1038 bp, Homo sapiens
tggctaatttttgtattcttagtaaagacggggtttcactgtgttggccaggctggtctcgaactcctgagctcaagtgatatgcccgcctcagcctcccaaaatgctgggattacaggcgtgagtcaccacacctggccagttattctttgattctcctgcaccatctttcaattttttacacttggggcattttccctgttctcagcaccctcatcagtgtggaccaggacaacgggagagggtaaacctgaattcctccaactctaatgactttattaaaaggcttgagggggagggcagaaagggtatagtggtaacagtgagcactttgaatctcacttaccctaatcatttcttgaatgattgaaggagtaatgggaccctccttattccttactcctaaattctcactattgattgaacgtctcatacgcaggcactgagacacctcagtgaataaaatatagtcctcgccttccttcttggggcttccattctagtggcagaaatagacagtgattacacagctaattatttaattacaagtctgatgcattctgcaaaaacattgtaagggccaagggaaagcttctcctttgccttctgaaggttcactgaaaatcaactgatgaaagacaggtgaacaggagaagaggcttacaaatttgatcacagttttacacaggagctttcggaatgaagacgcaaagatagacaggaagctgtccatttttatgcttaggttcaacaaactgtggacagctgtgtggaaataggattggcacaaagggtctgatctaatgccaatacagtgagggggaaagcccagtaagatctgcccatctagattcttcttggcctctctgcagaattccttccttctgggcatggggcagcaccctctctgtaatgggaggtcttatgacccacagtcgaacaaggcaggtcaggtgatttcgttatggtcagtttttacacagaaaggtggggaaagttggagtagtagttttaggttttatggctggcttttgggaa

SEQ ID NO: 128464 - DNA, 1027 bp, Homo sapiens
gaaatttccatactgtttcccatagaggttgtattaatttacatttctaccaatagtatataaccattcccttttctctgcatccttgccaacatctgttgtttttttgactttcaaataatggctttctgagtgctgtaagatggtatctcattgtggctttaatttgcacttctctgatgatgagtgatgatgagcattttttcctgtgtttgttggccaagagctaagcattctgatggcttcgtgtggatcaaatcacagctggattgttcagttttggatgccaaatataaagagggacagacaaactggcattcatccagaagagaggaatcaggatcacgagagattagaagttgtattggtaaagggaatttgaataaatgatattatctaatctaggtgtgatagctaaatttatgtgtccacttggctgggctgcagtgcccaggtacgttgtgagacatcattctggatatttccatgagggtgttttggatgagatgaacatttaaatcagtggactttgagtaaagcagattgccttccctggtgcagtgggccttgtccaatcagttggaggtctggatagaacaagaggctgacctccccagagtaatggggaattctgcagcaaatggcctctggacttgaactgcagcattgacttttctctgggtttccagcctgctggtctgtccacattttggacttgccagctcctataatcacatgagctcattccttagtataaatctttctatatacgtatgtgtacgtcctattccttctgtttctcctgggaacgctgactgatacactaggaaagcagagatgtgggatggaggcatggtaagtgtttttagatatctggagggcttttatggaaatagacacagatttgttttctatgaatttgagagacccagatccctggattgaaatttagaggctggaagttttttttttttttttttttgcttaattgaaagaagacaacaagaattgatacattgatacaatt

SEQ ID NO: 128465 - DNA, 1050 bp, Homo sapiens
atttaattgttcagcagtagaatcttttctgctgtacgtgtgatttctcttggaggaagtgaattctttcttataagtgagtgtcaaggggaaagcacagaacatcaggcttaaagcttgagttgtggccctatgatttcagttccatatacagaaatccatccgcccaacaaagaaccttctaaacattctacagacttgtccaaagtgactctactgtgtagcagagcagagaaaccaagtttgtgacccattttctggcatcctaaaggatatctaagaacctagtgatgacacccccagtccctagctcctacccccatgccaagctgtctcccactcattgcctctggatcatggtgcaacttgccactccaagaagatccacatgcaaataagctcatgaaatggaacgaggtttcctagggccatgtcctactcacatttgaatgaccatagttttagcaagatcatctttttaagaatagtttgcttctttctaacaccgaagtgaaattggtagaaacagagagaatcaggatcagaattaaagagacgagatagctctggaggcctttgaggacagtcactcccatgtgaagtgaaaacaaaccaagggtagcagtggcccctaccactgggggcagagatgctggttgctagaatggcaccaggggtacagaaagtcaccttctgctcctgtgacttgcttatcccatgctgcatgggtgtgaaaggttctgatgctactctttgtatttttggtagagagacaatgaatcagcatttcaagctacaggcaaaataaataatatgtttagacatgtcttaaaggattaatacttcagaatctgagaaagcaaagttagtaaacccaacctgggccagtggtggacacactaagataaatagctcctctgatttttatttatttatttatttatttatttatttatttattttcgagacagagtctcgctctgtcgcccaggctggagtgcagtggcgcgatctctgctcactgcaagctctgcctcccaggttcacgcc

SEQ ID NO: 128466 - DNA, 1087 bp, Homo sapiens
gtgacgcgtgacccttcagtactgcctccagagccagggatggtacgcttctgtcgtttatgccaacagtgtttgtgggactttgtatggcagccagagtggactcacccacaaccagagttccacagggagagaaaaactcaaggtcaggactcagaaatcttgatcaacggacttacttgcaattggcctctaggcaggtgtggtcgctggtggacttagggtcccatggaggaccttggggaggctcagatcccaggaaagcagctggggaaccagggcggctatgaggagaaccccttgactcaggaaagtagtctggtctcaagttctagggccacccttaggatagccagaggaaggctagaaagccctgtgggcctccagcttccagccttccaaaagtgaggaggtggggctgtaagattacgctggctgatggctgtcgcaaaacactaagtttattacataaaagcctcaattccctcctaactatcaccaaaacagatgagttgtggtgtccagctcatcatcattgaagaaagaacacctcctttcttcaatttgttcttttgtgttttcttccctcttcagagctaactttttttttttttttttttttttttttttttgagacagtctcacttggttgcccaggctggagcacagtggcgcgatctcgcccactgcaacctctccctcccgggttcaagtgattctccttcctcagcctcccaagtagctgggataacaggcgcccgccaccatgcctaactaatttttgtatttttaatagagatggggtttcaccatgttggccaggctggtctcaagctcctgacctcaagtgaccatctgcctcgccctcccagagtgctggaattacaggcatgagccactgtgcccagcccagagctacctttgatgcccattttcatcatgttcagcttggtgttggggaaagcacaccaggagattcctgcccagggatggccctaggacaggtcctggagctgcccctcagagtggcccactgcatcacgtgaagcaagaacgcaccctttggttaagcctgttggaattacac

SEQ ID NO: 128467 - DNA, 1044 bp, Homo sapiens
tataatgtggcagagggaaggtgggaggaagggagataaatacccatgtttatctccagcctgcagcagtgaaatgagatagttcaccatgtattccttgaaaaccactgaaaataaatatcaatactaccattatcttttaaaaaaattcagtagtctttcccacttgtcaaaacacttttttaaaatcttcctttaaatttccagagtgtcctcatatctagtttgcattttatcctcaacaccacaagaattaaataagggttggtattatcactgccatttatagataaggaaacggaagccaaagaagttgggtaatttgcctaagatcacacagctatttagagatggaactaaggaaatgacacagatctccaagcatttctgtaaattttttctaagtaaaagatgtttccttcttttcccaccaaccctcaaaattccgtgtgctgtctgtggaattcatgcacagattgctgtggttcggggaaagatcatgcccaggacgtaggggataaagagggaccagacctgcctcatctgtgccctcgctgcatgggcctgggcaagtcggtgatctgtcagtatcccactttcctctccataaaatgataaagctgggaaggaaatggtaaatatcacctgatcacctggattaaactctgacttggaggtttcttggctatactgttagtcagcattctccagagaaaaggaactaataggatgcatgtgtgtgtatatgtgtgtgcacgtagacacacacatacacacaaagaaacaggatagatgagtgcatgtgcgtctacaggcacacatacaaagacatttatttcagggaatttgctcacctcatggtggtgctggcaagtctgaaatctggagggcagcctggcaggagggaaatgcaggcaggtcttccatgttacagtcttgaggcagcactccttccttcccagaagtcctcagtttttgctcttaaggccttctgcaaatcaggggaagcccacccatattctagagagtcaatctccttcacgt

SEQ ID NO: 128468 - DNA, 1026 bp, Homo sapiens
gctagcttccagcttttcttctgcagcttcctcatttttctcagcctccatagaattgaattgaagagaggtagggccttgccctggattaggctttgtcttaagggaatgtggtggctggtttcaccttctatgcagaccactcaaagtttcttcatgtcagcaataaggctgttttgctttcttatcattcatgtgttcactggagtagcacttttaatttccttcaagaactttgcctttgcactcacaacttggctaactgtttagcacaagaggcctagctttcagccgatctcagctttcaacatgccttcctcactcagcataatcatttctaatttttttttttatttaaagtgagagatgtgtgactcttcctttcactttgacactttgaagctattgttggttgattagctggcctaagttcaatatcagtgttgctttttgaaaagagtaaaaaaccatttggagccaaatcaagcaaatgaggtgtgtgatcaaactctaatcacttagatatctgatatcacttagatatctgatatcataaagtaaaactttatgaagtttggggtacctgtggccatttcttaaaataagacaacagtgaggtttgccccactgattgactcttactttcataaaaggttctctgtggcacgtcatgctattttataacattttacccacagtagaacttctttaaaattggagtcaatcctctccagttgacttccttgtgtacgcataattttataattcaaaggcctagttttagttggacaaaaacacattggtcacattcttaatagccgcaccccaagtgagccaggaaaaatgcttgtaggaaaaagctgtaggaatgtgctcttcaccttcctgcaaaagattagggatggttgatatgtgagggaaggtgaaagctggaaagagtgagtgataccgaactttattttttcataggaaatacaatatttccttcactgagctgactggtcatctgttggaccccagcccagc

SEQ ID NO: 128469 - DNA, 1124 bp, Homo sapiens
ggcccagacaggcggatcacgaggtcaggagatctcccatgcaccatttccatcatatttttgttactctgagtggtaacagaacctgtagctgctctgttaacctggaaacgggcttgctttgtacaaaaaaagttacctgctttcagatggggccggtgttcatttaatttttctgatgacacaaacttgatgatgatgaagttccctacagagaaagtcacactagaaagactgataagttttcagacccttgaggttggccagaactctaaagaagaggtagatatggagagacttggtaaaaggaatcatcctgacgtagtgacagatgggatgtggaagatgaaggagagggtggaatcaaagacgaatcatgaaagcgacccctctcgtggcgttgaaaagcttctcagttgttggagaatctttcacattgtgagctgattagattgaaaaacacacatatatggggctgtgacctgaactatatctgacgaagtcagcaattgctttgtgtgtttgtgcacgtgttcatgtttgtgcatgtgttcatgtgtgtgtaaatgggcctggtgtttgtgactcagtaactttttctaagagaaaacacgcatcctcacccttgcaggggaggcaccagctgtcagtggtgaaagagagagaagggtcttcattcccctcgtcttccctctgctgtctccccagccctttacctcccgccttggccccttctcccgttcatcttcctctcctcctgctccagagaaggaagtaattaaacggtctgtcctgtgttggctttttttttttttttttttttttttttttttttactgcatatagccctttttttttaaaaaattatactttaatttttacagtatatgtgcacaacgtgcaggtttgttacatatgtatacatgtgttggctttttaaggatgtgagacttgtaaaaacaaaatactatgagtagaagtatggaacaaaatgacaagcctcatttaccttaaaataagaaatctcttggccaggcttggtggtggctcatgcctgtaatcccagcactttgggaggctgagacaggcagatcacttgagctcgcaaattcaagtccagcctg

SEQ ID NO: 128470 - DNA, 1049 bp, Homo sapiens
ttaaattttgtagatggtataaagtaaagatcaaggatcatttctgctggtatgtggatgtccagtttgttcatgttatgttgaaatggtgattgtctccatggagttgcttttacttgcacttttattgaaaatgaatttgctactgatggatgggtctgtttctggactctattctgttccattgatctatttgactacctttgcaacattattacagtcttgattactgtaacttttaaaaagacttaaaatcaggtcgtttaagtcttcagattttcttcctctttaaaattgttttggctattctagattacttatgtttcaatataaattttagaataagtttgacgatttctgcagaaaatccacttagaatattaagattgcattaactctatacatcaattttgggagaattggcatgttagtaacattaagtgtatttgcgtgtagatctctttatttaggtattttaaatttttaccaatatcacatattttttaaagtttatcactgagattatatttttaagattattcaaaatgtgttatgaatttttaacttactatttccaattgttagtatacagaaatattatttatttttgtaaattgactttttatcctacaaatttgctgaactgttttattgattttgtagtttttccatacatttcttaggattttctacatagctgttcattttatctgcaaatcaagccagttttacttactaatttctgatttttactgcttttatttccttttcctaccttgttacactggctaggactgccagtaaaatgatgactagaagtgtgagagattaaatctctgcctgggttctagatctaaggggaaaagtgttcagtattcatccattcagtatgttacttgtcagtttctcatagatatcatttggcagatatcttttggcaggttatgagagttcctgggttatggaaaatgccataaatttcctcttagcacttccttgcatgcgttctatgaattttgacgtgtgattatttagtgtttgttcatttc

SEQ ID NO: 128471 - DNA, 1109 bp, Homo sapiens
cttggagagaggctgaggcaggagaatggcgtgaacccaggaggcagagcttgcagtaagcggagatagcaccactgcagtatggcccaggtgaaagagtgagactccgtctcaaaaaaaaaaaaaaaaaaaagaatgaagaaggcagatgcaatgtgacagagatttactagatgatgtgctcgataacacccttcaactagaaaaaaaaattagcttctcttagaatgtgctatcggcatatattggcatacagtaattaagtgtaattgagaaaaggtaattctgagagggaataaaagcaccagatgggagatacggcattcactcttacctaagtcctacctaccttcaagacctggatgaaacatcacttcctccaaggagtcgttgacagacttaggccacagtgatcattgctgcttccaaacatctatggcatttgttgaccaagctatttatgttatactataaggaagcgttgacaaaaacgtggcagttttggtatctgggcaacattccgcaggggctaggattgtgtcatttattgtagtaaatccaatgtctcattcatttcctgtcacccagtaggccctcaggtttgttgccatggatgagttaacagatggcactgactcttggtggcactggagactgcagccatcagatgatgtttcaagagacactccactgtgatgacacatcctgaagacagggaaactaatgtcctttgagaagtacaaatgtctatttttatttcacgtagtattggcttgaaaagatacaaattcacttaggatgaaataaaagtgttctgtatttgaactttatttcaaattattatttcttggaggtttttattaggcaaccagttcctcctgtcttagaaagatgtagggacggagaagttctaaaaattctgggcctatccttcaaggttcaatctcatagtttcttcctcaggaaaacctcctctggccatcctagcagatagacatggcacttccatgtctgtccaattcccccaaaacatgacctaaggctcatctggaataagcaatcttcttctgtgtaaatattttataactatagcctattataaactattt

SEQ ID NO: 128472 - DNA, 1074 bp, Homo sapiens
ctaagtgcctgatatatggttgctgatgcagagaggttctggtgacagcccacactgagggatgcttatggagggcccaagtaggcgagagaatgcaccctgcgtatgtatgtggaagccaaggatccagctggcaagttggcaccagccaggctgagtacagaggttccagtctctacatcagaagagccgagtttcctgacctagagaagttattttggctttcaagttttcatctttaataagaagggtttggaataaaagaaggaatactgacaatagctgacgtttcctggatacttatgggtgccagctgctcttcttcgcgtattcatctgtgcaatccaaacagcactctatggctagaggccactgcgacctctcttttctaggcataaacctgagtccctggcccagggtcacagctggcaggctgggcactgacggactccaggctttaagtcacattgctacactgtactcagggtatctgccgcccgggcccagacccagagatccaccctaagggcgaggataaggagacagaggacaggcagatgacaaggtgggggcagttctcatgaagggtttccttcttggacactgatttcttcccaggatgcctgaggatgctgaccagctccttccatccctgtcctcctcacctctttccacatcccctgcagatcagcccagcagtgaggcacagcctagggtcggatgtcccatagatcatcatggaagctcagaagcaatccgttcttcattttagaggctcctctccgtcaagattctggaaacacaggagaacactgtgacctttctcagaggatgttttcctaacatgcctgggaggaagacttgaatggtggtgtgaaaatgtcttttcatgccctaatcaatagcccatcaattatgtatgtacttatgtatgtaaaccctgttaccatcctgtggagaggataggacttggtgatgtccaactattgagctctttcttcaaagtcttaaaggaagttcagtacataaaaccatggcagcgggttggctctggcagagtggagtcagtcagac

SEQ ID NO: 128473 - DNA, 1057 bp, Homo sapiens
gggttcatggagccataggggtgaggagggtgacatttactgagtaatcacttcgtgtcaggaactgtgccaagaacctcgtaaactccagattaattgagatagacattttggtggggagatatctatgcattgttttattgttagatcaggcataatatatccaaagtgtaaagtctttggaaactctcgatgaaggaaagggattcagtttccaaggtgtgggctagaatgcagaaaataaaaatgtgtaagtgaaggttttctgtggctttggtaatggctgtgtttttgatatatagtaaacaatgataaatcgttgttcttttaactctgaattttttttaaaagaatgtcactgtgcacggtttgaagctgcaaagattgccttcgagagggaggagtcatttctccacgtccctataacattatgtggaatgttgtctgtcagctttggactgtagtttatatgtcagtgactgtagtttatatggagtattttgtttaacttttcatttgttcccaatgttacaattttgctttctcatagatatgcatatggaaccaatgcactaataaggttcatttctcctaatatatgctgtctgtacatttgtcgcctataatagttgttaatggttttaaagagggtcatgatagtccgttatgtcaaaagatgccattgccttctgtctttttctgtgcattcctggttttgaaaatgagggtacaatcagacctgaaaaaaaaaagcatatgactttgtttcatgacctacaaaaagtaatggtaagcaagatgcaaattcttattctccaagggtatatacactgtcaaacaattgaaagaagccaagactatctgaaaaggcctatttttcagatttcatcttggagacctttcatcatagttcctaccccaagaaaataactaatttgctctagccttatggaatagcctggaatggctgcctgggccatctgagaagttggctggtcctatccagggcttccccagttggcctggctttgctcaggggccgggggctgaactttag

SEQ ID NO: 128474 - DNA, 1039 bp, Homo sapiens
ttctgtcaagaaaggatggttgctggtgggggctggggggctgtgggggctgggggtgctggagcagggaggtgtgacccaccccagggaataggaggagagaagtgggtagggttttcttggactctcacttcaccttccggttggacgagctgcaagcatgagcttctaagctttgcatcccagagtgttggcggctatggagatcctgcgggcctcactgccgccattccccatggccactcagccagcactacctaggcactgagctccgtgagggacttttttcctgctcaccttatctcaatggggtcaggcgggctgaagcttctggagtcttggtgaggctgttgctggattgaatatgagcagctgcagggctggaggaacccaaatctcagtggagcctgttcattgaagaccttactgataggttagtgccaaggggtgctgacaggtacagttatggggaactggcacatacgaggtagcagcatctgccctgaccttggccctataatcatccgtggcattgttgagaacagataaacagtaaccaacagtgggctcacatcacagatgttttcccttggtgcttggtgggccccaagatgttggggttcaaggtttttattatgtctagggagggccagaatcagtcctatctgctcgcattgagatggcctttgttcaagcaagaggtgaaattaagtgtccagaggcagaaatagatttcactctgggttctgttatccatggttctttgtagattctttctgaatgtccacaggtgtgctcaactgctaaattcagctgcctttgaaatcacaaaaagggctcaacaagtggaggtctcttccaccagcaaagcaaaggattgtgtaattcgatcactagggtaggctctgaggctgcgtggcccgagttgaaagctgagctctgcacggacagctggtgggtctctgcctaagttattttacctatctgtgctctgcttcctctcctcaccagaaaaccgaggctatggttgtatttgcat

SEQ ID NO: 128475 - DNA, 1050 bp, Homo sapiens
ttgttttagttctcccaacaacctgtaagagaaaattggacagatattcctgtccccattttagatgaggccgcaagtacttagagtgaaaatttgtttgaggtcacataattagttaacatattattccagataatcacagatttcttttttagacaacgctccctacatctcaatagcttaaccaaagaatgtgtcagagggccatctttttgcatctctgggttctgcagggcctgctgcaggaattggtgtccacagggggttctggagccaattctccacagatagtgaggtagttctcctgtggtcacacacctcgggatccttcacagccaggtgtgtgggcagacgagagagtgtggtcatgctacagatagcctggcattgacgttcatcactttagcccgtattccgttggcctgaactgaggcataccatgccgtgaggctcagcgagatgcaacggagtgtgggcagtgtcctcccggatgttcagaagaaaaggaccctgctgaacacatgcagtagtttccaccactattaatgaccgtaaggcaatgaatctaaatagtgaaaatctttgcatgaaacctatgcttttactgacattgtattgttgcaacaatccagggatgtagttatgtatctccctattgtttaaggatgataaaacagattcagagaatttaagtgacttgcaaaagtccacacccctgagaaacaagagagccagagaacccgtgggcagctctcagctctggcgccagggctgtgtggttgggacatacccattgaccttggaggcagaacaaagctggtatcaaaactcagatttcttgactgccatttcagtgtactttttccactacaagatatttcttactgttttgagcatgctgtattaccacagggactagcgacataggtttaagcaagtcttcagtgactgaaggagaaaaacatgtagtaaatattgcttaaatcttttctcattaccacatagaaacacatttctatgtagaagtagaagacatttctacttacctat

SEQ ID NO: 128476 - DNA, 1100 bp, Homo sapiens
tttttttttgtatttttagtagagacggggtttcaccgtgttagccaggatggtctcgatctcctgacctcgtgatccgcccgcctcggcctcccaaagtgctgggattacaggcgtgagccaccgcgcccggccaggaatattatttctaactcacaagagttcttctgcatgttagccaccccccagagaaaatagtctccattgttgttctctcttcagcatatcccaggtatgtttccaagcaagttttgctccactataagttgatgaggacctttttttttggaagctgatggcctggcaagagttagtcttaataggttgtgtttcttctcactttagctggctctccctaatgataatgtctgttcaagttgagcccagtttcagccagtttctctgggagtcaaaagcctgtagcacacccagagagccaccacctgtccacagcatatggtctgaaggcatctctgctgctctagcctgaccagccagcccaggatttccaactgtgagctcaccctccttgtaaggcaaacagggtttagccagcgctcaccttgacctggtgacctttgaagattgaggttgcaggagaatgcaattgagaatgcagcgggtttccagaccccatgtgagccatccctgatgcttcaccctggctccatgggaaggaacccagagccctgcctggctggtctcctgctaatgagatggaaagcaggggtcctggccacaccatgaaactcatgatgttctccactcttgtgtccctgccatggctcacattcagtaattagataccagctcattaattcctgctattctttcagaagggaaaggatggtgccctttgttctgctctgctgggccctgagccctcacagcatgaagtagctagattctgcctcactccagaggcggctgccactttctcaccccacagtcagcccctcaaccatgaaaagatgtaaggatgtagctaaattacataacccaagcatgaaagcacctgacgtgtatgaaaccatgttctcagacacttgtaggcagtgacaactttataattaggcatttcatccaacttatgtatctta

SEQ ID NO: 128477 - DNA, 1088 bp, Homo sapiens
taatgcatggggctgggctcatgcctgtaatcccagcactttgggaggctgaggcaggtggatcacttgaggtcaggagttcgagaccaacctgcccaacatggtgaaaccccagctctactaaaaatacaaaaattaaccatgtgtggtggcacacgcgtgtagtcccagctacttgggaggctgaggcacgagaatcgcttattgcttgaacctgggagacggaggttgtagtgagccgagattttgccactgcactcgagcctgggtgacagagtgagactctgtgtcaaaaaaaaagaagaaagaaaaaagaaaaaaaaatcatgggctagctactctgcttgtattttttgtttctgtccatcctcttacttgatacccctccacgttctaaaaacaaagcctcccttcacattttgagtgtgtctgctatggataatgaggcagcaatcctggttctaaagaattgtgataaagcagtcactaaggatcccattaaaggtcaaaccatctaattcttaatctcacggcacctgcttgataatgatggatacttattaaactcattccttctgggtctcagaataccctttagaatgatccaatttttcattcaggcacttgaagttcattaaatgaatgctggagaaactgttttctcattgacgtacttgctttaatgaaatgagaaagtaagaagtgcctgaatattggtggtggttctcaaacccaaggaaatctaggggtttgtggagatccagaatctcctctctcctcaccacttttatggcctttatctaattttacttttcagccacgtttgatgtagctgacttccatctcgaaacactctcttctgattttccctttgattgcactatccactcctttttccatgtcctcgaccggttctgtcttcccgcgtgacctctcagcattgaagtcttatctgcctgccctcttctggatgcattgtattcctggatgagcttctcaatgccctagtctcatatactggccatatgatgaggattcctggttttacatgtcaagccttgtctccgtaagtgaactgcaaactcagt

SEQ ID NO: 128478 - DNA, 1069 bp, Homo sapiens
gtgtattatttttcttgtcacccacaaatcatgttgcaaagattgatagtaattgaataaattgccatgtgtacttaaagactgggcttgttggagacacaacacatttattagatgatcagttttttttttcctgttatgtcaatgctcactggaacacttcttttcaaatgtaggaaaaccaagctaactagatctagaaaaacaagcagaggtttcaagggatgcctttgaaaggtggtgtggtatcagggagcacgttgaattggaagtcagatgtccatgtgtggattcctttcatggcactccctgattgagacaatctgtaaaatccctttaacgtgcgtatgttatgattgcataatgtaattcttgtttagggtttattgtgtgactctttgctaagtaactgtactgtcataaatggagtccgagcagcggggcttgtctccccgtgagtgtgagatctgcatgctgccacctttctcctcctacttttctcgccaggtaccacagtctgtgtaagatgcaccaggctgatattttgtaaaatcaaggtcttcaccttccatttatgtggcacgagctggaatttgccagggtcaaatagtcaaccaggagttctttatggattcagccacatgggagaacttgagggaccttgcatgtcttatattctccaaaactccatccccacaggcttgccagtgtccaaaaggcctgatttttgggggaggaggcagctctaaaatagtgtcaattctagaactccttttttaaatgtcccaggaggagtaactattggcatcatcagtatttaaaactttgggctaattacatcacctgattatttccctcctttgtgctttctagagggatataaaccaatgagagtcttgagaggtggagtcagttcagctcagaagacactatcttgagggaaaaggccatgatgagtgggtttgtatgttgaattggaaagaggagaagggagatgaagagaaatagggtagggggagtactgagaggaaggatctgaagggtgatagagagaatgctgcctttggtt

SEQ ID NO: 128479 - DNA, 1042 bp, Homo sapiens
ttttcataatgtaggttgtaacacgatagaaggttagggaattaattgagtgggccatgatcagcttaagaaaataaaatgcaatagaaatatacctagtgcataataactagtagaatgaactaatatgaaactttgtccattatctatgtatgtagtatgtgtttactgtattgctatataaaatatatttctcatagtagattgcagtcacaaaagtttgaaagcctttgaaccccctttgaccatggaaaggaagagggattctgtacaggaaatggttaactcagcaggcctgggttgctcaaaccgtgcacattctcagaaagacctgctttgggactggcccttggatggtcctgggaaattagccaccaacctttggaatagtgtgcccaataagaatttttttggatgccttaggcttcagcccacatgaaaccagtttgatgactttatcctaacaatgtaatttatgtatggtgaatgcctgcttttgctttggggtggtgtgaggatctgaggtcaggtacgcaggtgccacatgcctgcatgactaacccccagtaagaaccctggacgccaagccatgggtgagcgtccgtggttggtaacatggtttctgggaaaattaatagagcccgtgagactccactagcaaagaacacctggaagctttcacctggtttctcctggactctgccccatgtaccttttattttattctgatttgaactcatatccttttgctgtaatatatcagaacagtacatctaattcagaaaagtaagcttttctgagtcctgtgaatcctagtgaatcatcaagctttagagtagtctcagggaacctggcgcagatgcagagattagacttgagacctagagaagttaagggctttctagaacatgtagctcaagcctgggcctggagtgtgatgaggtcatggacattaagctggaatgaaggtctgtaccaactcagtccttttctggtgaggcagcatggaaagacattggccttttctccatctgtgatgaca

SEQ ID NO: 128480 - DNA, 2216 bp, Homo sapiens
cattgacacacatttgcctccagattttctagttgaagaaatgtgcaaaaatcaataaaaagcccaaatacagtggtatttttccccagagttatggacaataacaaataatcaggtgggaaggcttgatgattttctttttagattgtgagctacaggcggccatatgtgttttaaaggttaggtacataaaagaagttttgaggtttcccctctgtaacaactgattggccctctcgggaactctgtgcttaaataaagctgataggattggcctctcttagcatgcttatgccatagatgagcgtctgatgcttagcgacctatcctggtgcaagagccaggcagtggaagaaccaggtgtgcagtgtgtccaacaggaatgcttttggctgtgaaacaattcctggctgaaagggcctaagcccgggggattttatctgggtgggaagaggattctggttttagttcagtacctgcatgctatcagggctcaaggtgtgcatccttgcaaacactggccccttcttctcatgtttgttttttttgttgtttgtttgtttgagacagagtctgtctctgtggccaggctggagtgcagtgagtggtgaaatcctggctcactgcaacctctgactccctggttcaagtgattctcctgcctcagcctcgcgagtagctaggattacagtcatacgccaccaggtccagctaatttttgtatttttagtagagccggggtttcaccatgttggccaggatggtctcgatttcccgacctcgtgatccgcccacctcggcctcccaaagtgctgagattacaggcgtgagccacggcgcctggcctcttctcatggtttcaaaaaggctacagcagctttgagcatcaaatcctcacacaactatgttcaaagacagaaaacaggaggaagtgatgttggcaggccaggggaggggtccctcctctgaccactctctcttaccagagagaaaaataatctttgccacagcctcccagaaaactttttatttctgcttcatcaagcggacacccttaacttgtggatattctatattggcaggtaaataagtgagaagggatatgggtgcagcacgggggcaaccaatgaaaggttggccatacaagcaggtgttccaataagacagaagaatacatgaaccatgctcacaggaaaatttatatagtttcctcttggaaaacaacaacaaaaaccttctggtcttatccaaagcattaattggatgaaaaatgtcaagcttttctcagtgttcggtgcagtacaaacgtaggattatttctaagtggaggagcaatagaagatagcactgtagaactcttccgtcatgccaagagaagttagatatgaccaatacgatgaagggaaatgataaggtgacattatccctgagctaaaagtcaccgaatctgtgacaaggtatgggctagtcaacttgtggagctctccagcccccttctcaatgaagattttaaggcaaactagaattgcattacatttagtgattatttttcctcaaagaccaacgacttcaatgggagatagaagagtctgtggatcacttgcttttattctcttcctatagctgtgaaaattgattcaagaaattgccaacattccactttaatcagggtagaaaccaagagttgggtgtagtttatccattgagatgctctatgcattggcaatgccatcatttaaaaacatcatggagactgtttttagtcatatggacaaatccaagcaggctgccttcccaggaaatcaggagcaacctatgaagttctaggcttgaagttttttgattggtggacttaataaaatgtagatataatcagtagattaaaagtgagtactggctgggcacggtggctcacgtctgtaatcccagcactttgggaggccaaggtgggcgaatcatctgaggtcaggggtttgagaccaacctgaccaacatcgtgaaaccccgtctctaccccagctaaaaatacaaaattagccagctctggtggcgcatgcctgtaattctagctacttgggagtctgaggcaggagaatcacttgaaccgggcaggtggagtttgcagtgagctgagatcatgccattgcactccagcctgggtaaaaagaatgaaactccatctcaaaaaaaaaaaaaaaaaaaaaaaaaaaaaaaaa

SEQ ID NO: 128481 - DNA, 1055 bp, Homo sapiens
gcgtcctctgccgccccgcgacctttcctgccctcctccggagagaggcgaagggaaggggcggtttcggagggagctgggctgtggagggagggcggcctcttcaccagcgtcgtccgaccaccccgcgccctcctggtggctctcccacgccccattcgcaccccaggtcctcggggtgtctctggtgttgcttcaagttaggcaagaggagctgggggcgcggggagcccggcgccgcagcgcgtgcgtggctggggcgccccggggccggctgcaccttcagtcgccccctggccggcctgcctgcctcgacctccgcatccccttgcaccgtccgctcgcgtgctgcggggcactcgcagcactaccttcggtggggccgcagcaccctgagctcccgggactcccccaccgcccccgcacccacgacccgcgtggtcccagcccctccaccctcttcacgcaccctcgcacccttttgtgcgaccccgtgccctctccgggctgccaacccctgccacccaggtgccagtcccgggcgcggggaggaggccggtggggaagggggcggaggggccggggtggaggaggagctgcgcgaggggcctgggggcggggagcgaggagagcgctcggaatgtgtgccggtctctaggtggtgccaaattctggggcctaggcatttccctcgctttatgtttttggttttttttcttccttcaatctctttgattaggccgtacgtggctgtggcaaggagttggggaaaaaaattataaaaacaggaaagagagaaagcacagccagagccccggcttcgcgagccgccggggagggggcggaggaggctgagccaggcagagtcgccagcggagactcgcgagtggcgcgcgggaggagcggccgccggcgctgggcttgccttgctgctgctgctgctgctgcctccccaccgcctttttttttttttaatctggagcggggtggggagtgggaaccggagagaaagcaaaatattaaaaagccccaaagacagccagcaggagcgcggt

SEQ ID NO: 128482 - DNA, 1043 bp, Homo sapiens
tataatccttaggactttgtacctgttgtccttctgtctggaaattgagaaatatagttcttggcttctgtgcatgtgtgtacacctacatgcctgagcatgactgagaatgggcaattacccagccacaacccaaataaaatttatggtagtctaacaaggctaacacagagaaataaaatgcggagatagaatggctagaattaataatgcatggtctaaatgcacaaactacacaggcaacaaagggacttcccaactgtgtggctccacaggaaagcctgttttgggtgggtcagtactaacatgcaaagtctgacttcaaaatagaaataaaaccagagggtcttctctatccacttccttgtaaatcttagatttatttaaatataaagtcaattacttgggcaactcctctgaggaatcaatagcccttctgatttaaaattcattgtgtaggtttaaaaataagttgactcttaaaggaattgttgctggaagtgacttttagtggaatgtattaactttcatttggattaactgtggctaattttaaaatactgaactttgtcatccgcctgcttgaacatttctttttagttttttaaagggctttggaggccttctgtaccattagagcagtagtttttttaaggttatacagtgtgttcctgtatccttcattttcagtgacacgtggcttcttagcaatacaaatgtgatgacaacaggattttaaagcagcaaattggttaaaactgggatagatgggcaaatcaccacccatgatgtccaccagccttggaagggccaatttcatcatccgctatgtcttcggcaaccaacccatttttttcctccaccttggtttttcattggtataatgtcaacattctgttaatgtgtccttgggatctatcaactttacgatttcttaactagcttccctctacaaatatgtttttatactctattacttttcttctgtttcaactgtaatttaaaattttttaagtttcacatgattttcctgataaatgaga

SEQ ID NO: 128483 - DNA, 1102 bp, Homo sapiens
ccaatccaatagccacttgccccatatggctgttgagtgcttggaatgaggcctgtgagattgaggaactcaattttaaattttatttaaccttcatctattttaaatttaaatagccagccacatggggctagtggctaccatattgggcagcacagggctggaggcacatggtaagaaatttatatccaataactaataggaagacacattgattagtttttttaaacctatatattaatcgtttcacaagtactagggcttcaatacatggtactgcataaataaagcagtccttgccttcaagtcaaacacatcaccttatcttattgttatctgagaaaatgcaaaggagcccatgggagcgagaggagggacacttcattcagcttcaagggtgtcagggagagttttctgggagattcgatgattaggatgattcttgaagagttaatgggagataaccttgagaaggaggagaaagctatctcaggtggaggcaacaaccccatggttatcagagaagcagcagcatcagggagaggtcagagtattcagggaggtatgtgggcctggagactcgtgcatgtggggcaaagccattcagaatgaccctcggagatgggcagggcaccatggggcttttgcatggggctcaggcctcagatgactttttttaaggtcatggggagtcatttgaaaattggaagcagacacgtgagatttctgtttttctgcttccatttcagtattttccaaaaagcagtaatgttgctggaaagaaggagagcagtgtaagagtttttgtttgttttattggttgcagtgagatctggctctgccacccaggctgcagtgtagtggtatgatcatagctcactgcaacctcgaactcctgggctcaagcgatcttcctgcctcagcctgtcaagtgcatgccaccacacccactcaaggtttttttttgttttttttttgtttgtttgtttgtttgtttttttgataaagattgagtcttcctatgttgcccagcctggtctcaaactcctgggctcaagcagtcctcccacctcggtctcccaaagtactgggattacaggca

SEQ ID NO: 128484 - DNA, 1087 bp, Homo sapiens
ccttggtgtctttgtctgtcttttagggggaagggaacccacgttttggactagagtagcacagatgccattcttacctcactgtaggtttctttaaagaatgtttagtcctgacaatgcgatgcagatttctttctctccccactctatcttctcttgcagagctttatccctttttcattgttcagcatgactgggaacctgccagctcgccacaatgaaacataatgtttttgcaaagtgtgtgtcaaatgtcgtgagcttagaagagattcatcgtagagactgctgcttaatgagtgtaaattaactgatcatttgctaaatctgatgtgcccagtggtgtgggtgggagaatgctggataggatgtaggagatgcaggtgagcagacgggtagcagagacacataccgtgtttctgagcgaggactgtagcatggccagaaggctgttctgatgtagagagggattttccgctcacggtaggacccagtaccatgagactgaggactgaaacacaaagttaacacagatctcccgaacagtctgctttagggctggagcctgctgggatcagtcctcttgagaagaactacaatctggttgagattgaacttgccaaagacaatgagactaaacaagagatgcctgctggtaaacatcaggggtgttgtgtggaagctgagggaggaagaaaacacaaaagctgtgcatgatgataaggctagtgggcctagtgttaccagtaccacagatctacagctcctcctagaggcagggcacattcagaataagcaacagggagctgcatgtcatgtagtcaagcaactgtatatttcttcttcattgatttctgggacatacatatgaaatatcttcagcttcatatctgagatggcaggaacatgacaacatattagcttttaggtagacacccgtaggtcttaggatgtggtggaaaattgggtgtcattttttccagataatcactggcatttttataaaacatgaagcccttcctaaagtctgtgcttcccagatagtagtgaggagaaataggcttgtggagaccataagggtttattt

SEQ ID NO: 128485 - DNA, 1094 bp, Homo sapiens
aaaatcctgaaaaaaaaaaaacaattctagtttaggatccctctttgagtgctctgcaacataggcgagagcagtaaaaacacgttccattgaacacagagcctcagacatagacatctgtctgttggaaggaagtcactgactatggctttatgctgaaatacacagatcacgtttatataggattttatcatttgaaaacatccctgctcagagatgatcctgcctcattctgcaacagccttttgcagtttacatggaaggattcagattaggagggagaagttgaagagcctttagactagaggcagcaggaggaggaacagcctcagatgggggagagaggagaagttggcatgtccaccactagcaaagatctgggtgctgcttcaagatagaacccaagggaagtggcagggtcccaaggggaatgttgagtgaggctctcactgggggaggtcccagattcctggcccccagcccctccaaagggttatgagtcccaggatggcccagaagcaacagggctgacacaccttaaggagcaatgcaggctgaagaagttcctgccactggtgactcatcatcagaattcccctttccctgggctgtggctctgcataaactcacaggactgcagaccaggcctggaggagatgaccccagagaggaggaagactgagtgtgctgccagcctattagaactcagcattgcattcaaattctagttgctctaaagaaaattaggaaatgtgatatttcttgcacacctgaatttgtaggctacatgcagaacaaaggacaaaatgagagtccaagaaggaagtgcagtgctttaagggttgagtgaatggagactgaagggtatttaacgggccattggcatcaaattagaaagtatgggtcttagaatttcttttacattagaagactttgggctgaatattgatattctagggataaattcttgataccctaaaattcagccctcatacaaagcagtgattgtgatttcatgaatgttgtccctgagaaacaagtgtctggcatgagctccccatgtctggaccaccaagctgataccaataatggct

SEQ ID NO: 128486 - DNA, 1125 bp, Homo sapiens
acccggttttgcagcatgtgccgtaattgttaatctggttatgccaggttgctatgcataaacaatgtctcacatcaatttagaaaatatgatcattactgtttatgaactgataatatagaaaaaaccatttagaatggatagaaggaaaatatcatttttctaaagaaaagcaaaagaaaacatgtcgttggcagagtaacaacatgaatcatagaatctagaagctcgtaagggtctgagaaaccatgggctccagctcaccaagtaccagaatgtgaagtgatgtgtccaggtgccatgtcccccagaggatgctcaggtctaaggctgaaatggccaatctgttcagaagcacatgggtctcctttcctaataaaggaagtagctaagatccacccttaaggcggcaaagtgtgtactaaggcatcaaaaggacaagtcaggtagtgagtaggtcacttattaccagactcaataccagtagctcctgcagaacaggggatgacttttcctctgaaaacaagagtacaagtgcctggtctctgggtgtgcctatggggaaattctgccctggttctggggctcagtctgattccaaagcacacagtcctaagaatggggctttccacgcctcagcccctgtgtcttcccccttcacctcctacaacactgccccagtccgtgtgggtcaactctcctttttctcaaaagccttcacttctaaaagcaaggttgtttattaagttaagtgacaaagagatactgcaacaataataagctgtgatcaaagactgggttgatgttccacatcacaagcactttcattggaagtttctaggattccaggatgtctgtttctgtgaatcccactcagaagactgtgtcttcattaatcagagagaagacaatgcaaaattttaagctctggtaatagtctatgtaaactgactattgtccatttattttgtctctactgagtttaaagattcagtgataccccatttatgtgtcgatccaatcagacaggtaccagaggtgtctctctctggggtagcaaactcagaggggacaaaaatgacagctctactattggttgtggttgcgaacacatatattgttgca

SEQ ID NO: 128487 - DNA, 1084 bp, Homo sapiens
agctttaagtgaggagcaagacagaatagtgatggtgagccctggagatgcagtcagttcttgctgttcacagtagtcatgctctataaggttgccacaaaggcagaattaactaatactgagctgttgctcctagtggaaatgtaaggttaggttccttcaagcctcgggtcacaacattttcatccacagatccacacataagtttcttaagtgagcatttctgtttaaaaacattgtattacatatatagtcttcattcattaacactgatttcatggccaacggtactataacacatgcctgcatgaagcttttccaacacacatattcttctccataaggcacatcacggtattcttgtgcttgggaaccctacacagcacttcagcacgcacttgggggccattttaaacagcaaaatcaccaacaaaaaatacaaaaatgtggaactaaatagaccatgaagaggacacttgtttatagtatgagctaaagcaagaaggcagagtgccgtcatgttcagacccagctaggaacatgtgtgtcaggcaactcacttttttttccactgtgtacatgactgcaaaagacctggaaagcaccatgagtattgatttgcaagttacacataaattttaggagtaggtcgatctgcaaatattgcatccatgaataataaggatcacctctgttagcattagcacattgcccattgacaaatctactggattcatctgagctagtaaaaacaacaacaacaaaaaaaacaattgtcaatcagaccaaaggtaatctccattcgtacacaaatagaaggaacaattagcttgggaagatctgcctgtttatttaattaaaaataaattttaaaagatggaaggctgggcatggaggctcacgcctgtaatcccagcactttgggaggctgaggtgggcagatcacttcaggtcaggagttcgagaccagcctggccaacatggtgaaaccccatctctactaaaaatacaaaagattagccaggcatggtggctcatgcctgcaatcccagctacttgggaggctgaggcaggagaattgctt

SEQ ID NO: 128488 - DNA, 1031 bp, Homo sapiens
aagctgaagagcctccttgaggacactgtgtgacagaattccatgccaactcttcagagacttacacgaagatgagtttggatttgtatttagtggggtcatttcccaaagcccatttatcgataaaagggggccattttattagtaccatcattatcatcatctaaagaacttaaatgaagttttatgtcatctgggaagaagattctgtaaatacggacattaaaaatttttatattcagtgtgacagtgtgcataaggattgatgctcagtatagcttgacaggttcaaaacagacaaaccaaaccctcctcctttcaaaaattccacagaatatttgctcaataaagaaatatttccacactaaattagcattctgtaattaactgggtttctttttattacagttctcctccctcattagttatgaagtaagtgtgcgatgggctttcaggcttgaactaggactcaggtagcatccctgaccatgggagagaagtaataattacgaaagagtgcattgctgttcataggtctacacccgatacacccaaggattgggagtcagaagcccaatctgtgttatgtaaaagaaatcccttgtttcctgtacaaatttgctcttattttgcctgatacctgagcatgccaggagagtgggaatagttaattagggtgtgggttttggaggacctatgagctcttggtttgattttatacctttttgtcattggaaatcccatgtccttgaacctattcaatcggagaaggcttaaactgatataaaactgaagagcagaggcagccatggctacagcgagcaggtgggacacccagaagaagcagctgtcctcatcccatgcagttgtgaagccgctttttctccctcctcagagaggtgtcacctcaaccctaaaaaatgaacagcccccacccccaccatgaagtataatgaagaggggaacagcagagataagataagccagatgggacagggggtgaagaccccacatttcaagtgtatatacct

SEQ ID NO: 128489 - DNA, 1099 bp, Homo sapiens
cctaatatcccatccacttattagacagatattggatccaaggaagatttttattttgataaacagtaatgggagagccaaggtagggggaaaggagagctggatgggaacagctcaaggtcaggagagagcagaacagtccacagccagggtgcctggacccaaggtgcagccagcggtctgctggagaaaggtggaatgtggctgcaggggcacacagagatggtttgggaaaacagaaacaggaactgtgatatgaaagtgttttgaaagcatacaatggaaaacagcaatgggcttgtaaagttctagaagggagggaggaagtctgaacgtggcacgagaggctcttgcttaagagaacaggtgtttgtggaataggtaaaaccagaggagtgacttggacatcaaaattttattttctgaatgtgattatttaatctaggcatgttttgataggtgaaaaaagggactagaaacttctggctttcaaagagcaaaaagagtttgttatttcacaaataaattcaagtttacctagaagcaacaagatattttaagatatggtatatatatatatatatatatatatatatacacacacacgcacgcacacacacacacacacacacacccttacatatatatgtagtacttcctggaatagcctgagaaagaaacatttaggaagactcaatataattattaatacaatttctggctctgattttgatgagccagatattttgatgttcattttgatgcagtctgccatgcctggaacaccaggtcatatggtacatatgacttggttaaagaagagattaaccaataagagaactttggcaggtaagaactattttgccattaaaaaccatgaagctgtaacaacgtctcaaaagctcccttggtgcattttattaattctttctgctcattactaggcttgggatgatgaagacctgacccttgacttgccaatagctaacttacgggggagttgggagaattgctgtgctttggcatggatgcccctgacttctgatccgagctcctccacctgctagctgagggatattggacagttctggactgattc

SEQ ID NO: 128490 - DNA, 1968 bp, Homo sapiens
tggacttttgttttagtaacgtaaaccccttttccaaagggcacgtcttttccaagattggcatgtgaaggtggtgaacgtgctggcttagtgcccctgagacgtgtcagcagagccccagggcatgggggagcccagctcacaaaccacacatctaattcagcagtctaatcttgcacaggagtaaaaccaagctcagagaggttgagtaaattaccaaaatcatgcagctggcaagctgcaaattcagaacacaactccctccttttttttttcctccaaatcaagcaatcctgagtgaaacgtgggaaatataatatgccaagaagattaacacgaaaactgttaactggcagctgcaaaggaaataaaggaattagataatatgaatgggttaacaaattctcgcctggaggtcagttaagaaaaggtttgtgtcctccaggtaaatcaaacctactgcggtttttcctcttcacatctcatggacaaacacagccatttcttctttttattgcaccagtgctggatgcatgaggttgttcgtagcaatctgtcatatttgagtaattcgttatttaatgagttgcttttgaaacaaggaaaataatgaggatgttaccgttgtgtatctccccaatttttaaaaggaagcaacaaatagtaaattatgcatgctttggaagtatgcagtagttaattttcaatctcatcttacagctgaataacctcaaaggtagtagttatacaacaggtgtgggaatatgtgagtgtgagggagaggaatcccaggacatcacctgtacacattgggggtttggcccagcagggcttcagatgttgaaacatctggaaattttatttgctcacaagcttaaaatgaaccaaaagtatgttgcttattaacacttttgaggatctgatgaaagccataggactgcttgccagaaaaatccctacaattttttgagttcctaaggttcacattcccttcatttctgtctgtggactccaggttgagcgtctctgtggtcaccatggtccccagcaagctagcacagtcttaagacacatcagtaggaatgtactcagtgctcaaagcttacatagatattgaccagcagccatcacctctggggggctgtgctagggaggcacagcatgtagaagaggctggaatgggccagggagagtggtaagggagcaatgggtaggagatcccagaagtggtaggtaatggaccgtgatccatgtcaggtgattaaaggctaaaggaatatggttctgtcctcaaccacatggtggcctcagcctgggatacatgactgtgtcttcctccataggggtcagtttaactaagaaccccaagtattgaagacctcaagactttaatatggtacttcctgtaccttgacacacatatataagcttctgaaggacacaaaacatgccacgttacttgttgtatctctgacgccaagcacaatggtgacccacttgcttgtgtgctaaatgaatcagtgagtgaatgaattgtgtcctcctctctaaacctcctctactgagttatacacaaagttgagggtctgtggttttactatttattcatcgaatgaaccattgaacaaagtaatcaaattttcagagccctgtagagaaatcaaatctccctctgaattgctaactcaccttgctttccctattgtttaaagtgtcatagccactcttcctttcccaacactccaccctcacctgtcctacccaaaaacatttctctgctacagaagcatgaactattcactccagccaccagccatgcatcaacattcagtcttgctgtgattcatctccataagataagtgaatattctctcatttaccaactgtatagataagaaaaccatcagaaatcaaagaactgttgaaaaatgggcattttacatcaccaaagcccttttttgttgttga

SEQ ID NO: 128491 - DNA, 1086 bp, Homo sapiens
gctttattattttaccttcaacatttagatctatgatgatccagaatatctttttgagtatggtgtgaggtaggggtcatgattcatttatttgtatatgaatattgagttcttacagccccatacagtgaagacaccatgctttcccccacattactgctgtgaaacatttgtgagaaatcaggtgacaggtggatctagttttggactttctatctgttcccctggtttgtttacccctggagagaaatcacaatatgtaagttactatatcttgttaactggtagtttaagtggtttagatatcatctttaagattatctttattattctttgccctttacgttttcattaaaattttagaatcggcttgtcaaattacacacacatactcactcacatagtggttgagattgcattctatgaaagattaaattagtaagaatttacatatttacattataaaattttccaatccatgaatgtgatgtactcctccatttgtttagatcatctttaatttctcttaacctcattttaatgttttctatgtaaggtcttgcttatttttatgaggttcattcctaagtgtttgagggttggtgaggctaatataaatgttttattattttatttccattttctgttttttctatttaatttctattctgttcattttctgtgtgtttatatgagtgaaatggaaatacaattaacactaattttatattgactttgcattttcttagtccttacttaaaacttggcattttattttatacagttttgtaattttatttggatgtttatttttcctgttctcacagtacttagcccaatgttgaccaaataaatacttaagtacttgtggatttgttgattaatgatttatttaaataacttttgtcctagctgggttaccttaaaagttctaacttggtctggcacagtggcccttgcctgtaatcccagcactttgggaggctgaggtgggaggatggcttgaggccaggagtttgaggttgtagtgagctgtgattgtaccactgcactccagcctggacaacatagcaagaccttatcccc

SEQ ID NO: 128492 - DNA, 1097 bp, Homo sapiens
tttttccttgccctggcgctaaaatcagttatttctccaaagagtgaggttccttttacttgtgaatggcattaaaaaaccaagacctatggtaccaggttttgatccctgacctgtggcaccactttcaacataccatggttctgtagcagtgctggctgggaggcttaattcttgcctgttaagcatggccttcagtttggaagcccagtcgctctccaaggtcctgattttgaaaggcttttctttattgtgtgccaggaaagacagaggagaaaatagacaagaacataacatttaagcacaggtacagtcattctctgttcttttcacatttatgatgctaataaaagaaggaagatatattacatgagttaaagaaatttagaaatgttagaatttaagaagtagtgcctgtctctttgcaaatccatttcttgaagaggacaagtgagcctctttaaggagaaaattcaataagatacgtggaaacagagcttacataacttcagattttcctaacatcgtgtcttagggatgacagttcaagagaaaatgtgctaaagctgtgacttgaagggtttatttagatatgtgcatttcctgacaggcgagattagtggattctggaaaaagcaataaaaaggtttacagaattttcttctaattctgctgataaacagatgcaaactggcttaaactctgctgggattaaaatatttccgattcagtatttcatcaggtataaatgtggtttttcatccacatttcatttatgaggcagatgaaacattgagatctttttgattctgtgcatgcatttgatagtacacctccttggataaccaatattatgatatgcaatactttttttctacatttctctaacatgctgatctgtggagataggtggaggaggtagtgcttgttataattaaataatcacacattagttttcactaaggatctttcatcgaaggatgttaagagcaaaatggattctgcattattgctgcagtagatttttaattttactgttaataagcattaaagtcccacagcatgcaatattttgtttcttcccttttaaagaatta

SEQ ID NO: 128493 - DNA, 1041 bp, Homo sapiens
tgtcatagtccattatacaaatgtatcacaatgcctttatccagtcctttgtccatggatatttagttttctatttttaaatgtatttacagttttgctatgtgcattttgctcatgttttctggtgcacatgtggcaaagtttctgtaggttttgctgtgtgtatatttcattactgatggtgctgaacatctttgcatgggtgcattttctattcatgtcacaacttctgtaaaacacttgttcatgtcttttaacctatttttccttcgggttgtttgcccctttcttattgatgcgcatcatttctttatacatttaagattcaattatttgtcaattacattatttccaagatcttctctcattttacagcctgtcttttcactcttattttgatattctttggcaggaagatacattgatttcaatgcaatttattcctttatggtttgcatttttaagtcttcttgaagaaattgtccctaccccaaggacatagtctcgtagattatcttgtaacatttttttactttcatctttgacaattatgtctttagtccccctgaactggatttttgggaagggtgtgacgcatgcttacaattatctttccctaggaataatcaattgtcccagaacaatttattgagaaagtgttcctttccttactgatctttggagcctctgctatttatcaaacttctgtgtatgggtggatttgctttcagactctccactgtgttccactcatcttttgtccactgttgtaacaacaccacacgttcttactacagcttcaccacacagatggggcatttggtacagccagtcacctgggcatgctgctcctaagagtgtcctggctgtccttggccttttgcatatgtgtatatatgtgtcactcatgcacacacacaatttagaataagtttgttcagttcctctaaaaacactattgggagattagtgtgaactgcattaagtctatataccaatggagggagaatttataaacttcagctgttgaaactttcaata

SEQ ID NO: 128494 - DNA, 1769 bp, Homo sapiens
ctgggcaacaagagcgaaactctgtctttaaaaaaaaaaaaaaaaaaaaagaagtaaaatttgcctcagtcccagaatccaatgtcatgtttagccataaataaatagcctgtctagttggaatgaggcttggtgcagaaacgctcttaccattcataccagagcttgctgtattccataccgccatctattagaaaattattgtaggagctactgataggaatgataagaggcctgttaaatttttacagatatgctataagcatttggtttttatacaacatgtactcttgcattttttccagactttttcctaacattcatgtttgtatttgtgaaagcctgttctacactacatttactttcagaagaaattgctttaaaagtcatacaggagacttatgagtattaccttgggggccttttttcatatccatagcttgatgaattttgcccaaagtggacggtttagaattgcagaggtcactacctgctcctgcaggtataagtaggagtcagctatttgtggtggggctttggggatgtcagctcttgggggttgtgtgttgtacatgttaatttaaaggacatttcagctattgctgggcctcagttctggccgcatggtggataccttgcggagctggcacaggtgctgatgtccccgggctgagtgagcctgtgtgtcggggctgagggcctcctgtgatgtgggtatgcagcagagcgactggtttgaatgggtaagaaagaggctgtagcattccttcaagggtgtctctgaaactggatgatgaatgttggaacccttggtttcatgtttttcttttgccttgtgtttgaaagtcgttttcctcaacaagcctacatataagtttaactgatggcgtctaggctgccgtgcatgtcgactcctgcggtgcggggctggctgtctggctggcgaggagctgctgcgcttccttcacatgctcttgttttccagctgctttcctgggggatcagactgtgaagcaggaagacagatataataaatatactgcatctttttaagatgtgcaattttattctgaggaaacataaattatgttttgtattatatgactttaagagcccacattaggttttatgattcatttgccaggtttttaaatgttttcacaaaactgttacgggacttcaactagaaataaaatggtgtaaataaagaccttgctatctctaaattatggatgttaaagatttgaaatgttttgtactttgattatttttatttcttatactctgttttcttttatattgatatcttgcccacattttaaataaatgtacttttgaacttagaattgagtaatcctttattattccacattttttgcataacttataatttgcatcaaaccggatcacattttaagtaatttcaagacaaaatattttccagtcaatttttacctcaagaaataatttctagaagccagccattttttttgtcaccgtaataaactccatcccaggcaggggtggattcagattattttgcaatcactaagcacaggcgcaaccagtgagaaccagtgacgctacggaacttgcatccatcctgcttctttccagaccctgttgcagtacacgtcttgttggatcataggtgtgataaaatggtaggagaccgcctgtttattaaagatgagcagggcagtaactgctaatatctttagatcgtgctgaccagtgctgtcgcagacattcagagctgttttttaacc

SEQ ID NO: 128495 - DNA, 1050 bp, Homo sapiens
ttttatatgctcaagtcttagccagtttttatgctatcatttcaaaaaatgaagatagcaggtaaatgttcttcattaacaccagttttggcctaggaagtcttggctgtttactcttcattgtgaagtgagctgcatcattctcatgtcatttaatttattcatggagatatgttattgatgtttgatggagaattcatgttttaatcttgatttgtgtggaattgaactacagaaatgtaaatgataaattctcttttttatttttctcttgtagttacaggttttgttttacctgtcacactgttttctgtggctgagaattacagtcataaaccttgtctttaggtagatattcctctgtgttactctgtgtcagtgtggctctgtggatgctgaactttttcatttccgacctgtgtttgtgacctttagaagctctacattcttggtggagaggttgcggagtctgcacagaagtgcacacacctcattgccagcaaagtgactcgcaccgtgaagttcctgacggcgatttctgtcgtgaagcacatagtgacgccagagtggctggaagaatgcttcaggtgtcagaagttcattggtaaggagcagcgccagtaactttgcttttaatgccaaataaacttttttttttcttgaattcatctcttttcatcccaacaaatatttaatttttaaactatgtgatagttattcatttaaatttaaaaatttatttcatatccccagtgattcctttgattgatgtctttgcattttaccctaggtgtaaaagttttggtaaattggacaatattagggggaaaacaacctctatatccctctttttattttcttgttagtatattttgtttggaaatctggctgtaaaatgagatttttcaaagtgcagggaagtatttttttctttatttggaaagagagcaggtgtatgtaaatgtcctactcaaatacactttgaatatcagtttatataaggagggaaagacatctatgtcctcttgcccatcttccattgttcagagc

SEQ ID NO: 128496 - DNA, 1054 bp, Homo sapiens
gcagtaacataaacaaggcatctcatgttcattctttttcttcctccccgtgagggctatgtgtgtaaccttttgaccattaatacagttctggtcttgaaagttttaggaatgatattaccaaatgtgttccataatgccaaagaaatagtgaaaaaatatgtatcaactaagaagtagaagaaatagtacttggttttggttttttgcttattttgtgtttaccttattttctctttttttcttagattatttctgtgactggatttgttgatagtgacagagatgacctaaaattaatggcttatttggcaggtgccaaatatacgggttatctatgccgcagcaacacagtcctcatctgtaaagagtaagcaaattttcgaaactgtttttaatcataaatttacacacaatatagtggctatttcaataattgtgccttttttagtatgtcatagttttgtggtagaaatttgtggaaatcaaagtctgttaaagtatgacaatgatatagtaatgttagtagaaatacctagaaaacatttgaattaatgaaattagatgaactaatgaaatttgaatgaacaaaacaggaatagggtagaagtaagactccttagtggttttgtaattctgtgtgagccttgaggtgtatatttcattaccattcagggtcaccctcaactttgctaggatatgcctcccacttctattatgagaaattttttattgccttttgttggaaataaatgtacatttggacagttgacatctctaacatttaataaatatgttttctcctcaaaaaataaaaagaccaactggtttaaagtatgaaaaagccaaagagtggaggataccctgtgtcaacgcccagtggcttggcgacattcttctgggaaactttgaggcactgaggcagattcagtatagtcgctacacggcattcagtctgcaggatccatttgcccctacccagcatttagttttaaatcttttaggtaagtgaaattctacatgctgcaaatcttacttaaataaaatcattagc

SEQ ID NO: 128497 - DNA, 1052 bp, Homo sapiens
aggagaggccatgtgaagaactgagggcacagagttcccaggcaaaaggaagacccaaatggcatgaatttgctgagttctaagaaaagaaagttaatgaaatttgaacttcataaggtgaatgagttctaggaaggatttaaaaggggccttgccatatagggccatagtgaggagtatggtctttcttggaaggaagccactgggcttttgagttggggtgagatgcactctgtgtaaacagtggatctttgaggggcaagagtgaagcagagaggccccttaagaggacatagagttggagtttgagacagaaaaaaatgaatgggaggatccagctttctggcttgagcgagtgaaggaagatgatgctgtttcagagataaggaacactggaaagctgcaggtttgaagaacctaagtttcttttcagatgtgttgggttggaggtatctgatccatgcaggggctgtctgctacgtggtggaaccagagaaaacaaggctgactgaagctgtggaggcggatgtgagaatgtgtagtaggtggggcagagcaagaggagggtctggggccaggctctgaggagccgcaccattgagagccagctgggctgttccatctgatggtgacaccccgtctgccgcttcaccttgttctggacactttcatttcataatgacagctcaaagtcccagaaaaatggctctgtagcatataggaacaacctgaagccggatccagtattctccacatccactttcagtggaaaggcttgatgttgatgaagtggggaaattcagtatggcgtaggtataaggtgatgttgacaatgatcattttattgggtatgataatagcagtggtttacgtagtgtttagaaatgctgtgggacagacaaaatctttgtctcccctcccctccacctaagcagcgagtattagtagtacacggttcttgggatgatgacagcggttggctggcatccagagtaagatagaggcaaacatgccctttagatgttagacagcagacagttaagatggtgggg

SEQ ID NO: 128498 - DNA, 1525 bp, Homo sapiens
tccatgagtgtacgtgatgcattggcggcactctgccacgctgttactttactaactgtcatggaaaaccaagcttctaaatattatcaatcagtaaaaacttaggtagcaattattcatttcataattttccataggattactagctctacttttgtacttaaaatatcattttaaaaagttaattttcagccaagtcttttaagactcctgctacaggtgtgagaccttcctatgatcactgctgtatggttccttttcacttttgcctcatgtcctctgtctaaaagatcaaacgttgcttctgtataaaattgtaataatagttgctcaacatttcaactgcattccttgactgagttttttctaaaatgcgtaattgtaggaaatgtgataaaatttacagctttgttttgtgtgtgtttctgctttcctcgtaggagaaatacgaatgtgctttaaagcgagcaagtattaaaattgtgactcctgactgggttctggattgcgtatcagagaaaaccaaaaaggacgaagcattttatcatcctcgtctgattatttatgaagaggaagaagaggaagaggaagaggaggaggaagtagaaaatgaggaacaagattctcagaatgagggtagtacagatgagaagtcaagccctgccagctctcaagaagggtctccttcaggtgaccagcagttttcacctaaatccaacactgaaaaatctaaaggggaattaatgtttgatgattcttcagattcatcaccggaaaaacaggagagaaatttaaactggaccccggccgaagtcccacagttagctgcagcaaaacgcaggctgcctcagggaaaggagcctgggttgattaacttgtgtgccaatgtcccacccgtcccaggtaacattttgccccctgaggtccggggtaatttaatggctgctggacaaaacctccaaagttctgaaagatcagaaatgatagctacctggagtccagctgtacggacactgaggaatattactaataatgctgacattcagcagatgaaccggccatcaaatgtagcacatgtaagtcactctttccgaaaaaaatgtcagtattggatcttagaattggatttcacagtctatttcaatgtagtttattggttttgctttttcagaccaaataacttacaagcagtatttgtgtgagaacctgtttacttgtgtgtgtgtgtgtgtgtgtgtgtgtgtgtgtatgtgtatatatgtatatttcagggtcattgaaaaagggtaacagcgtattttaagttgaagatttaaagcagctgagtagaaccaggatgtcagtgatggagtactatccgttgaagggtttccactcttacttagtttaaaattagcaatggcagcaaagagaataatgaagtttaccagctgtacctgatttgcttataatgaacttcatggtagtaaataaataacacaaattcatgcatttgttgaggaaggcttgatttcaggttacagtt

SEQ ID NO: 128499 - DNA, 1779 bp, Homo sapiens
gaagcacagagatcatctgccttcttctgacccggtattgatgcaggctgaggcctctgttgtaatgtgctgggtaggttttggggaataggtcaagagtgtaatggagagcctggctaggtcatgatttgaatctagaagactaaaaagtcctttccattctgtatctcaatcaacagtatttcttgactgcctacccatgtgccttgcactgtactaggtgctgtgaaagatctcagagaagtttaggacatcatgtaagactctttaagaaggagtgttagagttcatagtcaagactggacaaggagaaaatcctgtaagctagaatcaaggagtgtcttattgggggtggtgaggcctgaagaaggaaaagggagagtgttcctgattggtttaaaggaaagcttttattcctgggggcacagacttgaaattctagtcctctgctcctggttgctttggagtatagctgggaggacagataagcaagcagatagttgtagagtgtgagaagtatttagatttctgtccagcttgctgtgggagtacagtggtaatgccacctgagctgagtcttagaggaggaggtcggagggtgggcgcagcggggcacaggaaagcagaacgtggtgaggacggcaggtgcacgtgggggcagtgctcatgggcaggaggaggtggttaggagcagccagacaggaagggcctggacactatgggggagcctttggattttagccttgcagcactgaggagacattattagccaacatgataacattggtattttggaaagatggtttttaaaaaagaaaagcacttttccccaattataaaattaatgcttttgaaaatttggaaaatacagaaaagtataaaaatgaaaataaaaatgtccccataatcctatcaccactaagtaactattgttaacattttggtgtggaaagagcattcttaattacgctggtggagattcattaaatgagctggtatggatgttcaaagtcatttaatccaaacgtacatcagtgaagaatctgggtcatggaagttttccaagttgacataagcgagttattggaggcgtcgtattaatgccaggtctcctccattcctccctagctgatgttctttccacagcaatctcctgcaccctgttgaggtctacgcctgtgacacaggccaaatagggtataggactagatttactgcagtcagtaaaataaaataatacttaactgaacagataggcaaatcttggtaataaaggcatatctagattgttttttaatttcatttttaataaagattagataatgactcattggattaatctgtattatcatataattaaatctcaactctccaatgctgcaggatataaatgtttttgtgaaagcctctaataaaaataacctggtccagtcttctgaaatgtgacattgacttactaaattaacaagttataaaataatgatttgaaaagtgttttttagaaagctaacatgttcttgttaatattcatagaatagtgtgtaatacagaataatttctagaaatgtttgtaaaatggatgagagtagatgaacaatgctagattattggcaagctgcatactggcagttaaaaagagattaacatgctattatcaatacttttaaaaaattaacgagacaaagttcaggattcttcaacaactataatcctcaacttacaataaatttatccagaaaaaatttactcggttaaatgattatcttagaattaatgctt

SEQ ID NO: 128500 - DNA, 1277 bp, Homo sapiens
aaagtgctgggattacaggcatgagccaccgcgcccagccactgggatcttctttgagctcttacttgcctatccataagaacaaaagattgtgccactgcgctccagcctgggcgacaaaagcaagactccatctcaaaaacaaacaaacaaacaagggagcctgggagactcactggtagacagtgcactctgagatttgcctttattaatatttccccaagtctttggaagtagaaaatccatgagcttaggttggaagatggaaacagatcttcgataatggggctgaaggtatcattgcagtcttcagagttttttttacagccagggaagtctcaaatgtttataggattcatctgtgtaaccatataggagacttcaaacttggaatagaatttttaagctgatatttttcttgattcacctatctcaatcagtatactttactcctatagggaaagagaagtaatactttaacccattttgaattctacacactccaaattattcaaaaaaagtcattgtttgctctgaatagactatgaattacaggcacatagagatcatgactgccttgtgtcttgttaaattcacagtgtgtgatgtgtagtaagtgctcattaatcattttgaatgaatttttaagatcagctttagaaataggaaggatctttggaatcatatattccaacttttgttttaaaaaaggggaaattgaagctcacagttgtcttgcctaagttcacaaagttagcggagataataaaactagagctcaatcaagctcttatgaaggattcttcctactgtgcagtggaagcagtcacaacgtttcaatctaaaagaaacaagacgttttaattttgcttttaaaataactgctatgccatttgtgtgtatgtgtataggcatgtgtgtgtttatatatttgtatatagttagctagctatcagagatcaaaaggcttccccctgtgagtatactttgcctatttgatttatgatataagtggagagattggatttcaaaatgtgctttacagaaaagcactcagttctttctgtgccacccactactctctattccactctgccctgtactcttctttgtctatcttaagtctgtctctttcttaaatggactgagtggggacggagtgggtgggtaatgtctgttagtgaagtacaggttgcactaatcttatttcattgtaatcttaataactataaaacagagtaaatggtttttctccagaatcatgtcagatttttttt

SEQ ID NO: 128501 - DNA, 1333 bp, Homo sapiens
gcacagctgccaatctttattttattttataaaatgtttaatattcctcttctcacagaaaatatacttatttagagttatgctgaaaaattttagatgtcatctaaaaaatgataaggggggcatttcattgtctgaaatttatttaaggtgtacatgacaaaaatagcttgaagatcattagcttggaatatgacttgcaggagagcaaagactgcgtttctcgttttcattgttacatccccagcgccttgcaccatctctgcataaaatagattctcaataaatatttgatgaatgaattgatgggtgggtagtgagtatatatgtctgtttcagttggctgaagtttctggaagtcagctgccttccagaatgtagtaatgggggcattactacattttgatagtaattttctgaagtagagctatcaggagaatgatttgtataattataaaaattaaacatagaaacaagataatttttcaaaaatataaattacccagaaaggtagtaattaatctgttttataattaatctcagtttttagaatttataaaaatattttcaggcttacaaacattgtatctgcttgacttcactaaaacaaacaaacacctcatgaatttagacttgactgaatttgggattcaagaagggagcgtatgagaggctgactatgccctggatgaggtgtcggcggtggtggggcaggatgggtggcagttcccctgtcctaaatgtgggggtcagcagtaataagtgtgtaaacctggaacttaaatgtttatacataattttaaaaaaatatggtagtgcttcattctgtaattggatttttcatcttgggtattagtaactaatctttgactataatatttctatttgaatattcatacttgtaatctggatgttttaaaataggttgtaacagagacttttaatttctaagaacaacactagtaaaataatatgccacttgtaaattgagaatactttttgatttaatcttttctttttcagccttcttgggtgattctgtccgttcagtgtggaactcttctgccgtatccttttttttgagtgggggaggagggaaagggtaactctgggtttaagactgaaagaaatgatagttaatggagtgaaaagtggattcattcgttaggacagattgttttgtctacatcttatattcctactattttccatcctgtttcaaattttatgtacctgatccttgttattactcatgttaaaagggggctcagctgtgacaagtaactctaggccgggaactggaggcaggagctccggttctcttcagcttttg

SEQ ID NO: 128502 - DNA, 2018 bp, Homo sapiens
ttataggggacttgaaccaaatgttacttaaaacctggaacaagttgaactggaaccatatttactcgactttgaatcaaatctaagtgcttaaaaatgtccttggcaaaccactttcatctgaaacagtatattttctgaaaagttttgagcctggacatctgattctctgactcttatgactgtggattataagttcacatgttgaccatctaatatgaggcaggcatggactaggtgccaggtataatacagaggtgaagaggacatggtacctgccctttagcgcccctcattggtgggggagggagcacacctggacatatcacagtacaaggtgtagcagatttctccactggggtgcaaagtagacaccactgaaatgtcactcagtagatgtcatttcagttgggttttgagataagcagaagttaagaacatgaaggaatattttcatgtggagcgtatgtgctgaggaatgaaggcattcatgcgtttgggatacatcaggatgatcactatatctggaacagagtgatatgagataaatctattaagatactcagtagtgtggagattgaagagaagctattggttttggcatcctcaaagttcgtgaaaaccgagtaaagtgtttttggtagagtgttggtggaaggggctggattgcagggagttgaagagtgaatggaaactgagaacagaaaggttagactcttcaggaagtttgtcctgagaaggaaatagagaaggtgcctgaggaagagagggctggggagggatctgtgttgcatcacaagcgcgtggaaggatgtgggtgactttactgtttacaggtggagggaacatagctatggacagggaaactcatgaagaagggagtaggatcagaaacagactggaggataggaaaaggaggggtgccttttctgaagaccagtcgaatggatgcgtgaagctaaaaatgcttagaggtcaagggaaggaagaaaggtaaagtggcccatggccagtgaccgctgttttttcacttactaaatattgagcctctgctctagttcatatctattagtggtcggtaaagtattctgaaaaggttgtctagcttgtgggtgactttatttttttttgaggttggagcaaaagtttaataagtgaaagaagaaagctctctgctgcagagaggggacctggaagagcgttgccctggtgggtcacttgagctttgtgggcaccatgtcactttgacagttggtgtgcactgtcagcttagacactgcccacctcttctgaagcacttgactgtcgactgttccttaaccctcacttccttggcttctgttgacgctcctctcctgtgatactgcacttccctacctgtccctgaagtatcagttgctgtgtctgctctctagctcccctcccattctgcactgcgaccaccttcacgctcatggctgtggctcccatctatgtaacaatgctgatgactttctgtcagggagatccacatcttttcctagctgcaactggatgcctcttgccagatattaacacgacccccaaagaatggcatgcccaaactaaaacacgtccttgtgtccccacctgccagccttctgatgtgttcctcagtgagtggtactcaccaccatttcagtctggactttgctcttttgcttataccccttccagacaccaaggcttgccgattctctcacatcttcctcctttctgcccatcaggacatcactttagtggatgcctctttcacctgggttattgcacttgtttcttaacaggtctcttgtctttagtcatctagccaaccaaacacagccagcccacccaatcctttcttttcacatggactgtcatctttgtatgaaatctgtgctacttttcctgtgtgaaatccttcagtggccctgcatataccccagaatgaagcacagacttttttgcatagtgtgtaagaaagcccatttacggtctgctctgtattcacctgttcagtg

SEQ ID NO: 128503 - DNA, 1024 bp, Homo sapiens
ctcgctcggccggcgggggtcgtggccgtgcaccggcttggccgcctccgccacccgggcagctgccgtcctgtgcggggctgaggagcgctcccttccagcctgtgtccctgcacgtgggggctggcattcgtcttccttgattttcccacttggacgattaattttacggtaccctggtaacaccatcacattacacatttaattttgtgtagtttgggctcacgccaaaggatattgtgggttttccttagtattcctataataatatatctgtttgatgtcacacagttatcagtccgtggtaggaatgcatcttagttgaatatcctcttcaggttaatcttcaaaatatttccttcttaaaagtttagctgtacagttgtgttgccttgggtgtgacatcagtggcccccaccttggaggatggggatccccagtgatcagagttaggcctggaagggcggagactcatatttcgcagatgaacttggatggtgtagaaggaattgtagaaggctgagtgatcttggccttcttgaggttcgtccttgtaacaactttttggaccctttttgccctgtaactttagggtaaagagacttcaaggccgggtttacccctgtaatcccagcactttgggaggccaaggcgggtggatcacctgaggtcatgagttcgagaccagcctggccaacatggtgaagcctcatctctactaaaaatacaaaaattagccgggcgtggtggcgggcgcctgtggtctcagctactcgggaggctgaggcaggagaattgctggaacctgggaggtggaagttgcagtgagccgagatcgcgccactgcactccagcctgggcaacaacagctagactccgtctcaaaaaaaaaaaaaaagccttctatctttgaatttacagagtaaaacagttgctgaacacggagcgatgaagatgagtgcctgtaacagtgttagctttttccagtattgatgattcccccgcccctcttttttttgtttgt

SEQ ID NO: 128504 - DNA, 1250 bp, Homo sapiens
tggcggccaaggttggggagatgatcaacgtttccgtgtccgggccctccctgctggcggcccacggtgccccggacgctgaccccgcgcccaggggccgcagtgctgcgatgagcggccccgagcccggcagcccctaccccaacacctggcatcatcgcctgttgcagaggagcctcgtgctcttctcggttggggtggtcctagccctggtgctcaacctgctgcagatccagaggaatgtcactctcttccccgaggaggtgatcgccaccatcttttcctccgcctggtgggtccctccctgctgcgggacagcagctggtgagtacccctcctggttcttctggaagtaaaaagggtgtcttttcggttgaaagtacttttcagcctataagaaacatgcatttgaaactggaactatccacagattgaaagtgtgcatctccagtcttgggatttagagaaatgaaggaggggtagagaggacctggcacccccgagggcgggttcgggccacagctctctgaagtttgaggaagcacagtgatggagatgaggcagggagataattggctgttcaagcaggtgctgtgccaagctgactgagggcccttccctcctggcgtccgggtacagccccagctgtcatcccgcgccagccgccccggattggccgcctggggaactggtgagcagcgggactgaaaggccattggtcgcggcagcaaacatgctaccctgctggataactgaaaacaaacccgtcacatgggttcaggaggcggttgccaggggagcaacttctcagcacttccttttgccgggtcgctgagtaaactgtggtctgaagccaaaccgcctacaccctgaactgttagagctctgtagattacgttcttaaggaaaagagtaacccccttacggcgtttagattttcgtacacccaagcagtagcatagatgctgtacaacgtaacactgagtcagtctgaactgtggacacggggactgctgggtgtgtgtactagactttcttggctatcattgaaccgcttttatagaaatgttgagttgatcttggctcagcagatcacttactgctcctgtagtcacacagcatttgtttatttaacgagcttgtcgggtgctttctgcaacctcaactctataagctgttgaaatgttaatccaaaagtgagcaccacaagcccctatccttaagcagcttagagtctggtggggaaaaca

SEQ ID NO: 128505 - DNA, 6565 bp, Homo sapiens
tgatcgttccagaagtggccttgggctggggatcaccatagcttttctagctacgctgatcacgcagtttctcgtgtataatggtgtctatcagtaagtgtgtgttttcaaatattggctttggaaagcttacttaactttcattaaaacatccactaagcttagatattttcatattttatttgttttttatatagaatgatacagatttaggcatgaaattctcaaaaatgctgctatccataacttaatgtaacgcaaaggaaaaccaagtagtagcagttacaaccaaacaaatatgaacattcgtaacattggatggttgatatgcgttctgcatatccccactacagagaatctgtgatgtagaattgagccaggtgaaattgactgctaaggtacagtttcttttctcgctccaggtatacatccccagatttcctctatattcgttcttggctcccttgtatatttttctcaggaggcgtcacggtggggaacataggacgacagttagctatggtaagtgaaatgatcatattatcttctaaaacttgcgtctctttaccttgatagaatgactttacatgatacattcaaatttgcgttcatatattctggttcagacttgagtgacaactactgagaaaagcttatatttaaaaaaataggtaatgatacccaggtaattctttgctaaattataaaaattcataatatttgatctagaaaaggaactagagccctcgcactgcccctttgaattgcagatgtggtcagtgttctgaattcttgaaatttctgtagtaagcagtagagaaagtgactggtgtgtgagtgtcccctcctccttcaccatcggaagcagatctggatgacctcatgcagtgatactttgctccctgagcatcagtccaccagtgtttcttttcacaaaatcagagtggatgcagatgatgctggcctcttagtccacagtcaagcaaatcgagcctgaggctgcagagtctgtctcgggccagggcagggactaatgtgggtgggcaaggggacagcctggttcaggcaggcagcacctttctgtggggcaggtggccctgggcatggagaagtggtgatgagagcaccgctgcacgtggccgggtcaccatgtagacggactgtcctgcctgaacattgcatctgttctcagctgcaggagaaagcagtgctaccccgcagagcttctctcacagcccccctgagggagacggaaaggtagtgaactccaggatggctttagcagttctcattagttaaaaattgacatcttagcacttcaatttaaaaacatagaggtggacttttaaatgttattttgagttgactttggcaggctgaaagaaagtaaattaaaaaaaacaacaaaaacctagagctgttgctctcggagataagctctgggaaaacttatcttagtacctcatgctatttttaaaacagtacatttatttttgccagctgatacccttctgtgaggagttgaatttgaagaccacttggctgtttcacaaaaccagaagtaattacaggtagaatttgcagtcttccactggttactgactctctgctgccaaatttctcatgatggagaagaaaggactttgcttgccttttttttttttttttttttttgagacagagctctggagtgcagtggtgccatcatagctcactgtaaccttgagctcccggactcaagcaatcctcccgcttcagcgtcccgagtagctgggattacaggcacatgccaccatacccggctaacttttttgctttttgtggagatgttatctccctgccttgtccaggccgggctcgaactcgtgggctcaagccatcctcccaccttggcctcccaaagcactgggattataggcgtgagcctggccttgctttttttaatattaaaaatctggtcggatggtcccacatggaaatagtatgttgttttcatgcattcgccatcatccccgttaatagtcttcaaaggagagctggcaactccatcattgctttcttgctttgagatttttgtttcggtactctttgggagagaattcctaagaaggtttttagaataaaattgtcctcaaccagattgactaattacacattataactacaacttgaataacatttaaagagttggttatttctgtttgataggttggtgctgttatatgtcaaggctttttaaatcggttttaagaaataagcattattttggtggaggtagaaatttcacaacattcataagttctaaacatctagaaatggttggaggaaacattttcgttttgaagatagtttcattaagtaatccctgctgtgctcctttgcttacagaaaaaaatgttaaagataactcaaaataggatagttggtgtaattataattctccttacttcagctttctcttcatcctttttattctttaagcttgggggaaaatgtttggatgttctcgtatcttaaaactggaggagagaggctgggcgcggtggctcacgcctttaatcccagcactttgggaggctgaggcgggcggatcacgaggtcaggagatcgagaccatcctggctaacacagtgaaaccccgtctgtactaaaaatacaaaaaaaaaaaaaaaatagccaggcgtggtggtgggcacctgtagtcccagctgcttgggatgctgaggcaggagaatggcgtgaacccgggaggcagagcttgcaatgagccgagattgtgccactgcattccagcctgggtgacagagcaagactctgtctcaaaaaaaaaaaaaaaaactggagaagagagatcaccaccttaatccccttccctgctgggctatcacatgaaactgacctctgaggttctaagcctaacccgcctaccactgtttttattcataaatacttaaatccttacctctggatcccaactgttactctttttttcacttcaaaatttgcaaactcatttctatccatcaaaccccggaaatggcccaggggcttcacagtgcagtcccctccctcctgctgcatccgttcctcaggctgtgccccaggttgcattcgtggtgcgtgttttctcccagggcagccttccccacattccactcttgtcatactgttgactcacaaaatggaagtggctgaatgttccagggatagtgtctaagagctattggtttaaggttgaaacctacaccaagtaaggctttgtgaagggagatgacgagagtgaagttgttgacagtctgaaggtgaagagattccgaggctcagttcagcaccgggaccagacccgcccagatccagggtaatttgaggtctgtgtttggtgctgatggttttgcccagtgcactccacaccctctccttcttagctgtctcagttctcttcagatgcctttgttctaacttatgcttccctcccttaagaagaaacatagttacttgcaagaataaccatgctcaaaagttacaagttggctttgcttcaagttatatggtctcctagctttttctatgtggtatttccccccacacatgccgttgtcctttgtgtccgaaaatacagcagaaacatttgttatcagcctgttacggtttttttgtttgctttttgtttgtttttatttttactttttttgagacggagtcttgctttgtcacccagactaaagtgcagtggcacaatcttggctcactgcatttgaaccgtctcccaggttcaaatgattatcctgcctcagcctcccaagtagctgggatcacaggcgcccaccaccgcacctggctaatttttctgtttttagtagagacggggtttcgccacgttggccaggctggtctcgaactcctgacctcaggtgatccacctgcctctgcctcccaaagtgctgggattacaggcatgagccaccgcgcccggcccagcctgtatgtttaaaagaaaatgagtctgtaaccatcatttatagaacttgtagttgttgctgtttgtagcttcaagtcctttctcaagagtaagctgcaaactgccaacagcaatcaagcctgtcctgctgccactgcccggccccactgggccacctggaggcagagtcccgcccacctcagtgtcagcttgggatttgatttgccgttcctgtttttgattgacccaattcagctgctaatgataataatactattattgttattgagggtttacatttgttgggctcttactgctgcacaggaggcattgtgctgagcgtttccattgttagccagtttagtcctcataacacaagtctttgaagtagaaactattattagcccatttttaaaaggggaaattgcagcttaggaagattaaacaacttggccaagtgggtggcagaggtcgacgtggcaccgtgcttctcattagcataccacactgccctttcaacacatagctcgcacctgccttcaccctggaagcaggtttacagcagcctgtgttggtgtctgggttgccatttacaatgtgccaccattaggcaacactgctggaagtccctgtgccacgtgtcaggtccgcccgggctggctgtcgttcgtctctggcgtctttgccaggcctcactgtggcctctgtcgaccagggattctaaaagtccacttcccatttatttatcagcacattagtgaacagggagtcaaatgtgatgaccagttttctttccaggttgctgccaagagtttgctcttttgttttctcaccgcagtttgtatagaaccctcccagtgttcatatctaaaaattggcagtgctttcacatgatcaattcctaaaagcatgtatgtttcctagaaggtcttattgtgtgtgtccccagggtagtaactggcatacctgggtgactcaacccagactcatgactttcttacctgtctgttcagatgagaggctcttgctgttttctggatgagtaatctccgtcattgctgaaggtgaggagctcagctccttcctcttaaagtgagtggagggcaattaagtaacgtgggaagtcacgattctgagggaaaaaaattctgtatggaggtttctcttttgccctttagcagaagctccgtggcctcaggaaggtcatttaatctctctggctttgcttcttcatcagtgaaatactgttctccattaagaatttaccctgaggtgcctggtcatagtagtaactgtagtgtctacctctcagaagctctgtgagggtcagatgaggaagaacatgtagaaaggatttcccaactgtgaagctctgtgtgaattgagggcacacagagcttcagtattacaaagcatgacctatttccaatgtctgtttcaacaaactgctggtaaggtgggttataacacaggcatcagatactaataaaggtttgtggcagaaacctcccttcagataaaggttcaatcccttaaattgcagttagaactttcaggaacctatcataccctaagcatcaccatgctttgataaaattgggtgtttcctttatatagatattaatttagttaaactttcaccaatatcttacacttatataacaggctttatataagggcctcagcagcgtaatttcacctgaggcagagaattatcctaattttgcaggtgagagctgtggctcacggggccagagccatgaagacggtgcaggggagctgggagagctggcctcggtctccagttctctgcacatgtcccacctctcaatcttgttgcttcagtcaaagaaagtgtcaatctttcccatgttaggacctacttaattggtaattaaaatatttatacatttagtgctaattttctctttccttttttttttcctttctacacatagggtgttcctgaaaagccccatagtgattgagtcttcaaaaccaccgattctgagagcaaggaagattttggaagaaaatctgactgtggattatgacaaagattatcttttttcttaagtaatctatttagatcgggctgactgtacaaatgactcctggaaaaaactcttcacctagtctagaatagggaggtggagaatgatgacttaccctgaagtcttcccttgactgcccgcactggcgcctgtctgtgccctggagcattctgcccaggctacgtgggttcaggcaggtggcagcttcccaagtattcgatttcattcatgtgattaaaacaagttgccatatttcaaagccttgaactaagactcaattaccaacccgcagttttgtgtcagtgcccaaaggaggtaggttgatggtgcttaacaaacatgaagtatggtgtaataggaataatatttatccaaaagatttttaaaaatagggctgtgtttaaaaaaaaaaacaaaacaagaaaagcagcagtgattatagagaggtcacactctaagtggggtcgcggcgtggccacgcttcacggtcacgctcgtccgtcctgcagtggcgtgtttacatggtcacacgtgtgtgtatcaccagtgggtc

SEQ ID NO: 128506 - DNA, 1605 bp, Homo sapiens
tcttggttcccacactgcgatatattggaattttcacctcagtttatgaagtttatttcgaaatccatagtcatctaagaatgaatacctgtctgccatgtatttcaatcttagtgagccaaaattgtttgtttgttactacagaatagagatgactgttttttgccacagccctatggaatttgcaatctgtgattgccttgtaaaaaggagagtgcatatggcactgcattaaacgtgtggtgtttctagtcaatgatattggtgagcacaatgtattcatttaatggcatagaccataccagacctaatttgcaagtattgggtcttaaacttcaagtgcaatgtatatgaaaaccaatctgagccttgtatctcttaaatatttattttttttaacgtgtgagatgttcgagagaaggttctccattcatttcagtgctgcctggaggaaactcggcaatgatttctttcagttgtgaagttcctttcgtgttacaccctccactgaaccctcaaccttcgaaatactccagttttgtgggtttggtcatttttacttataaatttacctttttgtattttgcaatttacatgtgtttggtttgttttaaattctgtgaaagtggcttgattaaaagactccttttaaatggaagccaccagtcagcagaatggaagcttagaggaacttgcctgtgagcgctggtctttgtgtttggttttgtgatgtaacgatctttgctggggttttttgctttgttttgagggaaatgtcttggagtaaattttaagttcctggagttaatttgttttacaggaattttgttttttaaaaaaataggatcattctgaactttggaatgacccccttatatattttctgaaaatgaaaacagttacatgaaaaaaatttccaatgaagatgtcagcattttatgaaaaaccagaagttattagatgaaagcagcgagtgaatctttaaaacagacttgatcacgcacacacaataagtctttctctccgaaaccggaagtaaatctatatctgttagaaataatgtagccaaaagaatgtaaatttgaggatttttttgccaatagtttatagaaaatatatgaaccaaagtgatttgagtttgtaaaaatgtaaaatagtatgaacaaaatttgcactctaccagatttgaacatctagtgaggttcacattcatactaagttttcaacattgtgttctttttgcattcattttttacttttattaaaggttcaaaaccaagtgttgtatttatgtttgctttttaaaaaacagttggggtggtggtctctgtgtaggatgttagaatttgtaatggagaaatattttgcagttcttcaaattttactgaattttgacacaacctcttgggaagtatttgaatcatccttcaatatacacaggacattggttccaggataccccacgtatgcgaaaatctgcatactcaagtctggcacttggccctacggaacctgcgtacactaaaagtcagccctccgtatacgtgggtttcacattcagcaaataaaccatgtttggttggaaaagctccatgtatataagtg

SEQ ID NO: 128507 - DNA, 1030 bp, Homo sapiens
agtcttaggtttccctgtgggccactgttaggttgtgctgcttttgctaatgaacaatgagatagagtagctactcactttagcatcctcctagccaccttggtgccttgtaagtcacatttattgaccaaaaccaaaataaaacaagtcatggggaggaaacaaaaacaaaaacaaaataaaagaaacaaggcaacattatagggtgagagaacgtttctcagagttgatgaaaagctgcctaattctatgtccaaaaaaaaatccctggaaaaacacggggtggggtgtgtaatgcttattaaaataatgaggagagaagacttgtttgaggctgcatggtttcaaattgttcttttatgagatggttggtttgggtctccatgaagacacgtgaacctgttctcataaaaaaaaaaaaaaaaaaaaaaaaaaagaccaaattggctgagatggccagtttattttttgtgatgtggattactatttgctaagaacaagccaaggacaatgaatccattttactgaggagtggagagcgggattgtgctgaagtcccaaacgggaaagatcaatactttatttactaagacaaccctaaaaaaatagagtcgatagctggctgtgcttttatatctgtttcttggcttaggttgatatttattcacatacgtaatcactatatctaaataaaaatgataaactatatatcaagcttaaaattcagattgtcatggaatatgagaaaagtcattcttagatgtgattttgtggtctgttttaaaacttggtacaaatttgtgagctaatgttaaatgtgctgaagctcacgcaagaggatattgtatagtttgataccaagatgcaattaacaatgatactaaaccatcacaatatgaatgcacctgtgacatacaagtgtgttattatgattccctagctataatttaattcccctttatacatttcttaaattcctcagattagttgcttttagagcaagaaaccaagtggataaaaagatcaaata

SEQ ID NO: 128508 - DNA, 1838 bp, Homo sapiens
gtgaaacttctgctaatcatactgagctctaggagtgccgttctgctggtcgtagagaggagtaaagtcacacccaaaggtcaatgtctgcattttatgtttgcatgttgtctttcatgataagaaaaattttgtctcttgtttataccgtgtttgtctccgtttatgattcattttgaaaatctgttggttgacatcatgacaaaccctgcgtttttttataggtgaagctgaggagtacatgaaacttaaattaacctttgcagattttgataaatcaagcttgacaatagaggatttaattctgtattgaggaaaaaagcgaagacatttcataaacaaaatagggatttcataatgtatgctgcttattttataacagtgtatgtgcacatatgcaagcgcagtggctgtctgataagaactggatttgaatcctcaaatacttgattgcctataaatttaaggaaatacatggcaacaaattcaaaatgtggccttctgggtgagatatggctattagtgaaagaaacccactttttatcaggaatgaaattaaaatttttagaaaccacaagtttaaaaacccatctctaaaatttagtggaatgtgtaaaaactaatgaatgctttaatttatagtaaacaataattatattggcctctcaaacaccattctgagtttaagtggcttagaaagttgatttattattgcatcaggtgttaaaagatgacactagtgattgcgttttgtttcgctccaaactcttctggcttgtttgtttttcttctaaacgttttttttttggctcacatttagtgtgttgagtttactactaaataatctaccattcttctacaggaatggaaaaagagttgggacctggtgggaaattatcttttggccacacttaatatacaaagtctagtaacaatcactcccggaaatttctttatctctgttacatttgcattcaatggaatctgactttaatgattaaaaatgtcagggtatggtctacaccagtttctaaaaagagattctcattgtctttggtgacaatcaagtgggtaggatgctacaaatcccccccccaacccccccgacccaaaactctttgccatattgttacttagttgcttaaaaagcacattatgtgtttaaatcattctcctgactcttcagcaggaaacaattcttaaatttaggaaaatttaccaaagctaaggggaagggctttccatgccccctccccacctaaactctgattaaaagttagtgagttaatgtcacttaattacttgggtgcttcttttttgtcttgtctgtggctgcttaagtctgatggctcctacataacccagcgaactcgcacccgagctgacacacgatggaaatagaactgaataataattaacactattttccagtagggtaggacaattgttatttaaaacatagtccctatagctttatttaaacgtatctagttaaggttaatttggcatttaaagtagtaaatcaggaacattctcctaacttggattttcttgggaaatgcactaaacaggacaattattcctgaaaacctagtgaccttcacaggaacatggcgggacctgtgacactaagtaagcttcagtgaaaactgttcacggtcgtaaccgtagaagtgttgccaaatctgtttccatactctctttgatcatcatcaaacattctcaaatgtaggcaatgctaacactaattatagaaattaagaaaatgtgggctcctgtttgtaactaaacggacgtggggaggtgcacctcctgtcactgaggggtgcctttcatgg

SEQ ID NO: 128509 - DNA, 1041 bp, Homo sapiens
gtttttaaagtgtttcaaacaattcagagatgtatgtaggcattcagatagaagcaaaaatgtgatgaacaatatttgaaatattaatttccctattttttcctcataaaggacgtggtctatgacaaacgcagatccactgctacatgggccctctctcagatgctccaggaggactagagagggttccagtaactagtcccagcagtagtcaccccgaataataagatcctggggaaagactgctcccaagtttgtcaatttgacttaatttcaataatcttaactacctttcttcattccttctgcatatttataattggaataaaacttaacactaaccttgagaaaatgcaagctgaaagaataaacctaagataggtgcaattttgcaagtataaaatgaaacctgatgagataattcttaattggcatttgatttttaaaacactgattaagtccttaccactatgaacagcagtactggaagtaaaaggtgtaaaagatactcaaaggtgcaagccaccattgagccgctacgtagtgaagcggggtgagtcctttcaggtaatgtttcttcatgaaacatatttatgggtgttctaaaccactcataagttaaaaaccgagaataaattaatcctagagagagactggacttctcccacccactcaaaaagccctactgttgaagtgagttaatagcacgataacaaggaagagagcttcttcaaactgaacaatttttgctagaaaaagctcaagcaacacatcaatgataaaaactctgataagtgactgaagcaacagagaattcatgcatcttaacacattgggatggtttcagacaactgaagggtgagatgttcgtaccgtagaagactccagatgcactggtgcctaatctaacatacaaggacagccagtttacaaccagaatatgacagtcatactctgctttgtgaaggcgatacttttccttgtgatcttgcccaacagctttgctgtgatagacactccagagtttaaacagtgtcttaa

SEQ ID NO: 128510 - DNA, 1141 bp, Homo sapiens
gggaagagggttaatccaatgcaatgatgtattaaaccaaaagggcgaataaaaatggaccaccttggttacatgatttcctatgtttagctaataaattgttgcaaagtccttcctaacaaagtgccccgccagtgtgcgtctatccacatatgttgttattatgtttctacagtgtgaaactataatagaagagtatgaagatgaaatatcctcacttatcgcccaggagacacactatctagctgacaagctgtgcagtgaaaaatcaggtactgtgtctgatgtaacatgtgctcgctgctcgcacaccctctctctctcactcagccttgcagcgtcttgtttgcagaccgagcctcgctgcctctgcgatccacggctctgacacaggatcccccgtctccgctgaatcagaaacgacagcatgtgagagaaaacagataaacagaaaccacagggctgtgtggccttcctctttgtactttctttcctctatatattaagtgaattcaaacattcttgatttccagttaaggagaaaattcttgttcagaattagaagactccaaagcactttctttttaaaaactttgagagagaggatttttccatcctggaccagggaaggagaccctcacttcatggcttgagtatctgctacagcagcagaaggtgcgatttttattttgtaagaactttctaaagtttttttgtttgtttgtttgtttgtttgtttggggggatgctggatttttttccaggttccattcctgtatctacttcttaaaaaaaatttttttctggctcagagggtggaaaataatagttaattcttaagcatatacacacactcagaagctggaaaaaatgagcagaattttatttataatatacaaagttgaaagcgatggtcactgactctccgctctgttggctgtacgtagaccttctagtcccctaacttggatgcttgtttaatacatttataagaatggagtacacagttgtgcattcttttggatatctttgggaagaaatgagtgagtagatatgaagacaatgatttaaagccagtggggtacttttaaacaatgtggaagtttgagacaattagcattcagcagttgtttacaataaa

SEQ ID NO: 128511 - DNA, 1369 bp, Homo sapiens
tccgttaccaagggcgaggggtgctctttgacccgcgcccggggcggaggtggtggccaaagggtccagctgaatcctcgccgaattccggagggagaggggcgcgcggggacgtgcaccagctgttcccaaagaaagcagccgaggagcccgcctgggagatggggcgcccgtccgtgagccccttcctctcccagccccacgtccaccccagcccgggccatcgcgcggctgcagcgtgggggacgcgcagccaagggcagccccggggagggccagactttgggcctccccaacttctccccgactaaggggatctgaagccagctgagcgcgcgctctctctctcgctctctctccctccctctctctgtctctccctcctttccctctctctgtctctctccccctcctctctctctcctctctctgtctgacaagtagatggataataactgccattttctatgcgtcatgctttttgctacatgctcagtgatttctaaacatgattctatgtagaggtatagtttctagtttgaatgtattttttttctggccactttgaaatatatgcacttttaaaaaactggaatttacgctagccccgtaatgatgtaaagcaggtcgttgttacattgtaataacaatctgcggtaccgtcttctgggcccgtgctagggaagtggcacacgtttgcattcagggagagtgtggcgtttccatgtggactcgccggaaggtctttgaagtaacattaacattaagacaagtttcctcgccctgtctttcttcttagatccccctagctcagtcggaggcgttcctaacggatcttttggagaaagtctgtgagcgaatgaacgactacaagcttgaggaagaccctgtgacgaaggagagaactttcaagagattcgctcctaggaaaggagacaaaatataccaagaatttaaaaaattgtatttttattctgatgcttacagacctttgaaatttgcggtaagctctcttccttgcagatgaatcgtatgatccagaaacgtgtttttggaactcttttttgttgttttctactcttgttgtggttgagtttcaagacatggaacatcaaaatgcacattaaaatgtcatctgctgactttgttgtcttgctgcttaagtgctcaccatgcgtttagtaacttgacttttgagacacctaaggggttgtggcaatttatggtgatcaatggacacgtctcagtgatactttacggaaggtgctgtgcacaagtcccggggactttaagacagttttgcagaacgttttgcttaaaccattttgctcgtgtggggactccagagtggtcttagtcagtgctggtg

SEQ ID NO: 128512 - DNA, 1056 bp, Homo sapiens
agtgcagtcgtataatcatggctaattgcagccttggactcctgggctcagttgattctcccacttcagcctcctgagtatctgggactgcaggtgtgcaccagcacgcctggctaatttttgtattttttgtggagacagggttttgccaaggtgcccaggcaggaactcgggctcaagtgatctgcccgcctcagcctctcagagtgcaaggattacgtgagccaccatgccttggcatgatacatttcaaaggagtcatttggtattgcagccaagtagtaaggatagagaaatggaattgctatccttactaatagcagagagaatgacaactgttatttattggagactgaaaacaaaaacataaaggcaaaaacatggcattttggggaaggaacaaatagtttaatgagtttcaagatcttctagttccagtgcttccttgtaaaatataaaataaaaaatcagtacacaaatcgtaaaaagcctccaacctagtgagtgcgttatctcacttaagatttacaacagcattcttgggcctgagctaatctgattttataggtgaggtgaaaaaatgggtgcttgtaaattttttgttttctagtcaattcttagaaataaaaagttttaatgggaaatttcaaacacatccagtagtagaataatgaacccacatacccatcacctagcatcaacattctggcaatctgttttcatccccccacctccacttttgtatatttcaaacaaatcctaggctggtaaaattttagagcaagatacactgctgggatgagttaagactttagatactaaaccagttgctttaatttacatttgatagtaaactagccgagaaaagttcagccacctagctgttaagaaagggaagtagactcgaattcaggttttttgacttctagttcagtgttccttccactgtgtcagtatgtagtaaggcaggaaagtatgaagcatggtgcagaaggttttcattcgaaattgtgaaagtgaaacaagttttagtacttcaacaggtaaaatttacct

SEQ ID NO: 128513 - DNA, 1152 bp, Homo sapiens
cctagaattaggtgtgtgcttatatttccgttgctcagcacatctctgcattatctctattttgcttaaatggaatcttagctttccatgatttggaaaagtgtgacgattacaaaaagtattatgaaagtctctaactttttagcatgtcacattttttttctttcatgcagtaaaaaaacactcaaaacccattttataaagaaaacactttaataacatttgaggtttttttttttgaaaacctgttagtgatttttcatgcccaataatgttcaataagttggttttcttggatagctttgtgtttttaaagatgtttcattattaaaaatggctaaagtaaaatgatagttacatatgaaacttttgtaatttaaaatgtcaagtcaggaatccttaaaaaagttgttttagtgtttgaattatttgcattgtgtctattttaacttagtaaaactgacttcaatggactgttctcatagatgatgactttgaccagtttgataagcctggcgcggaacggtcgtggagaagaagagctgctgatgaggactgggacaggtacgtgcaccctgtgcttcacctaactgcctgtgccgatctctctcattctgacacttggctcctgagggatctttactgaacgcagcaccttgactacctggcgctctctcttgagtggggctgtccctcctgagctaaagtgaagcttctccatgcagaaggctgaggtgtgctcctgttccaggcctgtgttgtgtggagggctgccaatagatcataggtcttctgtcctttttctttgtttttgtacagtaatgatactgactttgtggacacccagaaccattactggagtggccttgtgccagagttctttaagctctactttgtactgaatatctggctacactttaacgttttttccattctaatatgtgtagatggtatttcactaattttaactttcattttcctggttaccagtgaagatgaaaatacctgtttaggaatggatgaaaatgacctgtttaggaatacacacaaacacaatttaaaaatccacagtgatgatagatggtagtttgatatagtggttacctctggcaaggagttaataatagaggttagagatgtgttctgggagaa

SEQ ID NO: 128514 - DNA, 1880 bp, Homo sapiens
gtcagggtttcaccatgttggccaggttggtcttgaactcctgacctcaagtgatccatctgccttggcctcccaaagtgttgggattacaggcatgagccactgcgcccagccagaaacttcattttctgtcagttaagcagtccgttttgttatcacacatatctgttctcccttctgcaaataaactgagtatgtatcctgtgttattttatttttatcttattgtggtgtcagtgattaggttgagtcctgtgcgactaagaagtgctaataagattatttttggctatcagaaatactgtaataaagtatacaggtaagtttttataaggtgtaactaccagaaaaagactgcttgtttgttcacctttaagaagaaaagcaagttgatttttctgtctttactttttaagaatgaatatgtgtgaatgacagtgtgtgtgtggctttgactggctttcgtgaagggagtagtaatttacatataccatttatacatataagtaattttaaaaagggaggaacgtgtgaagtagtgtgaataagtagtgagacagtgtgaataacacccccccaacctaatctaagatgctcaaatatatataacctaagaaaacctggaactcttgacagaatagctaggctctctctccttataggtaggagtaccatcaagaacaggagtggggaactgagctgctaacatttattttcatacgtgatctgtactggaaaaaccaaagttttatagtctcatttcaatttaatgattcagttatttaaatcttatttctaaaattacactttttgtgttgtttaaaaaatctttaggttttggatattagcatgttaaatttagtagtaccttaaggatatctttctttttttgtgtattataaggaaatattatttgttcgtaagcttccaccaatggacttcttaccttttctcttttgtgtgagaataaatgtgatcgttacacttggtgtttttacatttaacttgcctgggcacctgaagctgagcccaggagggatccacatgccttgtgtgggatttcttgattatccactggtgaccagaaagccttccgggtggcaaacgttttaatataaggctaggaacaattcagtcagtgtaattttgtgctttttaacaagtctttttatggaagtgacacacattaattatatttcttattttaattagaatcagtcggatttgtcagatgaagagctaaatgatgatcttttgcagagtgataatgaagatgaagaaaatttcaggtactcaatattacctcattataaatgttctttatttaactaaattgataggaactgttatttataattataatggaatgtaattgaataatgtagccttatatctttaacacatgattacattctaaatggaatactagtaataactgtagaagccatatggatgttctgtaaacagagcagctgtttaaaataagcagttcttggccaggcgttgtagctcgtgcctataaacccagcactttgggaggctgaggcaggtggatcacttgaggtcaggagtttgagaccagcctggttaacatggtgaaaccctgtctctactaaaaatacaaaaattagccaggcgtagtggcccgcgcctatagtcccagctacttggagggctgaagcaggagaattgcttgatccacagaggtggaggttgcagtgagccgagattgtgccactgcactccagcctgggagacagagtgaaacgccgtcttaaaaaaaaaaaaacaaaaaacaaaaaatcagtaggtctttcatttaatgatccctgtgagttctgttcagtgcaggttatgaagatttagtatggatatatgct

SEQ ID NO: 128515 - DNA, 2087 bp, Homo sapiens
gcagtttctgtctatttcattttgtaaattagaatgaaatataggctatttgatttcagtcttggacttttgccactcagatgtgtttcatctgtggttgatttaattcatttggtcaaataacctgcagctggtgataagtagaggggctatatgcattgccagtctgtggccggctccatatagcacagttagctctgctgtacgcattaagggtttagggcactggctctgtatagcattttgagtactgttggagttaatgtgcatttgtcagtaactggaataactttttatcagtcatggtttaaatctttgtaacagctatttatataatgatttagtttgagctcctctcttcattgggtgctttttttttttattttcgtcctctctagttctcagggtgttacaattagtctgaatgctacatctggcatggttacatcatttgaactctctgacaacactaacgaccaatctggagaacaggaatctgagtatgaacaagaacaaggagaggatgaactggtttatcacaaatctgatggatcagaattgtatactcaagagtacccagaagaaggacagtatgaaggccacgaagctgagttgacagaagaccaaatagaatatgtggaagagccagaggaggagcagctttacactgatgaagtgttagacatcgagatcaatgaacctttagatgaatttacagtgagtcttttctcctttgtatggccaaagataacctggcttcccatgcataggcttctagactgatttgaaatctatttacctcccctgggagggaggggaaattagaccttattatcactctctgccagtttctttatctgagctatgacaaagtttgtgttgacagcttgtttgaccagaggtaatgctcctttgtcattctggaaggctgcaaagaatcgtgaccttgaggattgtaccctaaggaagaaaacagctttgtgtggtggggatacactgtcaattgttaggagtacttaatgcagagcttttatcctggctttagacaagatctgataaagtccttctaaggcgaaaagattattgacctgctaaagacatctttaaggtgctaatattccagagtgattgatgtcctgttcattcatcctttttgtagatgagaactgtctaaacctgaataaagagattggaggttagtttaggaaatgtcacatataattcgttatctataatcaggaagcaagattgtgctgattttttatttcagaaagatgattttggtaggtagtttttttttttcaaagttgaaccaacaagaaagaaaaaatgtactagtgtaagattctcacctttaaatgactcattatcaaaagagatttgttttttaaaataagcatgtaacgaaatttatgagggaaggatgtgatctcagtagctgtagtagaatcttagggtttttgggaacactatgggggccgagtgaatggggctgttgggatggtgacagaagtatgcaaaattggggccttaaagagcccatttgcaatgggagtagctttgcttttctgtatttacatcttcattcggaggaagcttttgtttcaaaaaaatagtttagaagttgctgaattgtggtcatgtgtatgagtaattttgaaaaggattaattgtttatgtggaacctttgaatatttagttccagtcatgattgtatttaggtgtctcagtagtttttttttttttctagacggactcttggtttgtcgcccaggctggagtgcagtggtgcgatctccactcactgcaacctccaccttctgggttcaaacaattctcctgcctcagcctcctgagtagctgagattacaggcgcccaccatcacgcctggctgatttttgtattttttgtagagatggggtttccccatgttgcccaagctgatctcgaactcttgacctcaagttatccgcccgcctcgtcctcccaaagtgctgggattacaggcatgagcctcggtgcctggccctcaatagttttaagatttaattttttttggttaatatttgctctttggtagatacag

SEQ ID NO: 128516 - DNA, 1084 bp, Homo sapiens
tgtaaagtttaaagttgagcagtagtagttcaatgtctttctgtgagcaatgtcagttcatcttgatacatgtgttctagccgtggtcattcttttcttgctttatgatgatcacaatggtaacatctgaatgatctgaaatggccgcttccttggacaggaggagatacgcagagaattaaattgtgaggtactcttatcttgctcggcaatgggagcctctctctgtcttcggaggctgtcactgaagcccagatgatttattcaccattagactaatgaacacatgagcagattgtgtctctgtgtaccccaatggcattttagtttattaaatgacttgtataactgtgatttttgttctcccttgggttgttaacccccactctaagacttgaactctgaaatgtggatctgttggaacctacctgtaaagccacatggaggggctttggtgcataacagggagtagaatcatgaaaccccagaatgtacagtgggagggtttgctgttccctatgaagaaagcgaggtccagagacatcaataaagctggacgcacagctctgctgtcctttcctgtgaatgttgctggtgctgttcttgagagtgaattgtgatttcatttgaaaatgtgtgctcattatattagtaaggagtgtatattggtttagtcgacaaaatattagaaaatggttgagtgacttttacctttaagtgcaatcagtttatttaaggcctttaaagttaacatagattaagattttattgttctgtaaaaacaatttcaggttgacattttatgtcatgggtagcagatgtttgtttcccagcgagaatccaggggtgtggactgtactgcattgtacactggctgaagatttggattagcatcatttatttgactttatttgaaatctgaatgtcctgctgcccgtgattcatgggtagtgataattgttattctgataggacgctaacagttttttctggaaaataaaatgtgttgtgttcagattgtcttgagagaattgtgggaactaaggtggtttgtcaccttaaatacagctgctttatttggggg

SEQ ID NO: 128517 - DNA, 1491 bp, Homo sapiens
tcacgatttttaaaaagctcctctgtttaattgctgacacttttgttgtcttacattgccacaaaaatagagttgggcatgatttcagcccccttctgctgctgagctcctttttgagagcacataaaccatgtcttttgaaggtggctcttccgtgctgttgatttgcagaggagctgtgtgacagggcacttggagtttgaagcagagcccacggcacttgctctggtggctgggccagcatgatatgctttgtttgcattaacacgcagaggaggttcccctctgtttctgggcctggtgctttgtgctcagtcagctaatcaccatagtaaaactttctacaattattaagcatgaatcataaagacgaaaagtacgtaaaaaaaccaccccaaagctgtatgagaaaaacttgttttctctttaatggctgttaggatgaagaatacttgcaggcttatggtgggcaacaagggctgcaagagcaggaagactgtgtggctgaagatgaattagatgagattactgatgcccaggttgctcctgcaactgaagaggtatttgttcatcttttaaaaagagtaaaaagtttgctgtttccctcccccagacttaaaatgagcatctttttagcattagcgaaagtcgatacgtatctttgaactgtgagtgtatagtgaaaaacttgaactttctaggctccttgggaagtgagttctggtgtgctgtgatttccgcatagcgtgtgccgtttaagtgttagagtgttgtaaatgttttgtggggatgtgggtggaaatagttcagaaatgtgacgtatatgttagtgctttgaaagcagtgtggtaattctttttaattagtaacagttaatttggaccattcaacaaatactgcaaggtttctgtaattaggtgcatttttagtgttgaagaagtaaggatgatgaagcttgaatcctgctttcaaggaaattggagtctaatataggagagaaaaaagacctgtaaatacctgtgatgggaaaacaaaagtaaaacctcccaagagaggctcagagacagtgctaggagctcaccgaggaaaccccgtggggagagaggttcgtggtcgacgaggctttatggaaggaggtgaacctctgaactctgaggtaggtcttgaaagatagattgcatttgtactgagaaaggtggggtgaggcatagagttaaatagttgctgttctcttaccccagaactagctgctgtgggccagacatgcaagccacaaatcattcttcagcctgagaacttcacaagagtttttcttaatacagttttcatcttttgtcaggaggccatgaaaactgatatttactggcttaggccatttactttaggtgttatttcaaggatttagacactcagtccagaaaacatttactttacccttttcccccccagtatgaataatactatgacagtctatgaatgtgtatgctgtgc

SEQ ID NO: 128518 - DNA, 1039 bp, Homo sapiens
aggggaaggtaggtggggtcagagttataaaatgttgagcctttaagttacaataaactcatagaactttagtgttagtttaattaatacattgaatttcactatgatctgtattaaactcaaagcaataagtccagcaggaatttttggaatttgtttattttcagacgtgtaagcagcaatgatgtgtaggactttgtctattaattgcaagcaagaatttgacctttttttttttttttttttttttttttttgaacattaactgttaatgtttaaggttattttctcctggagtcagcttagggtttcatgtggccttttaacaggacattttgcagtattttttacatctgaaatataaacaattaaatattttagcattctttaatatttaattcaaaagaatatgaacttactgtcctttttttgccttgtgtatctgcaatatagggaggtatggaaacattggaacttcaaaaggacatcaaagaagaatcagatgaagaagaagaagatgatgaagaatctggacgattacgtttcaaaactgaaaggaaagaaggaacaattattaggctctcagatgtaactagagagagaaggaacattccagaaactttgggtaacttttttgcctgtctcccatcctcctttactctcatttcaacttcctccatagtattgctgtaattaatcaaagtaggcaaagaaggttgactaggtaattgcggctgccgtccggagagtggccggactttggagtgagtgctgtttatggtactgtaaaactcattctttaaaatcattgctgtttatggatttaaaatgcttgaataaaatgtttaagataattaaaaaaaatttttttttgagtctgtggcctacagctgctcttgtacatgctgtggttcctggctggtcttgaaaaggtggcatggggatggtagctatggggccaggttgacccttcccaagaccctgaggttgtcagggcgaattctggacaagaccggtttatattttgtaccttttagtg

SEQ ID NO: 128519 - DNA, 2514 bp, Homo sapiens
gcaagtcctctccttggaattatgggggaagagtatgagacccttagaggcagagtagctataaacatatacagcttgactagtgaccattctcagaaacaataaaaaagcacttaactggatttttgtagaatgtggttgtttggcaagatgatagggcaggtgaaaccatagttaaaagtacctttttctgttccgtattacttaagaaagcttggtgcttggaaacatgagtttcagataactgtaaagttaggatttttcccaacacaaaggaggatttttctgtccgtcaaaagattggtttcctaaaacagtgaattctcttgttaccttcagtacctccccccaaacaaaagatgaattttacatctgaggaaatatatattgaaaaagagataatgcctcagtatttggtaaactagacatttgaatacatttttacacatcagtttatttgtgtgctcctagagatcaaaataaaaaaacctgaacagtctcaggttctgtgtagaaataattatttgattgtgtaaagctgtttgcctactctgtaatgggattaaaatatcttgccaccagagtacctgttgtcttatatgaggtgtacttttttttttgttttcgctgatattgttagtgttgagaacacttcattctttaagagggagaatcaaatgatgcactggtatccccaatttctgactctaaaagtttacatgtgaaacgagttctcttccaatctaggagggagttttggttacttttagtcttttttcacattcacatctctgtgaaaaacattcatatatatgacagcctcagcagttaaggaacagttttatgcacagttgttgattggtattttgaatgcaggttggattagaagtagaattctgggctttcatctaggttaagatcttaattgactagctttttttgctctatcaggattgtggaaattaaaccttacagaaaaagatttgagtgacagtgttctcggttttcccaaggacgatacagaactacatacctaggaaataaattaattcattacatacagaggatgttgtagggtgtaagtgctgaactccctcctggagctcagttgagccgggctacagagtaggcatgtgtaaggaatggttcactgtgaaaatgccagtcgccatttctgaagatggtgtcactgaccagtgtcccccaattgccagtcctgcaagttgagagctctcttttcgtctaggaggtggcccttggattgccttagaaagcaatgtaagccataaatgaaagactgcatttattttagttagaaagactgcatttatttttaattcattatctgtgagtaggcttccagattattttattccgagtttcattggcacgtgttacatgttcttttttattgctgtagcctaaagaacctgcttgtacacccacagaatattctcttgaaataatatcattaatttcagaggatctgtgggaaagagatttctcggtagtaacaaacaattcagaattgctaatgccagcaatagctcactgttcaagggtttatacttaatggtccttatatttgcagggcctttaaaattttcttgattcagttgtcttttaaaaaaaagtcagactgtcatttgttatttttattttgccaaacaaattgtgtattctatatgtatttcaactattataaaattatttgcatgcaaatatatttttcttaacattttagaaagggacagtgcagtgtaaactttgttacattgaggtatgtatctctttagaatctggacatagttcagaaaacacttaaagggaaattaacatttcagttgaagttacaaatgtaatttccatcctgtcatattttggtgaccttttgtgacagcttgtctcaattggaggaaagcatttttacttgctgattaaagatgtcatttgaaaccattttattactgaggatagtgaaattaatcttgacactcagaaccactagaaaaataattgctgattcactgcgtaaaatgtgtgtgtgaactaatcatgtagtcaagattagaataaaagtctatgctggttaagaagagattaaattttctttcaaatggggtctagttttatttgaaggagagaggggtaccatataaacaatttcaagaaaaatgtgacttagagattttggaggagtttggagatgatgatgggatccaaggtagaaggtagactctggtaatattgaaagcgtacccttggctggggaagaaggcaggagaaggtgtcttggtataatgtactcagtgacatttttagaaaatgtggtgtaagatctgttgtcccaatttagctagtgttgtaaaaggaccatatgtggctaaatcattttcgtttccctttaggaacctagaagaatgtggcatctgaagtttcttagggccagtgcccatgttttctgtatccctaaagcattgggcagagcagtgagcagctgctggacactccaca

SEQ ID NO: 128520 - DNA, 1487 bp, Homo sapiens
ggcaacatggtgaaaccccgtctctattaaaatgcaaaaaaatcagccggcgtggcggtgtgcacctgtgtagtcccagctacttgggaggctgaggcaggagaattgcttgaacctgggaggtggaggttgcagcgagcagagatcacgccactgtgctctagccagggcaacaaagtgagactctgtctcggggggaaaaaggatgggactgcaaaatgccttgtcgtgtgagggcagtggctacgtttcacttcagctgctttttagcctcagtcagcacatatcagtggtctccgatgaaaataatttaaaatttactgttaacacttgcattgtgtcataacggaaagcctgttcttatttatcagatctcactagtgggttgtgtgtgttgctggttgtatcgtacttgccgctgctagttgggtgtttcctgcgggtgaagcacatgctgtggcagagtttcattgtcacatcattctttcctgttctctccctagacctccagtttgggctctcggaaagtaactaacacatacacattttttcacatagagctttcagcagaggccaaggcagcattgcttgaatttgaagaaagggagcgacagcataaacaaggacgctacagctccaggcggggaggacggcgaggaggtccgctgatgtgtcgtggtgtgggggaccagaggagagagagcaccgagaggggcaggatgaaggaccacagacctgcgctgcttcctacacagcctcctgtcgtggtaacttcagattttcttgtagtagccctagaacttcagaacaaatggcagtaagcttttgtgggtatcctagtatacatttctctcttcttagtctgaaatgaaaggttagtagcaggggtaatggctgaagtttctgctttatagtctcatgtgatgttgcatatagtcttagaaattcagcactccagtcatctggtagtaagaaatcatcctgtaccacagatacttccagaggaggaattaatgagcgacctgatgccctaagatgacataagctgttggaccttgctacctaaagcctctagagaggtatttctgagtgcattacatttgagagatgttattacagatagaatttaggcagaagttgtttattttataaaaatatctttacctttttactgtttaccatagattttttccttaaatggcagtttctcagaattattaacatgtcctccatacaaagctttcatagtctgtagtttaggaataaatcatgtacctgtaatttcaattagaatttcgtttgtatttcagagatggcacatctcagaaacaaagacagaaattattgatttttttgttctttttttgtttttgatacagagtctcccctctgttgcccaggctggagtgcagtggcatgatcttggcttactgcaacctacacctcctgggttcaagcgattctcctgcctcaatctctttagtagc

SEQ ID NO: 128521 - DNA, 1087 bp, Homo sapiens
ttttctttaactgcatttttcttcaggttttgttctcgtcctccttttcctcagtggtctccccagcactgttcctcttgctgtcacctactgtttctcagtgagtcttagtctctagcctaacctctttccagctccattttctccatctcccaactgtccctgtacctctccagacacatgtttcacaggccctgaatgtcacttgtttaatcaaacaaacatgatctttccctcagaactctgtggtcttgaattaatgaccatgcattgtggtcactctcagttcaattaaaatttaacttgggtgtccctgtgtctgttagtgtgctgtctgtgggatacaatggtgagtaagatagacaagatccctactctcatgggcaaatgtgcacagatgtgatgagttaaggagggggaaacatactgcattctgggagcatgtgtgctagtggatgtgagctggtaccagaatcttttgaaacgtcttctgtgaggaaggataggtgggccaaagccattcacagattagttttagaattctactcattgttcctctgagatgtcttcttgctctttgtcagactatggcttttccattgattcatctctcaccattccctattagatggtctccttccgtcttctttaccctcgttcatctcacactgctgtgaatgatcattttcctaccaaagagatcattcgtgatcccttattatacgtgttgtctctgtggcatagtaatggatcatttacttggaatttagaagccctccgtaatttggcatcatctcagggaaaatgcttgttaaattagacaactgaataagtagtggtctactgctaattagctgtgtcgtcagtttggttagtgattaaaagcaaaacctgtggaatcagatggcctgaattccagttccggcttttctcctttccagctacttgatcttgtaaaaggaggtcagtaaataggacctagtttataggattgtggggagctaggtcagctgactttctctactgaccgtatagtaggaacttaaaatgtggggaagatttagtccacggcagctgttgcagttgt

SEQ ID NO: 128522 - DNA, 1018 bp, Homo sapiens
tcagcccaggtatttaccacgatttaacacgtatcttcctttaagtcccaagtgctgatgttacagtgaacttggggtatagcgcgtgcagtgcactacttatttctcaaatcattttcccttagagaaaatcatgaaatgtgtattttttaaaatacagtagcggtattgtgtttttaaaaagcccaccagtcttgttgggaaggaaaataaactctaggctacctctcgttgttttacttgtaagccagatcttcgttgagtaaagttatttttttcttttttctactactagattaaacttggttcctgtgaatgtaaatgtaattttgtgaacatttaatgaggatctactttatgtcaagtgctctgcatagtgctgtctctaagctataaaatgaaccaagcatcattaaatgaaacctaacttatgtccttgaagctaattttcatttgagtaaaatttaagaatagtgaagacaacattgttgtggcttagcaaagccgtctggagatttcttattggtggctggaggtgctgcaggctctgtcttggttcttatggatggccgtatgcccctcagtttctatcctggtggttttctgtatttggggttcaatcaatatttgtcaaacctaattttgctttaaaaactgactacacacacgcacacacaaagtgatggaacattgaacttcaaatgtagcaggtggtctgtttgagtcagtgtgcttcttagtacgcaaaaatagatttgaattcagaaatctgtgtgccagttgttatgaaatttgcaattgagcaaatcaaggttcattgtaatctctcctttccccagcttaagtacctttaaaggaattctcattgctcctaggataggtaacattctatccaaagctgtgctcgtagtagtgcatatgtagcttcctcacatcagtcatagttgtgtgtttactcctatttgtgtgatatctggtgaatgtctgtggctaaacacccgtgccagagtcccggtca

SEQ ID NO: 128523 - DNA, 1881 bp, Homo sapiens
acttgggcaacatagcaagaccctgcctctacaaaaaaactagctggatgtggtgtcatgctctgtaagtcctagctactcaggaggctgaggtggaaggatcccttgagccaaggagtttgaggctacaatgagctgattgcgccactgcactccagcctgggtaacagagcaagaccctgtctctctctctctctctctctctctctgtctctctctctctctctctctccctctctcaggaaaagagatccatatcaaagcattatatcagtgaattttcaaattaattaggggtaaaagaccatgtatatgatatgtattctcacttacaaatatattcctcagttactgacatttattgggttcattgtgtcttaattgatgtctttatctagagaagtgacactccctaatgtcaggcaatagtatgctgtggatttccttgtttcacctaaagtcaaaagctacgagattttcagctttggactttctgttgtacatgtttcaataagtgcctaaagtttatgtttttataaagatacaatatttgtgtgttaaacatttctttattattttgtagccaacaatcttaagggtttgtggtgtttatactagtgttcattttgtctattctgtcaatgccatgggtagaacagacttttgtagggagaaggaagggaaatgcactgcggaagagcattttcagtgttagaaaatgttgttgtgtttagagggaacagtgagttagtgataaaatgataggccaaggcattggggttgcaagtgtgtgagaaagaagaatgatacttaaaagttgtgaaatattgactcagtttcaaagaacaaggtgctattaaatgaaaattattttgatgatagttaatagttaattacttctttttggagcagtgaaaaagtggtgaacatttctttacctttatgctgctgcctaggtcaatacggtggtttaaaaaaatctccatgaatacctgaaagaccaactgaaaaaggaagtaattttaatttgtctctaaagagttctagtaacatgtagtttttgaaaaatgttaatctgtaagaatttgcttaaaatttttttatccagaggactctgtgtactattttttctgtagtaatttggtttcttaaaacatttcacatttttctgttaagtcaggaattgctgattgaatttctttttcttttaaagtgaagcagcttcatagctgcagcttacagtcctgttaaatagcaaagatgagcatctttaaaaagataaatgtcatgacatttagtgttttggattaatgggaaataggccaataattgcatggatttcaataagcttaaaaataatattcttgcgttataatgacattaaaacattgacttaatttctagttgctgcgttttgatttttgatcatttaatattgcagaatcacctgttgtgtaacagtttttatgttaatatgtgtggtcatgtcttgtgtaaggatattttggttaatggtggactgcatagacagcagtgtttccatgagattataatagtgtattttattgtaaccttttctagggttggatatgtttacatccacagatacttagcattgtgtgacagttgcctacagtattcagtacagtaacatgctgcgctggtatgtagccttggagctactagtgtgtactatacaggctaggtgtgtagaaagcgctaccatctaggtgcgcgtgtgtgtgtgtgtgtgtgtgattacaatacactctgtggtgttcgcatgatggaatcacctaaggatgcgtgtcagaatgtatcctgtcattaaggatgcatgactctgtgtgtgtgtgtgtgtgtgtgtgtgtgtgtgtagaa

SEQ ID NO: 128524 - DNA, 1040 bp, Homo sapiens
tattttccagttctgatttctgtttataaaatgtgtagtacatagttctgaagtgaatccatgttttaaaaaacactcaggtgatttgttttcttgactacaagaattgataagatactccttttgtgtctcaaagactgtgttaatatttacttaagcatctttcttgtatctagatatttctatagcaatagacaggaattaatagacacgtaactttagaaaatacttttgggtggtagtcactttccctttaccagtggcttattttttgatgtatagattatctctgtctttttggtccctgaataaatacataaatgaattcaggaaaaatacgttgactgttctgttgccaggtgctactctagtcctggaaatacagcagtgaacagaagagacaaattcttttccttcaaggagcttatactcagtcgagggagattagcatacatttatttgtggggttgtgttctcaagcaccatcagcaaatgtgtgacttgtcgtgcattaaaagaaactgggaaacaatgtattgctctgaaaataaaaggccacagtcattgcccttgtcctccattaaatacatataagaagcttttgtaattttgtttttaggaaagggagacacagtgtggctagtggtcagggtttttgcctccattaaatatatataagaggcttttgtaatttggcttttaggaaagagagacacaatgtggctagtggtcagtggtcagggctcttgcctccattaaatatatatgagactttgtaatttggtttttagaaaaagagacacagtgtggtcagtggtcagggttctcgcctgtcagttttcttttggtattgtcttcttttcacccttgagcttcagtcatgtcacttagctgcttggaatctcagttttcctgatatttgcctctttctttcttaaagtaaacattgcaactaaagtgctgtgaacagtaagaaaagatttctaaatctgagaagagggtgctttataacctgggtttcatttgttagaataatggta

SEQ ID NO: 128525 - DNA, 1039 bp, Homo sapiens
ttgttgctgttgttcctaatttttcagtaggcacagaatgtagtgagtgtgaacaatcaatgcagctcagtctttacctggctttagttgaggccgtcttctcccacaagcctcagtctcctcatctggtaaaggagggtcggccagggcggcctgtgcagaaggctggcacctggagggcgtgtcagccttagtgaaatgcatgtggagtgctctgaagcagtgcagcgagttaacttgtccaatagcaatgtcatgaagaatggctttagagaagaatttaggcaagtcatgctttcttagtttcataaaaaccagtcaacactggttttaccttttaatcagttcatttttttcagttagattttcttctgatatattattgtagcagttgtaatgtattgtttaccaaattggaagtacaaagttgaaatattaacatacaatgaactcttattagaacacgagtgacttttggttttaaaatcaatatgtgaaaaaataatgtagatttacaaactggatcggaatagtttagaaagaagtctttggtaaaagttttatcatacttctagtgtatatagccagctcctaactcagtatgtgtaactgatttggttcagaaaaatgaagtcacacattcataataacagggctacctaataggggaagttgcctttcaggcatcctgctggcacatctggcgatcacttccttccatgatagttgatttaggcgaacttctaaaggattcttccatggagttatttcaaaaagatgccttgagtgaaatggaacctgtaggtcaccgtagtataaatggaatgtcttgatttattttcttttaattttctctctctatataaaggggaccaggattatatatatttttttactttttagaagaaagatcttctatttgttttgcttagctaaatgtgacttattttcgtatgttcacccctcttgatgatgatataataaagggtgaatctgcttatttggaggtcttttcaagtatttcagctgctgttctgaa

SEQ ID NO: 128526 - DNA, 1007 bp, Homo sapiens
tattcctgtgttttgaggcagtggccccttgggtcctgtgaatatgtccccagccgtctgcttccccgatgcccatgtcccttgtgcccactatccccctggacgccatgtcttgctctgtatgcctacccttgtaaacagcctctcacccaccttcatttttgcagtttgaaatctgccctagatgtgatattagagaacagaggtggtcggaattgcttccaggacgacaagtaatccctgagtgagggctggcaccgggcactcaagctccagggcaccagccgactcctcagctgtgcttttgtcttaagttcctaattcttaaggtttatttagggaaagtaagatggtgaaatagctgaattctagatagattaaatcctgttacattattttacacggagtctgtggatatggatgatttttaaagaatattattacaattctttaaaaatgcttaactttttatacattttccctattggatgctttttattgaaagttactggagtttttcaaagatttttttgtatcgacttgaagaatggtttggaacttggaatattaaaggcgttccttatataccattaatattccaatactgcaatcggcaacattttgattctgaggagagtgcatgagttcaaggtcagagagattgacttgtgctgttcattataaccaattattctgtgacaaatgagtttgagatcaggctgaaaattctgcacgaaaaatcaatagttctaatcagagcctttcaggtcatttacaccccaccttttgttggtttgtcagagaagagccagataaaacctgtgtgacagcaggcctccctactgctgccattcctgtttgaaacatattttgatatcttaaatgaatagtttaattggtttcaaacttgtaaatgagtggaaatttacattatttcatttttaatattctgataagattttccaaattagctttagctgtgtggtttttttccccctccccagagg

SEQ ID NO: 128527 - DNA, 1728 bp, Homo sapiens
gtttgcatcttggttttcattttgcatctctgtaaccttggttgcctggcctcaatgaatcccagtttcctcatcagtacaatgagaaccaactctcctcccaggatccttgtaaggattaaacgtcataatcatgtaaagttagtggtacagtgcttgagtatgtgataataactcaataaatgttaccacccttttagttgaaggaaaaagaaaatggttttttttttttttggagtggctgtttatattgatctttaagaaaatgaaagcaaataccaattcagctgctttattctaatcaagttaatgaaaattttaagaatttggcagcaaattaagtaaacagtcctttattctgttggccacacagagaaatgggagcagcacagaatgcccccgcaggaaagccagctgtccaattgtgatgctcttgtattttatttttaaaaggctgtcaaaatgctgcatgccgaaggtcccagtttatttgtgggatcatgcatttatggctttggactgcatttgtaaatttcttcccttcctaccttctcaaaagttactcccacttttggaatgatatgtatatacctgatccgttttgtggagcttggggaggtgggaaagggaatgttttaatataattttagttttaagaacagtaggagaaactctcatacgttctttatcagattcaccagttgtttacattttgtcaagtttgctttatcctggtctgtctttttgttcatttgcatgcacaaaaaccttctttcccaaacctttgagagtaggttggagacatggtgtgttatgattcagcacacagatactctcttacaaaaccatatttgtacattatcaaaaataaaaattgttgtgcactgatactatcatcttatccatagtacatattcagattttattcactggaccaattatgtcctctgtagctaacccccacctttcagggtccagccaggatcatgcattatattcatagtgtcccctaaatctgctgtttcttgcccttgaccttttgaaagagcagagggaatgcccttcaatttgggttattttatgattcatcctgatcggtttcaggttgtccatatttggcaggaacaccccagaggggatatcgggtccttcttagtgcattcagttgggaggtttgtccaatattgacaagattaactttgatggggcggcgggtgggtaaaagtgatgtttgccaagtctctcctctgtaatgttacagttttaccctttgtaattagtaaagtaatttataggaagatactttgagacgattgggactatgtaaatatcccatttctgatcaaattttcactattgttagcaggcactgaagtttttctaatgccaacactcctgtatttgttagctgtcatgctcctgctgtgataatttacacttctccttcatctatttgttcatttatttatgtcagtgtgggtgtatgaattgttactttatgcaatgaactgtcactgtcattatttatgttgattttagaattgtaccagattgaccagtgagagcccctttaaactggtttctgtgtcctttgatttgttgccattactcttggaacatgtcctcactttctggtgcaagaagatgttcgagctcaccttgttctttctctgtatgggctctggaattggtcctgcttcttggaagctccaggtccttagagtggag

SEQ ID NO: 128528 - DNA, 1002 bp, Homo sapiens
aactttctgcctttctctgtgatggactgggaggccacttttgcattctgcccgaactccccaacaggattcgggtaggccatctggaaacctagtgccgtccatcaccaccctgccttctgcgcttcaccgctgtcctaggctacattgggcacatatgttctctctgactttctaatctggagaaagtgtgggaaagttcagcagtttcctcttctttaaaagttccttgagcagtagttttgaacccttggcagcttttaaaaataataatgcttaggcccgccttagaccagcagaatcatacttggggagtgcctgggtcctcagtcacaattgtgttttgtttcttttgaaaagcttgcagacgatggaaatgtgcagccacggctgaatttctggttgcagaatctgcctgggagggtttcagggtagcaaatgtagtctctgccagcggagtcaggtacatgatgctgtggcttgttgtgactgtaaggtggacttagcactgtgcacagcaggtcctgcttaaaccagcctatactacactaggagaaatgggggctctgggactctcaggacaggatccaaattctgaactgtcatttgcagcaagtttctcagccctgacgggtgcctgatctacacagaatgatgatgacacagagtgcccaccgagcacaagcgtgtggcccctggagaggtgcaggcttcgtcagctccctcctcttcctccgcctacacttaaacttgctggatatagttgtctcatttagctattaaaacattctctgatagtggatagaaaactacagaaaatcctgtagctcatggtatattttaatggattctaagttatttgttcacttttatatcttagtgactatcgaagaagctcaggcttgaaactctgaatgtatttcctttgttgtcaccaggccatcatgcacggacgaggcagaggagtggccggtcccatgggccgggggcgcctgatgccaa

SEQ ID NO: 128529 - DNA, 1065 bp, Homo sapiens
tgccacctgtggtgcccattgttgccattgccacgcaccgtgcgtcccgtggtgggatctggtgtgtctgggggcagagcactttggaaataagacatttttggatgcacagagtacatgtcagagttctgaggagtccaaagtgctttctttcaagaatctcttacagcctctagcttcatgggtggatttggaaacatgttaacactagggttgatacgggtaattaatgtacatgttttagatctccatctgctgttgacagttcctaaaaatgaatagatgaaaactcttccagaaacatacatgttacttgggtttaattgctgccatcttcattactggcttcctggggagataggtttcatttttattggtgtgtagtaatggaaagttaacccaaagccttggcttctgtttgtgatagagcgggctccctagtggtgcagttaggaatacttcatcagctattagaagcgtacagtgtatgtttaaggatatttcaaaacaattgatcataatctggattaatttgcaggaacacggtagacactagagcattttagatggattaaaatgtggttatcctaatctgagattctcaaaataaatggtgatggagaattctggtccagtaactgtgtagcagtgagtccagatgaaaaaaccctgagcctagtctgttgtgagccacagatgggtgcgcttggcgaggcctcacgtgtgtggcccagtgtcctgctggtcctcctgtctttggggcgatctgcacttccctgtgggcagaagggttgcactgttgttttcatatgtcacctgctacttttgtggactttgcttcatcctgtgtagtcttgatcattttcttgaatatttttgagtgtgatcgagttgtcaagatccatacctgaacagcaagtactgtttgcttctcacagcattgagtgaggctcagagcctacattgtgagaatatgcttggagtcattgccaaaccagctaatttctgtcttgtcttttaaattgaattttgcattttgtaccgtgggtttgtatagacctctta

SEQ ID NO: 128530 - DNA, 1588 bp, Homo sapiens
cggtctcccagagcaggttggggcagctgatggggccagatgatgggaggccttaacactaggcttggaagatgtaactgttgctgttgggaatgatttagtaaagcactgttttggagtagattatctagataagtaagacaaattgccagggagctagaaaggaaaatcaattagtgtgttccaaatgtccgcctggactcattttgtgttaaaactaataatgcttaaatatatatattcatattttttattgtcatttacaactgatcttaaagtgtttgttttcttcctctagagtttacagatgcttcctcagcaacggaaagccatagctaagttcaaggagccagcccacgcattagcatttcagcagaaattccacaggtgaccagtgtgttctgtgcttgtggtgataagggggcgggagcaaggccctccttcctgtgccctcccatccatcatggtagcaagcgtgtgtccccacctgttcctgtagaaggacactagggcacaaagcgcagacggtgatcctgtcatgaggcgcgcgtccttttgtctggtggagaattgccccttgtgttttaatagatcttcccggggaatctgcctttttatatgatgcgtttttattaaacaggacccaccgggctcttttagtttcctcccaccttggtaggttgattgccgatgtgcagggttagtgtcgatcgtttctttaaattttcacaggcatatgatagatttgtcccacataaatgtggccctgatcgtggagtgagtcctaacaagagagcctgaccttaggctgtacacacactgtggaatttcttcaagggagctgccggccggcgcagaacccccaggagcacaggtctctccgggccgctgtcctgcgtaactgttctccagagcgccagccagccacgggcctgattccagaggagccgaactgacaggacacagcaggctggagttggtgttagattgcttcacattctcttgtcaccaccaagaactccaagtttttcgttttgttttgttttcaaagtgcttacaatgcatgtagacattgttctttgtggtctgactctatgatcgatcacagtgacttagattcaggaaagaacattaacgtcacaagttctaagtagttttcacagcaaagaatatttgataatggttgcacttatcttcagtgcaggttagaagagtcttctcaaccaagcttaactcgagttgtcttctcagccctcaaaaggctcttgtacaaaatgtagattaaaatttgggtgattgttgattgacctttgcataccctggaaagccagggtgtgagtggggtggttgggagtggtgccagttgaacagcagattctgcttcttgtcactgtttcaaaagcgtcaactctgtgttcctagtttcgatgaactccccattcatttttaacacacttcccagataaggcaatgtgctggacaggcacacggcatggccctcggctagagcagggtctgtgatggcctcacctggcagccctctggcctagttcccaccacacatgaggtggtggaatggcctgaaggt

SEQ ID NO: 128531 - DNA, 1132 bp, Homo sapiens
gaacagacctgtttttttcctttttaaatgcagtaaggtggcctgtttatcactggctctgtgatacatgacattctttgggaatttggtggccactgcttcagtcacctctgtttttctgaaggctgttccagcagggctgccctgttcatcagcggatgttcactctggcctgccgttccccgtggcatgcggggtgagggtggctttcttccagccccaaatgagacgagtctgtgtcatcattgaaactgcttttcgtaattgcgggtaggttcctgtaggtgagacatattctccataaagctactgtagtagaattcattctgggcaaacactgaaaaaagtgccttacagtatttctgctcatgaaagagtttcactattttggatatattctaaagtggacctgagctatttgagcaaataatgatagggcatactcagacattttagctaccttttatacctacgatttcatgtcacatttactaatagaattaagggaaatagaagcccgttctttcttactgcccctggagggagcatggcgctagggctctcagcctcctagaaggaagggactaaggagacgggcacagacttgcgtcatctcgtttccacagttgacgttttatattactttctcaaattaagttaccaaaacaaactgaagagctgaagcaggtcttccagaccctgcgatcctttctgtagcagtgattctaaagtggcgtttgctgtgtgcttgagagtaacactgcacgctgcaggggctgttgcagcagtcagtcccaggaagccacagcgcttgtaggatctgctaggaccctgcagctgtgctgccgccacctctgctccagagtgtcccagccaaccctcggaagatgggattgccagtcagccctgcctcaccatgcctgcaggaggctgtccagggagcaggtctgtgtgcccatcagcaggttcccatggctgtcactgcccactcatttccacagttagatacggatgtgttgatgtatttcgtctagtttatttggctcagtccacagctgcgttggagtggtgactttggtagcccttgagctctaattaagagagatccaaaccactcagtacccactgggca

SEQ ID NO: 128532 - DNA, 1080 bp, Homo sapiens
ggccacgtttgttaaatccttatactgatattcttctaaagagtaaatctcatcatttttccagacaaattttgaggggtttctctgttttgtggacaggcagcagcctccgtaggcacccgcaccctgccttgctggaggagatgggatggggcgggaggtggcttcaccataactatttttaatatgggtcattcttagcatgatttgtaaaggtctcaggcaaacagttgttgaagcttgcttctgtggcatttctgaattgtggcagagcttagatcctgcacccaggggtctttttttcaaacagcatcttgctcagttctgtgaacagaaggctttgttactgaaggaggtggaagaggagtttagggtgaaaaggaggaagggatggacagacccaggtgaggagaggcctggggattggggaagctgtcatctcagtgttaataatcaacttgcttctaacacactggcttatcaggggaggtcatccagtccggtcggtggagttgagagcccttgggccagggtgtttggcggcacaggggcatccgctggatggcctggaggagtgggggaggggaacgtcttcactgggtggtgatcagctgggacagttcaggtagggcaggtgagggacccccgaggccctggagccttgtcctgggatgggtttgaagaactcatcactcatcacttgttttcttttggcttttgttgtttttgttttgttctgtttgttttgttttgtatttctttgttattttattgggaaggtaagcggaatgtgctcatagaccatcagacgcttgtcgaaggcaggtcctagtcatgtaattgcacaggacaaggaggtcagcgtgtgtgatggcagcatgctgtgccggcacatcgtggagtcctagaaactctctagtccctgcggctgttcccctcctctgctctctccctggagaggactgccagctcttaagaaacattcctggtgcggtgtctgcagtgccctttgtgggtgacttcaggcttcccgctttcgtggtgctcttcctgggattcgtttttttattaccctccctc

SEQ ID NO: 128533 - DNA, 1162 bp, Homo sapiens
tttcagttaactttttcagctatttttaaagtttgtgaatggagtgttattttggacattcttaaatatgaattctccaaaggcatttagccttgacttaatattaaatcctaaggattttatgtaaggtttttttgcaacctatttaattttttttaaatgcctaacttctgaggtgcataagcccgtggtttgtgtactggaactaaagcggaactcactgattcatattggatccccaggtataccttctgctggtagcatatggctggaaaaggccgtttgcctcacacattgtaacctgccttggctagaaaatgcttttaatgtctcaactctctcttttctgtgtcatgttttggtaggaaatctttaagattggcggacggaacaggtattttagtgagacacttctgagtacttgctttttcctttgacttctaaccaactaaaagagaaggaggtcttcatgttgatattttgcttggttttattttactgattttaaaaggtatatagaaaaatgtaggcctttaaaaagaaacagcatgtagttttttattttaatatgttccatagagtggataggcagacaggtactattgtaatgtattctgtatttaataatttaatatactctagaaagtagacctcatgcattcttttagcatgattttcttttaaactgcttttcattttaagggcacccgtggcggaagctggttttgcaaggactgtgtaagctgtatgcgttctagctgtatgcgttctgtagtcttttcttaggtgggtaacattttcaataacgcgcgcacagcacacaggggtgccctgagccgaaggagcaaaaaaagccaccgctcgtttctataatccagctttgcttttcacaggcgtgggatccaggatggtgtcctctgtgaggacttgaactctggggctttaattccactgtttaattttcaggtaccacagcagcaaagcacagagtgtgacctttttcatgtctgagctgattctgtttgctccacgtgcctgcttcttgctactgttcatttagtaatgggatcacctcaccatgccatgctctgggctctccctctctgtccatttctgttttgctttcctggctaaacccatctaccattcttaacactggtag

SEQ ID NO: 128534 - DNA, 1116 bp, Homo sapiens
tttgattggagagagtaactttttaattctgttgttttgcagtttggctctgtaggagtgagtggcgattcaaagatgccggcgtcccgcagtgtgcggttcgtgcccttaaccacccgcttctttgtttcccgcccctctgctttcgcaggagctcttgtgcttgagttcagtgttagtggtagcgtggctcactccacttggaggtggcggccgtctgaccgtgtgttactgctttgccgacggggcctcccggccctgatgcgtgtacactctgcgggctgcaccgggtggctctggttgggggcgaagctgtgttgactgggagagcgttggaaattgagacatggagagatgacgggagtgcgtttctctgggtttgatctccatcctgttttctcccagacacaccacacctaccttgggggaatgccgttgcctgttccacccctttgttcacttcgcgttaactgctgtggtaactttttcaggatctgtgtgaagaatggtaatgacgtagttgaaaggaaaatgtactgttgtgtgtttcatttgtgtgatttcgtaccaaaaaaatgtgtttgaactatattgtatgtaatttggaagtcgtgttaataaaaccctgcagtttccactctggttccgtagccttcattttgtctgggcgctcaggtcgggccacagctcatcttacctgtgtgtccgagacggtgcttccgcacctctgtaaggggccggggtcgggggctgccctcacgctccccagattggccgctgggttgcagcccgcggctttcacgcagctctctcattagtgggccacgaaggtcaagggcagccgccgcctccttgcctgcattctgggcgctgcatgactccgaactgaccaggcagacggcatcaaagtatgctccttttggttgggggtgggggagttagtctttttaattttttaaagcattatagataatttttacaagttttcttcagaagagacttgtattccagcatggcaataagagactgaaggtggggaagctcagtctccagtgacgccgttcttccaaggtggcgtgttcttgccgtgtgcaggcctcgctggaggttgggatc

SEQ ID NO: 128535 - DNA, 1144 bp, Homo sapiens
caggaagttgcctgggaggaggcaggaaacactgactaggcagatgcagacggggttacctgggattcagattgtgggggttcccctggaattctggggtcaccctcagataaggatgcgacagaaagcagttgaatccactgtgtgtgtttgtgggggcactgacttgcttcctggatgtttaccctgctgctgctggtgggacatgggatttaaagagggggaactggcacagatgacgatggtggcatcccccaagaagctgcgccaagtggaggccgaggggcaatttcaaggtgacttctgcagagggcggggctgacctctaacctcctccagtctggaaggatgctctgcttggagtctggttgtcgccatggagggacagcttctatccagggccctaactgtagcgtgggttggggggactctttcgagagggtggggcgaggacgctggccccactgctgcggcgctttaaggggacgtgacaaattgcgcaacaggaaaagtcctgtgtatctggcagcaataaaacccagtaatatggttgtagagttcaacatgcaacaactgggggtggggtagggctgggggccgccctggtaacaggtcagtgcctgcatgtttgtgggcctgccagcagttaaaaaaaaaagtcggaagggcagagtttgagtgaggtcatcttgaggattgaacgcgttttacatgaaaatcaatcagtaaaccagggtcagtgtagagctatgatgtgaggcccgttgcgcgcaggcgcacaccaccaacacgcacagggacccccatgcaagccccccaccccaccgcagctccctcccctggggctgtgccgaagaagctttaaacagcttcccaggagggcagccagggagagggcggcagggtgaggatgacctggcccccagctctgtgagctgcgccacttgggcaggcatggaggaccccgggcagggagacccgggtccagccgggccgcgacgggaggtggctgcgcgagtgaggggcggaggccgagggttgctggagttggcgcccccgccccttgcgccctcctccggcccgggctccgcgcggcctcggctggcggcctctcctccgcccgcgctgggcgggattgtcgcag

SEQ ID NO: 128536 - DNA, 1009 bp, Homo sapiens
aagactgaaaagcactggagtgcagaatcgagatggctggtgggtgggagtggagaatcagccactgacagagagtcaggggagctgacgctgacgtacctttaactttggagtgcgtcatgtgattgatttctcctagtaatttgtgatttcagtttttttaggttaaaaataaaatgaatttgcaacagtttaacgttcaccaacagtgagaatggagatgccacttagaaatgtagctgctggtttcacatgttattcccagacttaaaaactgttgttccccagatcattaagaatttgccatattcaatcttattaattgccacacattttgctttgtaagatttccagtttctaaaattcaaacctcagagttgcatacacatagaagtatggaaggggtgatgaggtgaacgcatgtgaacagactcaggggtggcttcccatactacgcagaaaaacctggcatgcctggaatttcactacattacaaagctagtctctcactcagaggggccttgataaagtcattgttcattctggctttggaatttatttttaatggccgtattactaggaaacctatagacaccgatgaatctgaagctggtccttatttagtacacatttttagttctgaagaacttttggaaatataaaggacaaatgtaaggagaaaatgaagcctgagttgagaacctgagacccacagttatgtttttattttaaatatcttaatctgatttctagaagcttaacaagcctcattttacttataatcttacgttaaaatttttataggtacttaaaggaaagcagttcaattttctcttttttactgaaacatatgtttgtttcttggtgaaaacaatacaattctgtttctatcattggaaaaatgacattttcacatgttatgcccagattaaactagataaacttgttaatagtatactattatgctagatgaaaagagtcttttctaaaggcatctgaggatgatgat

SEQ ID NO: 128537 - DNA, 1084 bp, Homo sapiens
ccttcctttcctgtgtgaatcttatggtctggccaaacttgttgactcagttcagtgaatcactgttagatttttctgtttccttgactgcacatgaatgactggtgggatccatgtgtcccaggtacctgggctggaggtgacctctcttctctgagctctcacagggcgctgctgctcctttcattccacacacgtcagctgcccagtgttaactttttcctgtgtgcactgcttatctccttgaatgagtgccttagattcagggaagcaccaattcatctttgtaaggcccttagcattcaagaaattttgactttaggtttgcaacagatgagaaatgagagcaaatatatgcctcaaatgtacatattccaaaggagtgcagtagaaatcctttttgggggaactaagaaaaaacactgcctacctaaaatgattttcaagttactttcagcgtcaaaattcagtaaaacgtcaactttagcttataatcataacattgacattagcttattaataaatatactgaaagtccttccatagacatttatgacaaatttaaacagtgaactgggatgaatattcttacagctttgagtattcagaagttagcaagggtggtacttttagaagtcaaatcaacatttattaactattgtagttaattcaaagtactatcctatgggcagctactattagatatttttaattgtcagattcttccgtgtgcagctttctttattcctttatttactccctcgctttttatgtgggttagatgaccttagtaactgaaagggcaagaactgtcaaaaacaaatgacaactgacttctagtttttaaacaagtggttgatattatgaattttacagaaacagacaaaatacctaaacattttcaattttacaaagaatgaatgtcttagtgtaatttttccttttaagcctcacatatcagatacttgataaactaaataagagtttgagttattgatatgtaaaacaattactggtcatttacaagtaacaagctggctaaacatttaaaaaaaatatactaacaaaagcacccaggtgaact

SEQ ID NO: 128538 - DNA, 1036 bp, Homo sapiens
atgacaggacaaggggtgagctgagggtggtcggtgggaaccacggcaaggcctgtgtgctgtctcctcccggctccctccgtctttggagacgagggtgcctctcacaggagggtcctgtgacccactttaggggtggggagaggtcagacggtccctcctgcagctgtcatttctcaaattcctttgggaaggaatgttttttccttaaaatattcagtatgccaaggtgccgtattttggggtagtgtgttctggactccatcagataggggttcttgtggtcatctgtccagattatctggatttatagttaagtaaaatagacatatatctatttccctaaaaagtattattcgaagacagagacgaggaaggttaccaaaatagatggtcaggctcgagagcgcttccctgcaacctccaccgagctcaggtgtgagcttacccgcccccgcctcctcctcagttcacagaaatcagccaccgcatcctgtgctcatacaacaccaacattgaagagctctttgcagaaatcgatcagtgcttggccataaatcgaagtgttcttcagcagttggaagaaaaatgtggccatgagatcacagaagaggaatgggagaaaatccaagtgcaggtaggtttggctggcagcctggcaaccagcagactcagctgcagctgcagaggctgtggggagtggcatgtggggggaggtcgaggactcactttggggagcctaggagtgtcaggcccggggtgcagccgtggaggctgtgggggtggcatgtcgggggaggtcgaggactcactttgggaagcctaggagtgtcagtcccggggtaaccgctgccctagctgcccctgcacctgtggtaggactttcctcatgggctttagggtgacggcaaaggtcccttcagtttgaaattctggaagttcctgttggatgttgcttatcacaggtgggttactaaccctttccacagttcccaggagtaacagagtatatgtgtgtgtatatatatatgtatat

SEQ ID NO: 128539 - DNA, 1341 bp, Homo sapiens
tgggttataagaaattgatctaccaataactgcacaacagagaaagaaaatatccatttcttaattcaacattcatcagaataattactgccctctataaaactgaaatggaattaaactataaatacccttaagttttagccatgataatatttaagatggaaaaaacaaaagaacaaataaaccccacatataaatgcttataaaccaaatatgaaatcactttttgtacaacttttaatttctaagacatttaaaaagtcacactaaaagtatctcatagaaacaaagactaacaatttgtaaacaaaacaatctgtaaacaaaaatcaattactagtgtgtccaaatgttatttttaaaagttaacattataccagttttttcaagtttaaaaagtcggtgctgcatctatgttcacattaaaaaaaaaaacttgtaagaattctgcctttatgcattaaataacgtgctaccaacaaaactagcacataagagcctgtaaatgatgaaaacctgtgtccctggcagacgaggtcatcactgaggctgcagggagggccatgggcacccagcagatggggaggccgcactgccgctgagagcaggtacacgtgcgcctttaacacatctgagagcaaaacgcgagaggctccgtccatctctactaaccagcaccttagtgcagcaatttaaggagctaacattagtgtgtatgtgtgtacaaatttcatgtaaagcctcatatttagaggtctatttttacagagaatgtacataaagctacgtaaatagtaaatctaagaagtatcttggaaaatcagtaaaaattaatacaaatgttataatctgaaaacttataattgtaaaataatttatttaagtattgcagaaccaattaataagaatctgcaagttttccccaagaaactctggaaccatagtgcctaatgccctttaaaatcgatactaaaggagagagaataaaaggactgcttgatgtgacagtcactggtgcatccctatccagtcagaaacaaaactgtagctccagaattgacctgatgatgagcatctgcagctctgccttccagggtctatctcctctctttcactggcgtgcaggaactgcagtaaaatgaggacccccagagcgactgtccttaccaggactcagaacgtttggcctccgtattctggcatccatttctggagttcgtcatataaagcagcctccgacctagctccaatggaagcacctgcatttggagtcagtctctccagaggcagatgcttgggcatgtgctcaggaagagcctcgaggaaccgtgattacgcagc

SEQ ID NO: 128540 - DNA, 3478 bp, Homo sapiens
tgcattttaaaatgcaagtgggaacgtatctgtctcgggttaggttccctgagaagcacacttcagatgggaatctgcttgccaggaagaggtttattagccgggttgggacaacggaagaggaaggggctgtgcagagggaggaactgtgccgtgatgcagtcacactggaagcctccgctggccctcggggatgttgtgacttcgatggcccttcagagctccactgaactgagaagaagggacaggctcttaggaccctcacgtgctgtcctggaaggggcaggacttccgccttgcagcagtcttcagcttaggccatccccaaagggaggttgccagtagggagaagaaatcattcattcctcaaggggatctggccagcacctcacagctttccaaataacacttagctttgtaaatctcctcttctccctaccctaaccctttcccagccactcagcaatatatcatttctcaccattttcttaatttttttgcagggcttcataaacttcacttaccaaatacttcaagggattcagaaacagccaagccttctgtaaatgggcatcagaaagcactgtgagacgcacagacggcgtcttctgccaccaagagacccgagaactccagattcacgacattcctgtcccatgtagaagcatttccattcaaccgtggcccctcttcagaacctagacctatcagtgccatttttttttcataatctacgaagaacttggctatggctgatcttttttaaatttaactttctgatggaccctgtagtttccagttaagtgcagattccttacagacatatagaacagcgcattcttctgtagacatttgctcatgttggtaaatacaatcacccatatgaaaaaattgttttcacctgatatgaaaatgttagaaaaggcaaactccgggacttctaaagatttacttaaatcccattatgtactttattcagaatgtagaagctgacttgaaaggcatccttggtactaagtgaagcttattcagaaaatgcatttttcaaatgcaatggcaactgcttgtagatatcatttttgcagtgtatgttggagctgtaatggttgcaattatgtttcttatttccttaaaagcaaaaagcgtagtttctgatttatgttatagaatgatactgattagactttgagccaaggggaaaatactaaattcttttaaacctggagccttagagagccacaggaatatcttctgttgtacagtctaataagctgtggtaggaagtatcatgtaatcacagtttaatgacagtttatgtatatatataattcagtattccctctgataacatagttgccagtgtttaatacacttgtaacttggatttttaccttataggctatatgtatactcagttttttaaagcatttttttcagagatcacttaattccccatgcttctgcaatgcatataaaaactataaatgccgagtggtagaaactcctctttcttcatagtcctcaggctttggttacatttgcatatgccatttgaagcctccagcttttaccagtttaacatccaaagttcacagcatcagcattcatggtgtaagaacagttttgcagtataacacgatctgataatcattcagttattaaattgtaaataattattgggatggtttcttggctttaagtccactgaataaaaactatgaaattgcactctgtgtcaaccatccactaggatagaataccgaaatctgtgcatgcaaaaataggagatgggcccatttgcacacaattcgtagttatgcagtctgctatataaatatgttcacatgcactgtgtgtatgaaaatagatggtctgtgttcagacaaaagtaaaacatttttttcaaattgttacatttaaaggttttctgggagaaatttatgaaacgcaggctgtgtctatttgacatcagaaatttccactttaaaccaaaataataagaaactttaatctgtatatttacaacctttgttgagtacacttcccccttatttatacgtctgcatttccttccgagcttcacatctttctaaaatgcagcttggttttaaaataaaagaacattcattttgtgattctaaacaagcttcagtaaataccaccagtatagtactggtgaatttctcagcataaaatcgacatacctaaaaagttaataaaattcagctcttttccaatttcattgttatgcctattgaagtattaattgccaggtttgatttttagtgaagcttggagtccatactttgagcagaccaagtgaagggaagaacagaaagaaactcaggagtagagtaatatcacttctcacttacaccactttcaggcacatccaaagagttcctagatacttggaaaatgtctgaaaatttttaagtaaaatactaaacttttcagtgtttagctcaactttttgttcatttggaagtttctctccatccgaggacttaagccagttttggatttgtaagccctgagtacaatacacttcctggaggcatcctcactgctgttgaagcaaaggatatgcatggggtggaaggacggcttcgaacctgggactcatatgccttgagaacaaatagattgttacagccttgggctgctgcgtaatcacggttcctcgaggctcttcctgagcacatgcccaagcatctgcctctggagagactgactccaaatgcaggtgcttccattggagctaggtcggaggctgctttatatgacgaactccagaaatggatgccagaatacggaggccaaacgttctgagtcctggtaaggacagtcgctctgggggtcctcattttactgcagttcctgcacgccagtgaaagagaggagatagaccctggaaggcagagctgcagatgctcatcatcaggtcaattctggagctacagttttgtttctgactggatagggatgcaccagtgactgtcacatcaagcagtccttttattctctctcctttagtatcgattttaaagggcattaggcactatggttccagagtttcttggggaaaacttgcagattcttattaattggttctgcaatacttaaataaattattttacaattataagttttcagattataacatttgtattaatttttactgattttccaagatacttcttagatttactatttacgtagctttatgtacattctctgtaaaaatagacctctaaatatgaggctttacatgaaatttgtacacacatacacactaatgttagctccttaaattgctgcactaaggtgctggttagtagagatggacggagcctctcgcgttttgctctcagatgtgttaaaggcgcacgtgtacctgctctcagcggcagtgcggcctccccatctgctgggtgcccatggccctccctgcagcctcagtgatgacctcgtctgc

SEQ ID NO: 128541 - DNA, 1045 bp, Homo sapiens
agaatgtaggttctataagaacaggaactttgtttcacccctataatcccagtgcccagaataatgtcttatacacacttaatatgtataatataaatgaataaataaggtaatttccttccattaaaaattgttaatctgagtttaatgcttataggcttgtagggtaaaaagacaaagcaggaaatacagtaggatgatctaatatatgcattgaagttacttaaattcacctatacacatttgtaaaagtatttttacttaaaaatagtttaaatagtcattctattaaatgagcacatggccaggtccagtatttactggaaaaaaatacatgaatggtaggatttttctgaccactgacagataaataaatcacatcattcaggtgtcggtcaagagacagataatgggaatgtcaacattcttcaaggaaaaaaggatagagcatttgggggccatataaaatttaaactacaaagaattagaataagtaataacaatcgtctataaaattgtataaataaaattatgtaccttgtattttaagggtgatttaaggatttttatgggtgatctcaagaataactttgactatactcaattttacattatcagttgacctttgagctgaactctaatcctccctccaatgcaatggcataatctactacagatagcctctacaaaagcagcttagagagacaacagaaaaaccaaatacaaacattgtcataaaaacaggagatctcaaaagtagctcttctgtagccacttctacccaggacaaatgtgtttgaaattaaaagacagtaatataccaaaatatttttttaaggtagataattaatgaaaacatacaataaaatagcttttttaaaaaggttaaaatgcagacaccagaagagtacacagcatatgtcacacatggttatgagatgatgacaacaatcttggctacagtttctcagctattcatattaataaaactttactttgttaaaaggaatacatatctaattataagttttatttttcaaataca

SEQ ID NO: 128542 - DNA, 2005 bp, Homo sapiens
ggtaagtttcagtgagaaattttcacttaaagatccatgtttttaaaaactgtctttactgaacttatttaacatttactcataaagattacctttgaaatacagtgtttcttcctacattattttacacttttacttctatactttatgtataggggcataccaagacaaatacttttatcaaataatgactacttattttttaaacacttaaaagcattctttctccaaacaacgggctggtttttgttgtattttgtttttactgacacatctataagttaggctttcgagtcctctagtgaggaaactgcattaaactaatttttctatttaaaagcttttgagcgtttataatttagtatggtttaaaaaattgaaaatttgtaaattattttaagctgctttgtgtccacaaaatagaggtgaacgcagtgtaatctctgagaacacactctgattcaaaggacacccttgagagttcctacttgcctgtcattcatttctgtcattttcttattgtttcagtttacggagaatttgataatcttttaaaagaaaaacagatttttgctttgtcattgaaatagttgagtaagtcttcccttagttgtcttttataaaatgctattgtagaccatattctgagttcttcactaaatattatttcagacaaaagtttccattaagcatttctatctaattctctagacttaggttttgacttaagagtgcacacgaatgattggaaaattttgatcattaaattttagctacttgctcataacaaaaattgctggtaactttgagttgcttttgcattagctctcatattgcctccattatttattgaagacttacagataccagggatgcaggctgtgcaaagaaagtagaagctttgtagttatcttcataattcttacaaaggatttcatgtttgtaatagaaaacaaaaagtataaatgtaaagggaccactgttccataagctaataaaaaactggtgtgtgtaatagtcttatttcttttgtgtttgctttataggacttgtaattgttttgacatctgcttatgtgaatcttgaaaatgccaaaagtatgctctttagcaacctgatttgatgttaaatgttatcatttatattatgacagtctattaaataatttctgttatatttcagccaacctatcattttaatacttaggaaactcattcactgtactattatttaagattgattgctaatcattaatatataccgattttatggaagaaaattacatgctgagtatagttttaacacaaagaaaacaaactaatggtaaaatttactttttgaaggccaacaaattaaattccagagtagtttgccatagagataaataaaaagaaaaaaaagaaagatggaacaattaaaatgcagctaacaaatgcctggacccagctgtccaaacaggattaatggagtgcattagggtacagtgagtcatgtggtgctttgcaaaatatcaacacgcactgcattacatgttatgcccagtggcattgaatagatgaaaagaaataaatacgttaaacagattcatagaggcttttcacagtattaaaaaagcaaatttctagactaaaagaaaaagctttattttagcattatgggaaatgcaaactagagagttactttgtaattcctctattaaccctttagaattgagtctttgattttaagaagataaaatatagggaattgtcatgaatattatcctagtgtataacaggattttgatttaccagctgaaaagcttataagactagaatagaggatgtatttaagcaatcagattccaagctgtgacatttttcagtctttcttgtcgcctctctcaaggaaaccctgaccttagtgtggtctcctttgctcctgtgaaatcagccagcagcgtcccatcacttacaatggaatgagaaatgcagtaacaagaaaaatcatattttatctctatata

SEQ ID NO: 128543 - DNA, 1103 bp, Homo sapiens
tagttacattatttttcagttctagattttctgtttattttttatagatttaaatttacttgcaaaattttccatttatcacttattttattgaatatgttaatcatttattttaaagcatctttctgataaatccaatacatggatcacctggaggtctgtttccattgtctttttttttccctctttttccatttatttatttatttatgaaatggagtttcgctcttgttgcccaggctggagtgcagtggcctgatctcagtccactgcaacctccacctcatggttcaagtgattctcttgcctcagcctcccgagtaactgggattacaggtgcatgccaccatgcctggctaattttttgtatttttagtagagacggggttttaccatgttggccaggctggtctcaaactcttgacctcgtgattggcctgccttggccttccaagtcctgggattacaggcgtgagccaccgtgcctggcctctttttcccatatctggtaatgtttaattgaatgccagatatttcttatacaaaactatagaaactctgcatggtgttttcttctttttgggaggatgtacttttgcttctggtagacagttacggtagggacgtatcagtctaatccattaggcttgagatcattcaaggccaggcttcagtctttatgacgaccggtccatttccactttgtccttccttcatactaggatatagcttttcattggtcctaattgaaagcctagttcattagttattgactatgacctcattttcttaatgaattttagtttttacctctcaagaaacatgagcctgacagaagctttgcttggcttctcagcctcatagttgcatctttctgttgttcttcttggcctcttagccactggtgtcttgaagggaaagtggcactgtctgccaggttcacttctttgcccttttcttttctgtatgatcatagcctctcaagttttgactgcattggtagccccaaatgccaatgtctgtcctcttggctctgttgagtttgctgaaaggtttgctttagaatcattgccttttacccattgatttctcaccctcttggg

SEQ ID NO: 128544 - DNA, 1038 bp, Homo sapiens
aacttttgacctgcccaaaatcattaataaagactatcttacagtttggggagaggataagtttacatttattcactttttttggttttatatatatacaaaatgacttttcaaaggttcacaggttcaaagatgttgctccattgccttctcacttgcattatttccaacaagtcatctgtcatacttatcttttaatgtgtcttttttctgtatctgcttttaagatgtctttattgttgattttgaacaatttgattgtgatacgcctcagagtagttttcttcatgcttcttagagctaggaggttatagttttcaactaatttggaaattttttgaccattacttctccaaatattttttcttttcccctcatgcttcccttttcagggactccagttacatgtattttaggctatagctgaaggatgttcctttatttttcagtttttttcttgctgtatttcattttgattagcgtctatagctgtgtcttcactttcaccaatcttgtgcatgtctaatctgcctttaatctcatctagtggtttttgctttttttttgtttttctaccatctgcagttttcatctctgggggcctgtttgggcctgttttgtatcttctattatgtctctaacacgttcaatctgtgtcctccctctttgtgaaaatatagaatatagttatgacaacacttacaatgtttttgtctgctacttctaacatttgtgttagttcttgatatgttttgattgattgatttttttacctcataatcactggtattttcgtgcttctttgcatgcctggaaacttttgattagaaaataggtattttgaattttaccttgtcaggtgagattttacccttgttgggtgcctcacttatagtatttctttttgttttgttttgttttgttttttaagacagagtctcactctgtcgcccaggctagagtgcaatggtgcgatctcaactcactgcaacctccgcctccccggctcatgtgatcctcccacttcagcctcctgag

SEQ ID NO: 128545 - DNA, 1052 bp, Homo sapiens
tcactttggtgtggggtaagttactcagaaaagcatccctgtagggctaggactgtgtgatgctgatattataatgaaaagtatatctaagtatgagtattaaaaatgtgaaagtaaccattgaactgccaaattaacatgggcaaaaaggataaactaaagtttcactagctgggaaagaagaaaatgaagaaataaagaacaaatataatgagcagaaattacagagttacataaaaagagaaagagcaccagtcttcctgtcaacttgaggatggcagtacttttagtcccttgatgtcactgttgagctgctggaaaatcctctttgaagtttgctctgtgtctaaacttctcattatatgaaattatttcctcatttttaagctactttgagtttagttttctgattcagtatatagtgtcctaatagatacacccccttttacggatgaaaacactgaggttcagagaggcataaacctaaaaagatgagaagttgagaggagaaaatcacaataaaattttggaatttagaagacctgagaaaatttagcggacttaagtaaccagtttcacagacccaaggaagctaaatcgtaagtcatttgtgcttgatttataaatttataccccagaatccccaaaagtcccaaaaagtggcaccaccagacgaagtagagtgagctacttcataagagaattgattggaaatcctgtttatataatggtttgattgccacatcttttcgctccatccaaggtaccaattttctaaaggtttgtatcatgaagggatgttgaattttatcaaatgcttttcagtatcaaatgaaatgatcatatggtttttgtccttcattccattgatatgatgtatcacattggttgatttgaatatgttgaaccacccttgcatctcggataaatccaacttcatcatgaatgatctttttaatgtgttgttgaattcggtttgctagtattttgttgaggacttttgcatcaatattcatcagagatgttggtctgtagtttgctttctttgatgt

SEQ ID NO: 128546 - DNA, 1710 bp, Homo sapiens
aaatgaggaatgcttaggaataatgaactatagaatgagttaaatatcatatattttatgaaatatatatatagagagagttattctataaaaatgatccaaattggctgggtgcagtggctcacgcctgtaatcccaacactttgggaggctgaggtgggcagatcacctgaggtaaggagttcaagaccagcctggccaacatggtgaaacaccgtctctactaaaaatacaaaaattagctgggcgtggtggcatgcgcatgtaatcccagctactcgggaggctgaggcaggagaatcacttgaacctgggcagcagaggtcgcaatgagccgagatcatgccagtgcactacagcctgggcaacagagcaagactccgcctcaataaagaaaaaaaaatccaaatttgtgtagtagaagatgaatttaatatacccgagctactttctcaactacaacttagataggtgatggtattcccaatagtagcttatataaacataaaagtttaaaaattatcttaacatcttatctagtttagatctagtagcttatatctaaagtagaaaaaagccaaaccattgttttaattgtacctagcattatataatgttcctaaagttgattatttaacaatttctatcttgcagtcattagtaatgaaagcatatttgcattttcacagttttgttggatctcaaaagtctcacattactaggtcaatagccatatttttgtggatatgtcagaagtaaaaagaaactattattttaataattattagcattgcaagtggaatagacatagatacagagttttcgagtatatgggctgactctctcctttgtagatagtaacagtgttagttcatgctgaaatagatacattagagatttgaatgtcctggcttcagttttcaaatgctttctggagtttgcctaatcagcattggctctgtggtgtacagtaagtagtgtttgcttagagagatggaaactgtttgctctgtgaattattaggagatttgggctttaacaacaaagttgtttgcctaagtgattagaaataatttatagtatttgagtgacctcacattctttgtgatagagatcactttggtcaaatttaaagtaataagtataatcaaatttttaaagagcttcttggataatattttctaatcaaacttttttttggttatatggtaaattaaaagttaaatgtaacatcaatctgtttatgttagaggtatctacttccaaatagtactcattatgagactaagtttaggacactgaattgtttagggagataattgtatttcatcaattatttgaagggcttgcagatctaattggaaatttgtatttgtttttaaaaatacattttatattttaagttaaatacttagtacctctccttttatatatgaaggctgtcttatatattaagaaagttgtaaggacagcttagttattgaataaatactggactttgggaaattctgttatcttggaagcaaaatatttttaataccacactagtttttcagcttaagaataaagctgggaaaagttgccttcagctattagttttcctgaatccaaagagacgggtggggcaggatcaaaaatacttacttgatcaaagttattggctctgaagttattcttacctatgtaagaaagatgaaaggtgttgttttt

SEQ ID NO: 128547 - DNA, 1016 bp, Homo sapiens
tcttctttccttttttgcttattacggatcttaattaagcactagatattgtgtagatgaattaagacgctgagtctcgagatcataggctagttgcctgaagaagaagagaaaaaaggacaagaatttgtaagttttcatctagtgcttaactacttgaaaaaaaggaatagagaggaaggagttctgtgtttctgagacaggagggagccccagagcacctgtcgtttggctaagacagcgcctccctcatgtccctgttgtcatggcaggagtagagagatgtccacagagctcactgtgatctcggcaggcggccttccccttccccacagcacacagcctcccctctgccgtctgctttgggactgtcaggactaatgggtacattgtgtccatcactcctctttatcatggtcagcacatggagcccagaacatccaggttccttgcgccctgtgtctctatacatcccatttctgacctgattttccactttcctctagcttctgaaactttctgcttgtgccatttggaactgagaattaactcatgaacaaaacccctgtatcttcaactgccactttcttgctcaaagaaacttggcacacattcctgccacccgctcatgtgatggctcgcttctacccacatccctcatttggctggtcctggagtttgagtaggtgccctcctgttcccttttactactctccagcactttggatctcatgtcatcagaccatgacctagtcctgtcatttgctcacctcccaggccttttctgctcccttctggaggatttttgctcctcgtttctaatccttctctgattctgtgcctttttcgtggtgatttggtgtctgtgtgcatgtccttcccatcactccaggacactccttgcctgtccctgtggttgtctgcctcacccgctcgtgcctgtgacataacccatccaagttcttttgcataatcttacaatcaagcatcctactctccacctaccacttctcctt

SEQ ID NO: 128548 - DNA, 1778 bp, Homo sapiens
gtttttgttaattggtttctgttcttcaaattccgtggagacattttttctccctccagacaggttttgctaaagggttacttcttggttttctattttagatctttttattgtacaatttagaaattatatggcttaataaactaaaataggcaattacaatgtttacatgaggtacagtcagcctctatcttatcgtaagatagactgactatcttaatgtgcagtattttggatttattaaaatatatttacttttttttaatagatctctgggagttctatctaccctatttatattcctgtatatcattgatgggatgtttgttacttctctgtaagtatttttcagacttgatattaagagaaaagtagagttgtccttattctggaaaattcagggaagttttctgatgagatttcttaactatttggattttttttgagttcgccttaactatttttattcaaaataaattttgataaatggaaactttgaaataataagatgcttttattgttctctaaggaaagcttcttctactgggttgtagagtgagacagacggacagacacacacacacacacacacacacactcacactcacacactttcacacactcatatacagtcatacttacatacactgacacacaaaccatgtgcacactcatacacacatgctatagcctcacccccatacctgtcataatgctagattctacttttaaatggaaatggtagaattatgtatgataagtttgtggttttttaaaagtttgttttgttttacttgaagcatcacagcctatctcagggataagtagataaatgtagtttaaaggacttaagactatggttgtcacctttagatattcttgtttgtttctcagtcctattaatacttgaaatttaacctgttctttgctaatttttctttattttaagcaaaagtatttattattattcaactgctagaatcttgaatattattctaagcctttttttgttgtcacatatctttcataactaattacacctatcctgctcacatggcccctctagcttctttattgatgatggtgaagagttctctgacaaaacactgacaatctcagttggagagaagaatgttcttaaaatgataatccttgaatttcccttatttttacagtctagttgtttatctctttctccaagctctataatgtcgctttctgtcttttggtgatcttatttctgcagtgtgtacaccagttggcctttctcgtatgttcacagtgatgggtcagttgctagtgaagccaacagtaagtatttaattataaatcattttgtttattaaataaatgtgtttacatttgattgtctttgatattgtgagctagcatttagaaatagaagaagaatatgttttgtatgtttatcactcaaattgttgttttattaagttttttttttttttttgagacagagtcttgctctgtcgcccaggctggagtgcagtggtgcgatctcggctcactgcaggctccgccccctgggttcacacctttctcctgcctcagcctcccgagtagctgggactacaggcccctgccaccttgcccggctaatttttttgtatttttagtagagacggggtttcactgtgttaggcagggtggtctcaatctcctgacctcgttatctgcccacctcggcctcccaaagtgctgggattacaggcgtgagccaccgcacttggcctattaagttttttgtttaatagaacttt

SEQ ID NO: 128549 - DNA, 1057 bp, Homo sapiens
ggtggcaggagagagaatgagtgccagcgggggacatgccagacgcttataaaaccatcagatctcatgagaactcactcaatatcatgagaacagcatgggggaaaccacccctatgattcagttacctcccactgggtccttcccacgacacatggggattatgggaattacaattcgagatgagatttgggtggggacacaggcaaaccatatcagcatcttaaatagtttgaaagttgtgaagtggaagttcaaaggactcttcagtaaagtagtagtgtgttttgtgactattcacatttcatctcctgtgattaatagctacttactatgagatctcatgtgttaaaatacaagcctaattcattctggttcactggcctcccatgctatgaacacttaaggtgagctgactctcagatttgaggaagtgttttaaacttgccaaatgcagccttgtggtaagtctgcgatattgttgaaggactagtaagaaaaagtcacttcacctcagaggttatcatttagggctaggtatacctctccatgcttttaggacgttttctttcctttctattgaatttgaagaactggggtgccgtgattttaatgcatcctattcctgcaattcagaaactagaaagtaatacttaggacaaaattgaaataagtgtatgttttggaattttataactcatatttttatgttaaatgtggaatgagataacataatttattgagaaatatggatgtatttataattttgttggttgtgttagataattgtaggttagtgcattgcagtacaaaatatcaatatgatgctttaacttataggtgcagattcaatcattgggtgattttttggggagtaaaagcggtttctttttttgtcttatcctgcagtttttaagttttaaaagtctggcctttagtttggtcctgaagtcagaatttgttttacatttaaaacaaagttgtgcataatgattatattattatattcttgtctcatggattaatgaaaattctatataatgtgaagaaaagcatc

SEQ ID NO: 128550 - DNA, 1007 bp, Homo sapiens
tgcgcacaccttgcccattgatagaggaagactgtcagccttagctctgggcagaagaaagtctcccctgcgagctcatctgtaggcgctgacttcccaagagtttgcggctaatattactatagatacctgtattgttggaaaatcctaagccaagaaaatagcattaaagttgattaaaaatgttatgtataatttaatcattttaatcaaatatatattaggtaaattttgattagaaagggtatatatataaagatataattaaggctggttttagaaagttgatttattataatttaagattcataatatatatgtttgacttggtcctacttaaccatgtcacatgctgtttaattttctttaaattaattgtgtgagaaaactcaggacttgataacaaacattatataagcaggcccaaacaaaacctgattttgttttctgctagcttttctacatttttacacttcaactaaactcttagtaatttgatagttggtttcactcttcaagtgttatcattccttcaaagttgggatgaataatatagtctattctattttggctactttgtccttgagttttgcaaagatctaatattttcgtctacctgtagctaattttgtgaggtggttaaaaagagaaaatctaagttattttctctctgtattactattcagttattctagagcaatttatacaataacgttacccttacctatgatttcttaatattcttacctattattaaacgtatttttgaacttcttgactataagcttgtagcactgggaatcactgctaacctttttcttcttttttcccctccctccttccttccttccctccttcccttcccttcctccttcctccttcctccttcctccttctcttcccttcctccttccttcccttcccttccctacctccttcctttcctccctccttccttccttccttccctcccggcctcattccttctttccctccttcacagcctc

SEQ ID NO: 128551 - DNA, 2040 bp, Homo sapiens
atggatcagaatgattattttgaaaatactctattctgataatgctgtgatacttcagcttccttttggaattgttttactgtaaaggtgtggttataaccatgtaaagtgagcatttgaaacatcaaatctgggcgtatgggaactcagaaagaaataggaaagtattattttgaggaaaagagtaaatacatttatttcatttaaaaatcattagaggttataaaaattttgaattgaaaatcatttagttcaggaaatgacattaattttgtcactgttcttaatacagttggatctaggagggcactaaattatggctttatagtatctgttactgttaagtaacagctttttttaaaaacatcactcagtttccatatacactgtaatggtatactttgaattgaaccctatatagtatgttcatctttgcctctcagtattgaaaaatgataaatttctatacttaaaggctagattgtctctttatttgcataacagtggcaaaaaatgtgaactttggaattcagaatacctggacttcaatcttcactcttcttactgactgtgacttagggcatatttcattgtgtccacatttataaaatgagtctaacagtacctgtctaccagggttgctgagggatttagtagcctcacctaaaaggttggtaaagtacccaagacacattttaaatagcagttattattaggtgcttaaatgcaccaactatgttaaagctgatgatgaaacatcaggagaacttgtgtaggattactttttatatctaacagcaaagtgacatgaaaaattacattggtattgacatattcagcttttattttattttttgaaataggatctgttttagaacagtataggttgtaaaaaaataggtatttgtttaatagataactaaacttcaaacccttttatatgatgattaaattactaactaatgtctcataatgtttgatagttcaggcctctgtttaaatgaagaaaagctttggcagagaggaaacagaaagttaccaagtacagattttaaagtaattatactttaaattaaactggctgtaatactactccaatactcatgaaacagttttatagaaatagtcattgttaattagagtatcttttctaaaagtttttggggggaatagaaaactactcacccttggttggaataaactttatttgaaaggaaaattaaatgtcagatttagtgctactagagagcttcttaagtcattaggataccacaggcctgcaggacaagagctcaccagagaggctaggggttgaattgttacaatcttagatttatttggcacttaagctcatatttattcatgtataaaatcatttattcagtgggtcacaatgttgatctttgatctatgaaacgtttgtcaatatataactgaaccttggtacattaatttacagtccatttatttgtcatttagtataccagaaatagaagttgtgtatttatacacatcaaaggcagtaagattgtttgatagtttgacgttaggtaatattttagcctgtgataaatctacttttctttaaaacttaagtcactaacatgatacgacttaaatatttattggtttgcacattttacgttaaagaaaggaaattctcatcgagaaagacaaggttgtattgttctgaagtgactgaattctaaagcaaccgaaacattaaaaaatatgtatgtgaatgtgtcttcttttagggattaaaaataagatcagcaggcaaaaacggaaaaaataaggacacactaacagtagaaaaagttaggattcaatatattgaaatgatcagttttatggaaaacatttattctattcgtagcacagaggaagaagaaattttaagttgttttataatgctagatttatttatttatttatttttagagacagagtcctgctctgtcacccaggctggagtgcaatggcgagatcttggctcgctgcacctccatctcccgggttcaagtgattctcctgcct

SEQ ID NO: 128552 - DNA, 1071 bp, Homo sapiens
tatccctaaatggcatatggccccactctactcccatggattcccctgggcaatcgatgttcaaacagcttcttgcatattgtgccgagatgcggaaattggccactggccatgggcggatgcagagcttgaattgaaaatcaaattaagcagaattctctacttagtttttaattaaaccactatgttaattcaaacaggacatattaggcctggggggttgactatgtccttttaagggccttcaatagctttgcttctctcttcttaccgtggcagcggtgtgtgtttctattttattaggaccatctccttgctattcccttactttataattctgaagtgtaagagcatagaaatggttttgataaagtaaaagtttttttttagtaagcagctaacttttatcttggaatttagacttattattagcagttaaatgtttaccaaatttagattattttgctgtcacctatgtgtattgagctttaggtatgttcataggtatttgaaagtgactccgtttacatcttaatttttcaactgataaaaaggttccatttggtgatttttgttttgttttgcagtaagcctgctttttctgcagtatgtggctcttagggctcagggaacatcttaaggcagccatcactgctgtgcttatcatacctcagattggctgtatgatttatctccctcctccactccagaaaagacctccaggttatctggattaatatcagagatgttttctgattttgtaaggaactctggaggtataacctctggccagtgtttaaatggtagttaggcatatatttgttttatattatatcttaacatcttattttgaataaaaatgtcaggaggaaaaaaaattcagcaacttaatgaaagtgggagaaaatatctccatatgattgttatgtaaaatttatgacagattaattcataaacccaagatttttctgggagtaaatttctattgtacttaactttaatgcctatgtttgatttgaagtcatagcataaaaggtaacataagcaacatcctgaccaattatccaaacc

SEQ ID NO: 128553 - DNA, 1001 bp, Homo sapiens
ttttaatttacatatggtagttttattaatcaggattttgttaattgaaacatcccattctctatataccatactacttgatttaatgagatttaaatttggatctatgctgaaacaaatacagtgctttttgaaaattgtttctgttcaataattgccttttaagtttatattgtgtttatagttttaataaattaatgacgcattttgttagaagataaaggaatattaataccttaaacatttttgcagatgaacaagaagatgaagatgccatcgtcaacaggatttcgtatgtattttaaagttcagttgttctgtttctgattctgaagtcatcaattctcaaaatccaattctaatttttggatagaagtatggaaaatattcacccagcacattacaatagctttatcatattaattttagaaagcacatgtaagcaaatatgtgtggataatccaatctcctattggaatttgcatatttaaggagctgacagattttatcctcaggggattaaatgaggaaatggccttaatttaattgcttggtcataagaaagaagactcttggctgtttgaacagtctgctgagaagactatgatgctcttgaaccgagcagcggacatctcctctggttagctgaacctgcctgctgtgagcaggaacatgggcccagaccgtcctgtaggttccttatgtacaccggtgagatatgatagggaggtcctgtaattttattgaagtatcaaactgaatggaaagcagcgaattcctttctgttagtttttgcttgtttaaatgtgaaattgcacagatgcacctatgtaggaaagttctgtattccaggatttttttattgatacattaaaattcttttgaaatttcaagtttatagaaaaggtggaagtagaacacaaagttttttttactccaactgtttagaagtcgctcatctgatgcttcatttcctcaggatacttttatgtataattcca

SEQ ID NO: 128554 - DNA, 2488 bp, Homo sapiens
tgtaacgagatctcctgttgacccatccttttttgtcggtctggcattccccagatctgatagaaattcaattgaaattaaacaattaacctgattaaaaaatgggcggctgggcacagtggctcacacctgtaatcccagcactttaggaggctgacacaggtggatcacctgtggtcaggagttcgagaccagcctgaccaacatggtgaaaccccgtctctactaaaaatacaaaattagccaggtgtggtggtgtgagcctgtagtcccagccacttgggaggctgaggcaggagaatcacttgaacctgggaggtggaggttgcaatgagccaagatcgcgccattgcactccagtctgaacaacaagagtgaaactctgtccaaaaaaaaaaaaaaaaaaaagcaaaggactagaatagatatttctcaaaagaagacatacagatggccaataggtatatgaaaatgtgttcaacatcactaatcatcagggacatataagtcaaaaccaccatgacctatcacctcacatctgttagggtggctgtaatcaaaaacacaaaagataacaagggttgatgaagatgtggcgagaagggaacccttgtacattgttggtgggaatgcaaattagtatggccgttataaaaaacagtgtggggattcctcaaaaaattaaaaatagagctgccatatgacccagcagtacttctgctgggtatatatccaaaagaaatgaaatcaatgtgttgaagagatacctgccctcccatgttcatgacagcactgttcacaatagtgaagttgttgaatcaacctaagtgtctgccagcagatgagtggatcaagaaaatgtagtgtatatacacaagggaatactattcagctgtaaaaaagaaagaatcttgtcctttgcagcaagatggatgaacctggaagacattaattatgttaagtaaaataagccagacacagaaagacaaatacttcatgatctcacttagatgtgaaatttaaaaatgttgaacttttggaaacagtgagtagaatgatggttgccagggactaggggtgggggcttggagagatgttggtcaaagggtacaaaatttcagttaggtaggaggaataagttcaaaatctattgtataacatgaagactataataaataacaatgtattatattttgaaaatcactaagtagattttaagtgttctcatcacaaaaaattataaatatttgaggtaatgagtatgctaattagcttgattgagccattccacaatgtatcttattttaaaacattttgtacacagtaaatatgtataacttctatttgtcaattaaaaaagcaaaattaggctggttgcagtggcccatgcctgtaatcccagcagtttgggaggctcaagtgggcagatcacttgaggtcaggagttcgagaccagcctggccaacatggtaaaaccccatctttgccaaaaaatacaagaattagccaggcatggtgttgcctacctgtattcccagttactcggcaggctgagatgggagaatcgcttgaatctgggaggcggaggttgcaatgagccaatattgtgccactgtactcctgcctgagcaacagagtgagatcctgtctcagaaaaaaaaaaaaaaaagcaaaattaaaaatacagaatttaatgatatcttaaagaagtcttttcttcaactgccttttattttgatatggggtatatctattgaataattatttcccacctacattgatttgtgattccatttgtatgttaaatttttatatagtggaaaatgtttaatgtatctgtcaatttttggtgctggcacattctttaaatgaattgaagcttttgataatgttttaatatttggttgtgttagtagtttccagttgactttatttttcagagttgtcagtggtgatggtctgattcttcacatttccacatgattttgaaaaacattggatcaagttacggaaagaaaagtctccattgggctttttttttttttcaaatggtattaaatggggctaattgactagttcatataaattaatattttattaacacttttttttttttttttgagatggagtctcactcttgttgcccaggctagagtgcgatggtgtgatcttggttcattgcaacctccgcctcctgcgttgaagagattctcctgcctcagcatctcgagtagctgggattgcaggtgcaccgccaccatgccctgctaatattttttttttttgtattttttagtagagacagggtttcatcatgttggccaggctggtctcaaactcctgacctcagatgatccacccgccttggcctcccaaggtgctggggttacaggtgtgagccaccatgcccagcctatgttttattaaaactttaatgagtaaaatgtccagcattttaactttttagtagtttaaatccttttttcct

SEQ ID NO: 128555 - DNA, 1291 bp, Homo sapiens
cttcttttttctcttgcatcaataatttttctctctactggattattcatataatcatttgtaatgcttttcattttttaaaaaaacacgtcacaatcccttcacattttctttgctcctctttataatcaaactcctggaaagttctgtgtacttgcatttctgtttccaactattcttctttcttaatctgcctcagggttttacctccactactccatcaagataactcttgtcaaggtcaccagtgacctccatggtgctaaatccagctgttaattcccagtcctcatctttcttggcctgtcagcagtgtttgacactgtcgatgattccattttcctaaataaactttcttcatgtggctttcaagacatctagtctcttggtttgcctcctcccttgctgactgctgcttctcagtcagcttttgtgaatccttctgccaagctgatttctaaatatttgagagctctaggtctctattctcagacttctcttctctggctatacttactccctgggatggaaatctcgtctagtctcaggactttaaatatcatctgcagatgattctaaggttttaaaaaatttatggcctggccctttcttctgaatggtacagatttttatccaactgcccatccagcctcttgacctgagtgaattatatgtatgtcagattcaacagtgttaagctatacttatttctccctcaaaactactcctcttctaatctttcctgagtcctgaaatggcaactctgtctttccagtttctcaggcaaagaaccttatatttattctagcaaatcttatcatgtctgctttcaaaacgtgcccagaattccatgtcttctgagcacctccttgcacaggtccgagtggctgctctcggcttcctgcagttctttgttgcctgctctccttgcctctgtcctggcccttttccagtttcttttctttttcttttttttttttttttttttgagaccgagtcttgctcagtcgcccaggctggagtgcagtggcacgatctcggctcattgcaacctctgcctcccaggttcacgccattctcctgcctcagccccccgagtagctaggactacagacgcccgccacgacgcccggctaattttttttttttgtatttttagtagagacggggtttcaccatgttagtcaggatggtctcgatctcctgacctcgtgatccacccgcctcggcctcccaaagtgctgggattacaggagtgagccaccgcgcccggcctccagtttattttctg

SEQ ID NO: 128556 - DNA, 1053 bp, Homo sapiens
gcccttcccttcccgcggggagggctgcggtgcgcgccgcgctctgggaccccaggggcttcctctctgggcgggtgtgcggctcgcgcctcggggtgtggacggcggccccgccagtgcgcgcccccgcgctccgccgccaggccaggtaggcaggtggatgcgcaggcgtcccggagagcctgggtgggcccggcgggtccgggaagggccgggctgcgcggagcccgcccgcctctcgcgtttggacccggccggttaccttgtcccggtcaacacctcctgccctcctggcgcctcacgtttccatccctctttcatctcccccagcccccacgtgggttgagttcgaaaccttaccgtttgggatgagaatattggttatttttgggagtgaggacctcagcaaaagtccattttgctatggaagcaacttcttagggaagcagcttcttttttggcccatgttccatgtgtgctgttggcaggagtcaggaagcggacttgaccttggaaagtctactttgatgtttttatcttttcatgatgctctagaatgtattgtaattgggtttatctgtgttttcataactgttgtaaaatatgtcaattttttatgtttatatttacgcctctcctaagttgtctacgattcagtcacacttggtttgaggtgaaaaaattctgctttagaattatctaatttgtgtactcactgatcttgaaaattgagaatcactttggaagtcatactttgaataaagaggacatataaagtctgagctggtggaatttgagttagtggaatttggtacacatttagttgtaatttttataattgaagctaaaatacacagagataagttcatgtaatcatacatgtacccttcagatcatttcatactaaacacgcctgtgtactcctgaatccaccaggagtttgagactggtcagcctgggcaacatagtgaatccccatctctaccattataaaaaaataaataaataaacacaattttactaggatcccagagactgattcctttccctctt

SEQ ID NO: 128557 - DNA, 1812 bp, Homo sapiens
agacataggtgtgtttttaacatcatttttaacagttttatttttccaaggagtcagaatggctgctggccaaacagtgccccttggttgttgattttaacaagaggaaggtgcccttgcgtccaggctggggcactctggccggctgctctgggttgccgagggatgccttgttggaatgccctgccttgtggcactttgttaatttagaaagtgccagttctgtgtgttgaaggagaaaggaaggtttctaggaataacataatcttttttctgtgtggttctttcaggtcggtgcccactttctggaggcagtggtgaggaagttcgatgccatctataaatacggaagcgaagggaaagagtgtgacaacctgttcaccgtcattgcccatttatacaacttccacgtggtacagtctctcctcatcttcgacattttgaaaaaactgattggaactttcaccgaaaaagatattgaactgatcttgttaatgctgaaaaacgtgggtttttcattgaggaaagatgatgctttatcacttaaggaattgatcactgaagcccagaccaaagccagcggggcaggcagcgagtttcaggaccagaccagggtacgcgtgcgacgcttgatctgcttcctaagtccctaaagctcacaaactggccagaacctaaaaatcagtatctggggtaaatattacacttgctttcctagtgatttctgttttttctgtctcatcctgttttctggctttaatatgtgaatggaccttattcctttaccagaaaaatattttgtgaatttaaaaactgatttatttaacattcatccgttaaaaaatgcttaccgaggaggccacaggacatggggctctagggtcagcctgggttggactttgggctctgccacttgacagcagcataacctgggtcttctgagcctcagtttccccctctgtaaaacagggactgatcacagctcccacattgtgtgccgttcagatgatgagatgtgtggaaccgcgtgttcctgggaagccgtttggggaagaacccgaaaagggttagtttgagagcctggagggggcatcacaagagaaaaaggcagagttcaggtctctggtcccttgttaattactgcagggaattgagggttttatcctagaggcatctgaagggttccagcaggtgaatgacaggttggagttttccttctgatggtcactttgactccaaggcagaaagaggcatgaggtggtcgaagtcaggaggagttttgcaggagctggggagtaggtggtggcaaatgttgggatcgtggcagtgggtgtggacatgggcgtcagaagtgaccagacctcatgtggattgggatgaagggaaggagggctcagggtcacccatcaggggcacaggggaccgtgcaggaggagatgaggatttaggacaggcacctccatttttgaaagactgggttagctgtgaacagagtgggctgaagggatatggggctgctctcgtagagggggtcctgggagccatggaaatgggtggacttgcctggcagcaggtgggctgtgaagaggaccttcaggttaaggagcactgacgtctagctgcaggcaggagggagagctggcaggtgagaaggaaatgaggatggtcccaggagccagggaacactagtgtccccaggaagaattcacgcccgtgtgggatgctgaggaccagcaagaggaggaagggatttgcattttgggctgaattgtgacggcggtcctgactggcttatcctggtccccggagaag

SEQ ID NO: 128558 - DNA, 1783 bp, Homo sapiens
attacaaggccagtggtaggagagaggatgtccagagcaggtcgcggggggccagggtgggagcaggagcgtagtagaggccggggtggccgagtaggtgtggacggtgcggaagggtgaggcgtgtggcgagcagaagggaaaagagatctctggggagtttgggttcccacttgacgttgggggacacatttccattttgaagtattatgtagccctgagtaagcggctgagactagtttagactgtctctacctaaaggctgtcctgactttgtatcgtggcggtggcggccatgtgcatcaggtgtggtagatttcttgccaacttgaatgggccgtttagactgtttgaaatgatggactttccattttttcatttttcttgaagattcggtttatgctagagacgatgttggccctgaagaacaatgacatgcgcaaaattccaggctatgaccccgagcccgtggagaagctgaggaaactgcagagagctttggtgagtcaaggaactttcaattctgttttgctcagagcttccgtgtcggcatgagcctgtcatgaaaatcaagaaatagtcagacctgcacgtcagggtggtgtctggtgagtgagagtgctcagaggcagagtgaacgcggctcggttttcctcaggggctgtcccagtggtctgggcgtgctcgtgcagaatgtccgtgtgtggggaagcccatgttgggcgagcgtcctctttgcctcaccccgggtgctaaacttgggctgcaccattggatcatccgatgctttcagagaaggccaagtccccatccggaccaaggaaattgggatgacgtaggtcctttgactctctctgacatgcagccaggatggagactggggcagcctccctgttggagtgagtctttcagcccctgtcatctcaagtccaaatcattgctgacccaggctcttccaggcatgtgctcacctgccactgagcctgaggcagctctgttactctctcctgttgggacagctttccaaacacagcgtgtttggggtgatggactctcaaacacaaaacactgagtttaccgctagttttggcatttttccaaacaggctaaccgtcccaattgccagtgacccattccagtattcatgcaccagaaatgtcatggtcaaaaacaaaaagccaccggtgatggaaggacggaatatgaaccaattaaaagcatttcattagctcttctctcttcatcaggtccgcaacgccggctcaggttctgagacgcagcttcgcgtctcctgggacagtgtcttgagtgcggagcagacgggtcgctggtggattgtggggtccgcctggagtggggccccgatgatcgacaacagtcaccatacgcacctgcagaagcagcttgtggggacggtagggacacccatgctcaaggctgccaggcagaggcacccccctgtgtggtgtgtggtcctggctttacctggagcagctctcttactgttcttgaatggtcactgaaatgtacaaggtttatctggaggccttacagaaattgctattaatattacattgtgatataattattccatttctgttgtatctttttattggactttaaaagatctaaaagttgaatggcacggggcaggggagcgcatgaggacctgaacgctcacggggcaggagtccgttgctgagacccctcaggctgccccccgggctgtgcattctaggctacaggctatggatttcacattgtggaaattcaagcccatttt

SEQ ID NO: 128559 - DNA, 1656 bp, Homo sapiens
ctagggcagagatatatatggattagtcttctagaagtaaattttatatatatatatatatatatatatatatatatatatatatatatagttttaattaggggatgggtacttttgggaatggaggtaatttatggttcagttctagatactgaatttctgattcataaggtgtatgacccgggaattccacttacactgctgagttgttctcaacggtggctgtggccggccacacctctgccagcagtgtgtaggaattcccaaggcccacatccttgccaacaggtgttcatttcttagctctggaaatagcttcttaaatcgggtagagtgggggaaggggggagattaatttttactctaattaactatattacaaatcattgaaaaagttggctaaatcagtgtaactttatttttctccatgtcctgaccattaggtagttgaattcagtgaattggacaaacccagagtccgttttttacgaaaagtattaagtatcctattaatggaaacagaagttgaagacctcagtttaattttcacaaggtatgtgccccaccctttccgacgagacatggaagagaaatgaagagattgttttcacttgtgttgatttacaaacacaaggttgtactatacgtgtagcttaatcttttcggttttatttttaagctggtatgcattagatctggggaatagaaacttgtctgctagcaaactaacaatgattgttaataataaaatatgttaagaagttcttaattgagaattttatttttaaaagaaactggttatgtctcactatgcgagatacccaggattgagatctaggagaggccagctcagccctgacatgtgtttatacgattcctttccagagtatctgacaacccaaagctgggggtgttacgtgagggtttgaagcttttcatcagccacttcttgctaaagaacgcacaggcccacagaagcgccgacgaagccaacgtgctgagagagaaagctgaccttgcaacgaagtgtctgcaaggaaaagcttccctgagaatgtagtcagggaaggaaggagggcaggtggccctttgactgtaaaatgtccttggtaaacccaaaggcttattctgttgcctgcgtgtgaatgtttggtagagctatatcattgtctgttaatgtattatattttgagattttttttgatctaaggttttattgtttgtatttcaagccattttcaaataactatcttgggggtgagaggagaaggagggagggaaaaggggtcaggcacactggacagggttctctaagcagtgaggctggtgtgtatgattgtcttaaaattttttaatagatatggccgagcgtgatggctcacccctgtaatcccagcactttgtgaggccaaggtgggcggatcacttgaggccaggaatttgaaaccagcctgggcaaaaccctgtctctactaaaaatataaaaattagccaggcatgatggcacatgctggtaatagcagctactgaggtggctgaggcacaagaattgcttggaccctggaggtagaggctgcagtgagccaagattgtaccactgtactccagcctgggctggacagtgagacttttgacagtgagactgtcaaaaaaaaa

SEQ ID NO: 128560 - DNA, 1004 bp, Homo sapiens
gacagggtctctctctctctcgcccaggcagtgcagtggcttgatgttggctcactgcaacctccacccacaccccgcaagttcaagtgatcctcccatctcagcctctcgaatagctgggactaccgatgtgtgccaccacgctcggctaatttttgtatttttttgtagagacagggtttcaccatgttggccaggctggtcttgaactggacctcaggtgatctgcctgcctcagcctcccaaagttacagacgtgaaccactgtgcctggctggaaaatgcacatacctctaaataaaaccgacttagaatatttacttcttaaccatcttttgattaggtttgattaaatgtgcattgccactaaaggaaatttggggtattatgtaaattagcaaactattaaattttcattgagagttgtatattttatgttttgctgtttcagatatggctgtatcagaacttaattaaacacagctctctgtttgtcaagcagttggatggatctgagagacttacatgcttatttcagataaaaagattgatgagcctctgttgcaggtaaaattctattgtaagtcagtaacgtatataatgtattgatcaccttgtctaggggaacaccttttgacttttattttcagagacagtggcttttccatactttttttttttttttttttttgaggtcatggacttctgtatatattacaatttttactgtaggtgattcaggccggcatgaggtataaatgaagacacatattcagtatctttcagatgactttttctttcacggatgcctttgaattatcttgtgaatgatggccatcctggttactggagaatggaaggccagccaaaagaggactcctgatgtgtgagaatgattccattccataggggtctccaccaaaatgcagtttgaaagccccatctttagaatacacctttcatcaggctttttattatttatgtaggaacgcagcataagccac

SEQ ID NO: 128561 - DNA, 1058 bp, Homo sapiens
taggaccagaaatatatcattgttctatttgggggatattgcaggcgtggaaagtctcaaaagcatctttaaggagatgagatgcactgttaaagagattcgtatctgagtttaattaaatgcagcttcttggtacaattcatggattataatacttcttacagtgttttgtaatctttaatttttcgtgttcatttctccactgtccatttttcttgtctgtgaacttagtgccagcataccgtttggcacataacgagaattcttttaaaaactgtctgaatgactgaatgttagttggatgatttccctgtctatctgtaagatgtccctattttcagagataatcttgtactggaatagtttcttaaccattgtcactgagagtaacttggggaaactggtgacattttgccatcctgtaagtgtgtgaatacttttttcatttttacaggttgctgcaaaactgtaatgatgacagtttgaatgttgcacttccaatgagaatgcttgaagtattttcgtctgagaatacttacttgcctgttttacaagatgctagctatgtggtgtcagtgattgaacaaattttgcactacatgattcacaatggtaagtagtaggcaggatcagaactgtggctcagcatcctgatggggagtgagcagaggccagcctgctgctgtgagcctgtgccctcagtctcaatgtcagagcggtactggtgtcccagacgccttgtgctccatccacaggtgcccaccagagtcccagattccaaaatctgtccttggctccacccactctgaaaattcagaaacatgctactctctttgcctttttcttttgcttggaagtgaaccaaaattgacatatgctttcatcagttgtcccgtcatccaagattggtgtctgcagtgcagctgccggtccttcacctgaccaggaagggctcttaccacctcctggtcattctgagtgaatgggaaaggtaatgccaccaatgtatgagttgaacatcactccaagagccttatgaaaaagtaaattttgttaaa

SEQ ID NO: 128562 - DNA, 1033 bp, Homo sapiens
tgaaagttgtggaatttgatctttttaaaaactaataattaaaagtggttcattgtgttagttgacatatatactgttttaagactaagcgtttgagaatttgtatttgttttctaaaattgtaaggaagatatttaagaaatatgcattatttgaaatgtgtcccaatatacgaaatgcttaaaaatcttacacagaaactgccgcttctagcatcttctgtggtacagcagttgtttactttctaacagtcgataaaattttagccttttaaattatagtattaccattatttgtattgttattgcacattctgtgccatgaagctttttaacatttgcaacagaacctttgtcatgttgtcagtctattcagtaagtacattgttagttatgttagtcacttttttaaaaaagtctctgtgtattttttaaaattcttgatgtatttttatctttttagtttcatagcaaaagagctttcaagctttcatatgagtttcactagttatcagtatacactaggttagacttggggtagttacaaagtaggtctaatgataaagtactgagtatgcattgtttggtgatcttcactcaaatacgaagctgtgtaggactgtttcaaaaactagcccatgcagatggattgtttttaatgtgctaccaaatacgcttgtatatgatgagatactcaaaaattgcacctgaaccttcttattctataaaaatggagtaaatgattctgaaagaatatatgatttggatcattcttgatacccagagttatgttcactgcctcccacccagagttcctatcagaagcgtaggctggatattttaagaggttctgaaagttgtttcagtttacgtataagctgcctttaaacagttaacttcttcagttcccagattgtggtctccaaatacatcatctcctctaaaaggagcttaagagtttctggagaaaaggctgattgtagggcgggatgcaggactgccagtgaccctggggctcaggagcctcctaaagc

SEQ ID NO: 128563 - DNA, 1751 bp, Homo sapiens
ggggttgggtgcgggggggtatatagagtctcgctctgtcactaggctggagtgcagtggctccatctcagctcactgcaacctccgcctcccgggttcaagtgattctcctgcctcagcctcctgagtagctgggactacaggtgcacgccaccacacccagctaatttttgtatttttagtagagacggggtttcactatgttggccaggatggtctcaatctcttgacctcgtgatccacccgcctcggcttcccacagtgctgggattacaggcttgagcccctgtgcccagcccaaactgtttttcttactctctcactcaacactgaaaaattctgtgagcagaaatgtggggttttttttcccacacaccaagcaattcttcagtggacaccaactaggtattctacaattcagttcaattctgatgccgtccacccggagataatgtcagatcccatcatctgagggcttagtcctgcaagactacacccacttcagaggccgattacaagtagtaggttgtcacctatacttctgaccaacctgcaaaaatgggggttcctcagcccctccttgggattggtaattgactaagacagttcacagaactcgggaagtcgaggtgtgcgggaatggggagcttccatgccttctccaggcactccacactctcggcacctccctgtgttgagctcattgtgtcttcctgttgagttttatggtgcttcttctccagtgtccctcccacagacagccccttggaagttggtgcgtggggctgaaagttccaaccctctgatcacttggtttttctggtgaaaagccccattctgagtcccctagatggcctcaccataagtcacctcaagtatgatcacaaagggctggctatgaataacaagagactctttatctttcaagaaattacaagagttgtaggtgctttctgacatgaacggggacaaaatctaaatatgtttcctattataacacagttagaattttaaaaataagatctggtcagaaatgcctctctgcgtgtgaggaaaaatggcgtcttcgttttccattttaaaaaataatgtttaactaaaatacgttttaactgattgttttgcaaaggggccctctctgaggaagggctgctggtgtatttgcgggtgctgcagaccttcctctctcagttaccagtctctcctgccagcgcgagctgtcacgactcagccagtgactctgaggaggagagtgaagaagccgacaagccctcaagcccggtaagccccgtgccctgcatctggggggctgcgatgcaggcagccccgtcggatcttctagctttctgtccacccgtagtttcagttacacaagtcagaccctcaagcagcctttgcagagaagccccgtcagccccactaccacagtttctagtgatgggaaagtctctcccaccgctttgttagcacgttcatggaagtgtaaatggagacacatagctttgtgtttggttttttaggcaaaataggatcatactatatgttaacttagttattaggaaatattttctggaagtgaaattgttgggtcaaaaagatcctttttaccctatcctgtgaacaccgggtagtgtcttccattaattcctgctgattttatagaggataaatgttatttacttaaaaattactttcaagttcttatctcttttcttccttactattgagtttacagtatattttcagggaat

SEQ ID NO: 128564 - DNA, 1050 bp, Homo sapiens
aatgcatcactgccctgggctgaggtttactagagaaccgcttccaaaaggtgtttaatgggtgaaggaactttctgtgtaggcttgattttatgagtacagcacctatttcctctaagaaactactctaggaattttatttatggcttaaacatattaggttctagtatttagaaagagcaagtaggcttactctaactgttacagattttaactgctttcaattttgatttttttaaaaaagtatttgaaagatgattagtatattcccaggctgataactcattcacaggccctcactgattaatattagtcccttttattttcagagttaggatttgccatttaatttctgtttaacactgattgtcagggtgtacaaatgaatgtggagacctttgtaccctgacatggaaagatttccgagacagatgcgtacatgaaaaccgggaagacacaggacagtatgtagaagaaccggcttttcctataagaaggatggaaaaaataggaatatatattcatattgcataaagaaacttggaagcatatacaagaaactcatgaaagtgaacactcgtgtctgaatatgccgaggaagctggggctggagcagaagtgctcttctgagtacactatttttatatcacttttaagttttggattaggtgaatgacttaatattttaaaattggttaagtaataaatgaattgccagctccttttctgagaggaaattttagatatattaccattggacgtggaaatttggatttaacatttttaatatccactattttaaaatatgattaaatattcactggctatattttaagggggcaaaaaataaaggctctactgcagtatcagacaactaaaataagaaagtaggctaccaaagatagcctgttagaaaagtgcttggctttcatctggcatacgtggggtttttagtgggtactgtttcagagtttcattgactgcatttgtgaccctacttacatgtagatgaggcctgcggtgcccactcagccccgcggcattcctggc

SEQ ID NO: 128565 - DNA, 1007 bp, Homo sapiens
tgcaacctccacctccaaggttcaagcgattctcctgcctcagcctcctgagcagctgggattacaggcatgcgccaccacacctagcaaatttttgtatttttagtagagacggggtttcaccatgttgaccaggctggtctcgaacccctgacctcaggtggttacccaccttggcctcccaaagtgctaggattacaggcgtgagcacctggcccagaaatttatttttaaaagtttaatagtttgttttattattgcttattgagtgatttagtaaatattctgtcagggttagcttgaaatacaaattttaaaatgtgtattttaaatgtgtatttctgaaaatggtatttcagaaatatgtatacattcacatggaaagatgttaattataatcttagtgacaaactcttagaacctgtaggaagaactcatttttgtttctatgtctacacacaagggtctggatggatttatagcagggtattaactgatgatttctgggtagataagatgccatgtggctaacattcttttgccttgttttgttttaataacattttttaaaaactcaatttctcaactgaagagaaaataagcaaataataccttttcaaattattttgaaagttcgtatttttcgtagcttttttcttactcttttttccgtatgactgttgcgtattcttagcaaataaaactccacaaaggcaagaaaaaacgttaacactcttatcaggcatatggtaaggattttaaatatctcagagatagggtatctattatcattttctaatacagcttcccttttcaacagtatagtctttttcagagtgaattttttttatttttattttattttattttatttttttgagtctgagtcttgttctgtcacccaggctggagtgtaatggtgtgatctcggctcactgcaacctcagcctctcaggttcaggcaattctcctgcctcagcctcctgaatagctgggattacaggcgc

SEQ ID NO: 128566 - DNA, 1041 bp, Homo sapiens
gcttttgtcaagctatctatttaattgaaagaagttaattgaatgaaaatgatcaactaagcttgtattaatattgctaatggaactttcttcttggccatgtttggagaaagatgtcaagctagactttaggaagggcccattaatgcttgcacttaacctgatgggctaattaaggaatgcttattcatcctccaagtccacgagagtctctctccagcccgttctgcctggttttacaacacatttctcttaggagcatgagcattagcagcagcagccgtaactgataatgttttgattgcactgaatacagtcctaatgcatcgttgaatttataatttgggcagattgatgtaatatatgtttgcacaatttattttaattacctatttctgtattcctaagtaaactgggacggtcacatggtaagcctttactatatcctttcttaaagattgacaaatttgcaatttttctatgttaaaaaataagcagtctcacctatttaaaacttataattcttacataagcttttcctggatgtgggtgttaacggtagcatatttgttttcctttcaatatttgattaaaccctggggtctttgttaataaagctttccatgatgtgcaatatcaggtgttgtgtatgatatcagataatttcactgttttatggcatctgttgagagtttcataatttccatgacaggcttatctttagtatgtagaaatctctgaacttaataatgccatataagatattttccaccctggccttattttgttttggttaagcgttaaatgaaaagtttgtacagaatttttttatgcctcaaaatgactccctgccactttattcatcattgaaagttttaagagttagggcaaggccgggtgtggtggctcacgcctataatcccagcactttgggaggccaaggcgggtggatcacgaggtcaggagtttgagaccagcctggccaagatggtgaaaccccatctctactaaagatacaaaaaattagctgggcgtgatgta

SEQ ID NO: 128567 - DNA, 1902 bp, Homo sapiens
tttattgcacttcagaacctggaaattgtatgctaagtatgctttgtattttgctttttaaagaactaactcatctggtttcaggactagatctactgtagaaagaaaaaaaaaaattaactcagttgtttggttttagttaccagattttacatatcacatttaagataaaaaagatacttttattttatgttatgatgcaatttagtctttcagttgcccttcaaaacttggactatatgtacttaattttttggttgcaatactatatctaaatatccgtcatctccatacagaaatgtcacaatttaggattaatagccttgtcatctaatttatatatacatttgtgataatatagctagtgcgtaagaatatttccccaaggtcagttaagcaagattttcttatgatcatcattgccatgaactctcaaacatagcgatcttgtgaaaacagtgcctgttaatttacaatgtttaccttgaacagttgtcaagtgtgatttttataaggagttggtatgtttctaagcagttatctacttgatctttttaatattggggttaagggaaacctgcttacagcatcacctatttttcattcaaatggcacataatagagcatgtgtaacagttgtgtacctttgtggggtttttttgttttttgtttttctttttgagacagggtttcgttctgttgcccaagctggagtacagtggctcgatctcactgcaacctccaccccccaggctcaagtgattctttcacctcggcctcctgagtagctgggactacaggcatgtgccaccacacccggctaatttttgtattttttgtagagatagggtttcaccatgttacccaggctggtcttgaactcctaggctcgagtgatctgcctgcctcggcctcccaaaatgctaggattacaggtgtgagccaccacgcccggcagtgtgtgcatttctgaataaatttattagtacttgaataatgtattagtttctgcatttatttaatgtaacgttttgatctggcgtggaagaacatgagaggaggcacaagagttaacacatcagatggacataatgctattgtatttcagaacttaaaatccactaaaatttgtatattcagctagatacagctagttgttccagtgtttgctatcttacttcatataacttaccacactggttctcaagtcgtaactacctatcagagtcatctgggggagcagttgaaaactcgactggctccacctcagactaattgaattggagtcagtgatggcggcacgcctgtggtgggcttgtcttagtgctccaggtgattctaaaatgcagcaaaggttaagagccacaggcctaaccctgcagataactcactttgagcacatttagtcactttatgtgatttggcatggttgcctctacaaactttccctttttggtgctagatacttgtagagcagttgagtttgtgattctgaaagtgaatgtggaaaaaaggaatgtgttaaggtgtttcgagatcacaaaatggatccagtcaaattttcatgtttatatttttcattaaaacttaggagaaaaatagttgatatgaaggagggaaaaatgttctcagttgaattttaaggtttggtatttgatattctaaataagtattttgggaattggtccgggactagtcatgccatatttagcaaataaaaagacaggtcacctagttaaaattgaattacggataaatcacaattactttaaaaaatgtagttatgtcccatgcaatattgtggacatactttaaagaaagcaatattttggacatacttctactaaaaatgtattatttgatataaataaatataaacatattatttgatgtttattaaac

SEQ ID NO: 128568 - DNA, 1615 bp, Homo sapiens
agataaacatgtcatcggagtttgttgtacgcatccttagatcactcaggtattaagctcggtccccagtagtcatcttctctgccctctccctcctcccaccctcccccttcaagtagatcccagtgtctgttctttccttctttgtgttcatgggttcttatcatgtagctcccgccaaatttgtgtttcaaagcttaatcgccacctccgttgtaacttaaaaattatcatgtacatgtgtttgtgttgttctgcacatatttgttggcagataactgctttgtatacattattgtgatggcaaaaagaagcccttttctgtgagcgggtttggtgtccggctcgacctgggttcctgcaccaccgctgtgtgctcctcctcgagtgaatgtatggctcactgtgcattgtgctgccgagctcacgtgtgtgacgcggatatgttctttcttttcaggttatcaccaatctagtgaaaatgttgaagtccagagacacgaggagaaatttttgtcctccaaaccactggctgtcagaacaagaagatattaaagcagataaggtgttattgaaagatctttttaatatttatcattaaaaaatacattcagcttgtgtctttctggagagaagaattaagcactttaaaattatttattttatgactcatatgactaaatagtaatgataaaccttattactaactcttacgccaacttcttaatggaacatatagcagtatcattgacttaaaatgatattctgagttattaatcctcaattttcctttttaacctgagattatattaaagccttaatgattctttgtgaggttgaaaaatattttgcttttattagtattaatatatgtctagtatttaaaagagatagatcttatacctaatttttgtgattttttttttttgagacggaatcttgctatgtttgcccgtggtggtctcaaactcccagcctgaagtgatcttcctaccttggcctcccaaagtgctgggattacagacgtaagccaccacaccagtcctttatccttgattttctaaaagaacagagacaaatttgaatattactaatacctacatctaaagcagattcagtagtatgatacgttagtaaaaaatttaagtggccaggcgcggtggctcacgcctgtaatcccagcacttggggaagccgacgggcagatcacttaaagccaggagtttgagaccagcctggccaacatggcgaaaccctgtatctctattgaaaatacaaaaatcagccgggcgtggtggcagacgcctgtaatcccagctactcgggaggctaaggcaggagaatcacttgaacctgggagacagaggttgcagtgagctgagactgtgccattgcactccagcctgggtgataagagcgaaattccgtctcaaaaaaagaaagaaaaatgaaagaaaatacaaatattagccgggcatggtaagtgtccccctgtagtcccagctactcaggaggctaaggtatgagaatcccttgtgccctggaggcggaggttgcagtgagccaagatcgtgccactgcactgcagcctgggtgacagagcgagattctgtct

SEQ ID NO: 128569 - DNA, 1164 bp, Homo sapiens
cgcctcagcctgggattacaggcataagctgccatccccagctccttgaaatgagttttaagaggccaagttacgatttattgttggaaaggaatgggatatgtgtttattcatgaaatactgcctggggcctactgtgtatacagccttctcccaggcaccatctcatgcacacacgcctggtctgggaggaactttgttgccatagtaggagggaaagggcacgaaggtggtcgggggtggccagggcaccgcccactgctggatctggctgcattcgggcctcaccgccagtgctagggctagctgtgcacttgagacgtgctagacagctggagtggaagtgtagtccttgattaggacatctttaatattcgatcaagttatgtgttcggggagctactgtgctgatcctgcactgtgcatggctcatgggtctgcctgaggcggggatgtgttcatggaactggatttagataaatgagttaatcaggatgatttcaagaatcttcaccttaagaattgtcagtgggaatgcaggggaaagtacaagtgaactaattaaggttttaaaatgtgttttagtgggtttggagtccccgccgctgtctgtgtctgaggaaagacagcttgctgtcctgacagagttgccttttgtggttccatttgaggaacgagtaaaggtatgcaatttggcttctttattgtcactacgtatcatattagtgttaagaaattaacacacacccaccagagaaatctctaaaggtgcctagtgcctggctgattacataacatacttttctcattaggctgaaatagctaagaatgatttataaaacccaaccagatacctctttttacaaactgaaagtattttcttagttacaactgattgaaagccagtaaacactatagatttcttataatgagggtctaacgtcatttttctctattaaattttgcattatttggccaggtacagtggctcatgcctgtaatcccagcactttgggaggccgaggcaggtggatcgagcccatgagtttaagaccagcctgggaaacatagtgaaaccctgtctctacaaagaatacaaaagttagttgggcgtggtggcatgtacctgtagtcccagctacttgggatgctgaggtaggagga

SEQ ID NO: 128570 - DNA, 1282 bp, Homo sapiens
ccctgtctctactaaaaatacaaaaatttgctgggcatggtatgcgcacttgtaatcccagctgctcgcgaggctgaggcaggagaatcgcttgaacccaggaggcggaggttgcagtgagctgagatcgtgccattcattgcgctccagcctgggcgatagagtgaaactccgtctcgaaaaaaaagaaagaaagatgaggtatatctcctgccccctaggagtttagagttagttacacaagcccctagtggtcccagtgactgaagggactttgtttttcaattccaacttactaattctgaagcacaattattaaatagcgtgttgctattagtatacattcttattttatgtttcttttttgttttttaaattatatggttaatatgatatgaaataattaaaattatctgcttgctcagttaggatggctttaaagcaagacatcatctcttatatagtttttagattaagttataaatgttcactttagagctgcctgaagattgatagagatgcatttgaaaagcattatttttttattgattcttaatgtagtaaattactgaagttatttggcggcaaacagaaatggtctgtgatgtggttcacatttattctgatagagccacaatttgcattaattgcgtcgcgactgcactcacttatattaaaaggcttctactataattaatcctttttatttcaaatcattttggcacaatttctagctataaacattcataaaagacagacagttgaaaaattcgttacaggtcttttccatatacctattgctatttttttcatgacaagtagttattgatatgcttctaggaacaagcgtggtacagctggctgagaaggccagtgtgaaaaatgctaagtggattattttgcataaaaaataggcagtttttgaagttgtataattaacctgtgtttagaaaataccttgatttatgcttacatttgtatctcagttgcatacattatggaaatttaatttataatccatttagctgatgcaatcatagtttttagtgccatcatttattagtgcttgtatattaaatgctctgaaggtttaaacctgcctcatgtaaaaaatggtacctatgcatttacattttatgagtcacagtgggatttctgtttaaaattcaggtagttctgatatatttaactagtttcactggtttattgttactaatgcagaaatggcaaacagtgaccttatatattgaacatcaaatgatttacacttccagtttacttt

SEQ ID NO: 128571 - DNA, 1048 bp, Homo sapiens
caaatcctaataccccatcctgtgggcacggccttgtttggaaatagggtccaatagctgcgaggccttgtttggaaatagggtccaatagctgcgaggcgtgagttcatgtggttttcagtctcgcagtgtgtgatcatttgccgtagccaccttgggagactaacaaacctgcagttcctgaaggattcaccatccttctgttgaggaggagcatttgttggcttctgtctcacaagaaggatctgtctcttcataattccacgatttcgctcctaggtggtctgttccagagttctctgcatgcttagtgcgtgcattgaatgcctgcacgggatcctggagcacagtacctgcccactgaatatcagcttccatcttcggtactatgaggagaaaatacctgctctcttaggattgggtttaatatcaagttgagcatatggctctttgtttgtagaaggcttgtatattcgatgctaacgttgtcactgttctcttttgaaggctctctatgagaacatgctggtggagctgccctttgcaggcttctttctttccaagttgcttggaaccagtgccgacgtggacattcaccacctcgcctccctagaccctgaggtgtataagaatttgctctttctgaagagctacgaagacgatgtggaggagcttgggctgaacttcactgtggtgaacaatgacctgggagaggcgcaggtgaggggtcaggaggaggattcacatacctgtatagcaagtagcagcatctccttgtgtgtggaagtccatttgtgttacagcgtttgacttccgcacattttagttagaatgactgtggctgtgagttagacgtcgaagcatatagctccaaagcaccttagccctggcgtctgagctgagtgcagttcctgctcccacgcatgaagcctgttcctgcccggcagcccctcctgcggagctccactctcgaggctgcggcccaggcttgctgcttgtctggctcttcccggtgctgggggtggccgttcagcagcttcccggcagg

SEQ ID NO: 128572 - DNA, 1054 bp, Homo sapiens
cacctgcagtcccggcgtggtggcgtacacctgcagtcccggcgtggtggcgtacacctgcagtcccatctacgtcgggtgctgaggcaggagaatcactggaggtgggagacggaggtcgtgagatctcagtgagccgagatcatgccactgcactccagcctgggcgacaggagtgaaaccctgtctctaaatagataaatatatacatacacaacgtacatgggcaaaaaaaaccagatgtttaacatagaagatagataaatggccagtaagcaaataagcacacaataacgatgttcagcatcattagtcattatagaaaaatgccacttacatccaaatgagataaccccacatacccactagctgtctactggtgcaagtgagagctttttgaggaaatggaaatgttctaaaactggattgtgctgatggttgcaaaactctaaacttacaaaaaatcatttttacatataacctgtgtgtatccatgcgtatgtatctcttatctgtagtttgcattgtcctacatctgaagtctaatctttatgtaaaagcaaataatgcctaaggtcacgttgtccccatgatcgggtcataagtttaaggaaatgaaatcagtctgacctttcctttgccaagagattgtcttcggttgttttcattacccatctgcactgagggcttgcacctttaataatctcagctatgccagtaaataggtttaaaatattatattcattttggtgccaattaatgcacttaagacattttattggtgttatttctgtagtatattaacaatgagggaacaatatacagcaattattttaggtttagggagcactttactagattaaaagctgtaagtggcagacattacatttcagaatagtggtctcatcatatagtgagattggttgttagccatggtattaatatcagaatgataataagttagaaggaaagatgataaaattaatttagccaccaaatcatgctgggaaaacacccagctgtgttagtactagacacccattgtctgtcatgt

SEQ ID NO: 128573 - DNA, 1078 bp, Homo sapiens
accctccttaagttgctctccccttctcgtactttgcccatcgcctccacataattggcggtgggtggggtgggggcggggggaggcagagaattccgcttttgcatttacaatcggtccttcatatctgtgggttctgtccacatccatggcttcaaccaattgcagattttaaatatttgaggaaaaagcaatggttgtgtctgcactgaatgtgtgctaagcaatatagtgtcacagccatttacacagcctcggcatgagatgggattgtaccagtgctctagagatcatggaagtgcacagcacgtacacaggtgatacacacatgccacgccgttttagagaagggacttgaggatccatggactttagtttccgtgggtgtctggaccaatccctgtgggtcctgaagggtgggtgtgctttgcatttcataaagcatgtgttcattttgccataggaggctattctgcagaccatcctgttattaaggtcttctggagagttgtggaagggttcactgatgaagaaaagcgcaaactgctgaagtttgtaacaagctgctctcgaccccctctcttggggtttaaggtacacaactttcatgacatttgctttaaagaccacttcataataagaaaggcagcagaacattcagtagggttaaatgaagtccttttacatacacttttgtttttatcttcagctagatttttaattaagtactggttatgatgtatatattttggtgctagttttatttggggttgctttttttgtttgttcacaataacctagtcatatgatagttacacattgtggttatgattgcctgtgaacaaaccgtacatttggagggactatttgcaatattaataatgtctcataaatctgtaacacatcttgggctttttgctactgaactgaagcaggtacaacgtagagatgttgatggagtgtatatgctactgagccttattttaccacttctggaaattaatgttgatcttacgtaatttggcttatttttagcaattaaaattgcctcaggcagatggatcatttgaagtcagga

SEQ ID NO: 128574 - DNA, 1036 bp, Homo sapiens
tctcagaaatcctgacctcaggtgatccacccgttgtggcctcccaaaatgctgggattacagtcatgagccactgctcctggtcacgtaatttttaaatataattttagctgtatcttgtgttcagttttctaggctacctttttcactcaacattacatcaggatcatttttcctcatgttattctttgagatatttttaatgggcttgtagtgtcccatcatgtgatttaccagtttactttctgttttttagttgtttacagctcttccttcgttgtgatgctgtgaacctcttgtgcataaattatcatgtgcatctctaattatttcttagagtacagtcccaggagttgtgaatgtgggtgaagcccctgctcctgctgccaggcccacctctcagagagtttcgtgtacacgtgtgcagggaagggctgacctagctaggtctctgaaacccgtgccagatactaaatctgcacaggctgcgacagtgagcagactgagggcgatctgtgccttattgtcttcctgttggaagagaacacataaatcacgtatctcaaatgtgaggcaaatagctaatggtgtttgtgtatacgaggaaggtggagtcaccggttcttcgtggccatcagaggaccgacacgcccataggtctcatgcattaagtctgcgttgagcaatccctaacacggtttttgcctacagatacatttgcacaactgtgaaaaccaggtacgtattcattgcatcattttttgtaaaaagctgagagaagtgcccagcaacacgtcgtgccgcgcgtgtgcatggaacaccatatagcctcaccattaataggcaagatgagcgagacccattatcagatgagaaaagcacggcacggaatactgtgtccaatgtgctcaccgtctcaattttaaacctaaaggagggagaacattttctcatgcgtgcatttcatctctgggagcacttaagacgctgaagcgttggttgccagtgggaatgggaactgggtatctgtgataca

SEQ ID NO: 128575 - DNA, 1053 bp, Homo sapiens
cggtggctcacgcctgtaatcccagcactttgggaggcagaggtgggcagatcacaaagtcaggagttcaagaccatcctggccaacgtggtgaaaccccttatctaggaaaaatccaaaaattagccaggcatggtggcaggcacctgtaatcccagctacttgggagactgaggcaggagaatcgcttgaacctgggaggcagaggttgcagtgagctgagatggcgccattgccctccagcctgggcgacagagctagactccatctcaaagaaaacaaacaacaacaacaaagcaaatgtggtttcgggaaaatgtgactgcaatggtaactttactgattggagcaggcacattttgtgtactttgtattaaaactcatgtaatgccatgcttgttacagtgacatcttgcacacatgctgtttttcaggagttgtatcccgcattttgtattcacaacggaggctccgaccttgagcggctccccacagccagcacctgcatgaacctgctgaagctccccgagttctatgacgagacacttttgcgaagtaaacttctctatgcgattgaatgtgccgctggctttgagctgagctgaagctgatgctggggtcagacccctacagagaaccagtgcttccttcgtcagcagcgcctccccagacccacgaggatactcacactgcacgcctgaggctctcctaagctccttctttcattctgccattcctccctcccttccttttttaaatgatttttattacggtgtggtcacttatttagatggacattgcttttcaaataacttaaaataacacgttatgtgccatgtggctactttagtaatattgccaagaagagcacagtttttacactagtggcatctcagtgaaattaaccaaagatgaagctttggctttgctggtgagatcagagccctcctgagcaggcagcgccactccagggttcagacagggctgcacaggcggcagagatacagggtctgagggctgagacgccatggggccgctgctgcttatgtggtt

SEQ ID NO: 128576 - DNA, 1028 bp, Homo sapiens
ctcttcttcctctttgaaaatttaagttacagcttgaaaaattaaaataataaagggtttaatgtatttttttctttgttatgtatggccttaattaacttgcttttgccctcagaagagacagtggtaagggcatgggtgcgagtgtcttggaaacgttgtttcccattgaacaaccaattggtgtgtgaatttgccacatcatattcctggtaaaatcattaagcaccatagtactgttggcaagacctttcatccgtaaacattgtgtgtgaggactgttgttgagagtttgcggaaaggcacctctagagcaagactgcggaggcctttgctgaggagagaatggttttgttaagggagacagtgctgttatagctgctgtttgattgtaggaaaatggatttctcatcagtggcatctcagtcctgatgcctggtcctaggcgttggtgtatgtcttgggcacagtttgggtcaggcacttttgttagctgtctcctgttagagtcttctcaaccactgggacttcctgagtggtgcactgggtgacctgagaggtcaggattaaacatgtactcctgtagttgtttttgtcttttgacttattgaaagggaaacacattgtatgtttacctccttcattgcctggagcttgggtgaagaaactgaacaccacctgcaactcgaggagggaaagagaagagtagttgtgtctacagataatacaggggagaaacgtggagctcctgcctgccgcaggcacgaagaagcataatcactctcatatctggtaggtcttgggccttttgcatggtgcagttcttcagtgtgtctcaaatggggattcaaagaggttgttcttacaccttattatgggctggctggcttgaagagagcccctttctgagggaggaaggacagtcagtggcctcaagcattttcagggaaactgaagctgagcaggcgatttccgattaggggaccgggagactggcgtgctcatcgtttaagtgcatttgctgtaat

SEQ ID NO: 128577 - DNA, 2798 bp, Homo sapiens
ccccttcttaacattattattaaacaggccgtttctcaacatgattattaaacaggaccttcttaacattattattaaatgggccctttcttaacattatgattaaacaggtcctttcttaacattatgattattattttaattcaaaggggaagggtcccttagtgactgaattgtagctaatttttgttttccttggggaaaataatctgatacaccaagccatagagcaattacttgtaaagaaggtatagagatctaattagatgtgagtgaataagtgagtttttacccctagtccaaggagagaggtgctagtcttactgaagcgctttactgttaaatgctccattttacatgcagacctattttaagaccaggtaccctgtgtttcccatgattagtgtggcagtgatacttgttcattccgttcttataggtgttctagatgacttccattttcaggctctcaggatttacacactggggaagctgctgctccatggctgctatatgtatgtagtcactgagcagcctgctgacggtatgtttaatgtagatgggtgtggatgcagagccagagggatttccgcttattcatgatgtagttcaggggtcaacaccctggtctgtggcctgttacgaactggcctgttgggaacaggaggtgagcggcgcgcaggcaggcaagcattactgcctgagccccacctcctatcagctcagtggcagcattggagtctcataagggcacaaaccctattgtgaactgcacacgcgagggacctaggttgcgcattcctcatcagaatccagtatctgaaaccatccccctaccccaacccatcacccactgtgtggaagaattgtcttccatgaaaccagtccctggtggcaaaaaggttggggaccgctgttgacaaatcatatttactagacctggtgtactttccacgtgacgaaaaagtagtttaaaatgtgctgtaagatatttccgagctgcactttacatttatcagaatgcagaacccctgctgtacttcagacctccctcatgataggtggggaagggtgaaggggtgccggatgttggacacatggtatgcaggtctgtgcctgagcaccaggcagtgctcactgtcacactgtggccaaggagacttgggcctggggcctgcggtgtggaacccgtcctttacagaagaagccctcccaggagaggtcgcggaggcggattctaacaccagcctggaaggaatgctgcctctgaattggaggggtacaatcaaaactgctgaggctaggtgactgtcgaaatttccagaatgtggagcacatgcaaatgagctcttgtcgaaatgttaattggaaaatattaataggcagtggacttatttgaattaggatgctctctttattttattattagaggaccctattgctcagtgaaatgatgttctgagataggaaagaaagggtacctgataatagtgccttttgatcccattagtcacagcaggcattacatctgggaaaagcctgtgggtttaacttcacattttatttatattcttggaaaaccaaagcgaacctttaaggtttccagagaggccttttattttagcagtgcagcaagtttttcctttgtaaagcatcactgtggtacgaatgatgctctgtagcaatagaggaggagtcctgtggtatgtagaaccaaggaaagcagacttcttgcaggaaaaatgagtgcattgaggatagtaacctgactttctgacctgtgattaaattatgatagtagtcagtcattttactctcccagggtttgaggaagtggccggtgaggacttggagcctagtgaggagttagtagagctgcccagggtggaggaggccacagaggacagccctggtgaagagaacagtgaggccttggatgtgttgatatccagcaaggacctggcactgtctagtgaggacgaggcctgcacaggatgtaactggggcctgggcgagcccttcagcgaggagctggggctcatatccagcgaggacggggccagccctggggacgtagaggagctcggcgaggagtgcgaggagccgctgagtgaggaggagcacagcgggccagagctggggcgctgccggcaccaccataaagtgtcaaggagctgcccgagtgggactgacttaaaacagtgtatctagaataaaatggtttcctctagtgccttgatactgtccttggtcagacgacctcagctgccttggagatagaactgaagaagcaagagagggaggtggcagccctgaagcacaggccgggcgtctcgtaggctctttccctagaagccagagcacagaccctgaagacagccttgagtttgatccgtaccacaaaccgggggcttaaactaccaaaatgtaccatctcccagtcctggaggctggccatgtgagacccaggtattgcagggctggttgcttctgaggctgagatgtgtcccgtcttgctccaggcccttccccagctgttcttctccctacatttgcagacggatggcccatccgatgttgacatcatctcctttgtgtctgtctctgtgtccattggatttaatgttttagagacagatttcactgtgttgcttaggctggcctccaaccgctaggctcaagcagtcttccttcctcagcctcccaagtaactgatcacaggcatgagccactgtgcccagccacaagttccccctttttataaggacatcatttatattggcttagtgcccactgta

SEQ ID NO: 128578 - DNA, 1114 bp, Homo sapiens
taggaccattttttttttgtctttaaaattgttgtaaatctctgtatgcactttgcttttttattaaacgtactccaaggtgagtcttgactctttagtgtaggacaagattgtacactaacaccagcatggacctgcttttcattgtgtctgaaatgtgagccacgtagtgtcggcctgctgtgaagttaacattgccaggacgattcttctacagaaataatttcaatttttttcagtatttagtagtgaaagatattaatacattaatggtaatacatttctggtttaatataaattaaggatgttttctagttgtgcatgaatgctggcaacttagtaagttttgacaattgtttaaatatgtaatgttaagcttaggtttaaaaaagtaaagctggtaaactgggtctttgtcatttgctttaaaaaaaaaaaaaaagaaaataaatgcgaatgtgttggtgcattcttcctgagtgggatctggagcttttttgtgtctgtgtatgatttgtgcctgggcttctagtgtcactttaatagcgtttcgtgctgttcattcaggtggatgccgcacctcagttacatgtagacattttcttcagtatatttgaagtatatgaagattttcatattgtaagttgtgatttagcaattgatcaaacatttaattatggtaacatttctacaggagagggaagaaaccattgtataatttttcactcttaaagtatgttctagtttgatgtaagatcacttacggatccgggcgcggtagctcaacgcctgtaatcccagcactttgggaggctgaggcgggtggatcacctgaggtcaggagtttgagaccagcctgaccaagatggtgaaacccctgtctctactaaaaatagaaaaattagctgggtgtggtggcaggcgcctgtaatcccagctactctggaggctgaggcagaagaattgcttgaacccgggaggtggacgttgcagtgagctgagatcgtgccattgcactccagcctgggagacagagcaagccttcatctcaaaaaaaaaaaaaaatcactttgggacagtcaaggtcttttgtttctcagtttgtaatatcttt

SEQ ID NO: 128579 - DNA, 2188 bp, Homo sapiens
actttcctcaataagaaatgggactttctcacgctggatggcacagagctggcaaacatgaggccagtccacaccaaggctttgcctgcagaaaggctgcactgtggccagcgggggaagcggaggagacacctgtggacaccctccccacaggtgggcacacctttgcgcaggcccagtgtgcgttctgaaggagagcccagggtggggttccgggactgaggtgcagccgtgtccagggtgggcttctagctctgccgctgggcggaactggggtaggtcccagggtggggttccaggactgaggtgcagccgtgcccagggtgggcttctagctctgccgctgggcagaactggggtagtcccagggtgggcttttagctctgccgctgggcggaactcgggtaggtgggagtcctcacttctctgcagggtggtgaagctctctgggtagtgtgagcagttctcaacgtgcaccttggaaagcgcccgttttgaggtttagctgtggccaagatagatgacttcattttgttgctttttgttcttaacatggggagatatttagaaaacatgtttggctcttgctggggaagcagtgctgttccgtacagtgttttacaagccgtgtttccttaggattgaaagaaggtggcaagaggaagaagcagaagcagagagaggagtcgaagaagaagaagtcgaccaaaggcaatcactagaccggacttgaggcacgcggtgcacccccagacgctggcgctccaccgtgctcggcatgcggtcgtgcacacgcgctaggtagcagcgtcggtcaggactgtctcgaggccacactcgctcggcaggattatgcgatcacggatcagtcagagcagggtcaggagacggggctgacggcacgggtggcggggacagacgtttgggacttggccgcgactctctgcttctctccagctctcaatctgctgcattttcctctagtgcttccggatcctcttcattcttttcggctactcaaccactccgcatgctgctggaatatttctggctttagaagtacaggagggcgcagatggctaactgagtaacattcatgaaatgaggctttctgtggcggcgtagtgtttggaattagaaggtaattcagtagagtgtaacttagagaatattgcaagtgacacattgaatcctgcccgtcagggcaccttttcctcagagcaatccggccacacgaatagaaggctgtcgtgaatcacatcagatgtaaaatcattccttctgtttactcttttaattttcatcctttgcaggtagtgcaaattcaacttcaaatatggtgtaggttttgctagattccatatttttttcttggatttttgctaattatttttagcaaaaaatttttgctcagtggcactctccctagtgtccatgggttagggccatgctggggaaaacgggccggtatttacacacgcgcaaaacacccagagacggcacaaggaggttgaactcatgtttcagttcgcgaacattgactccttacgaaagtcacttcattctaactagatgcgcccacttccggtcattatttcgtttgcatgatgtattgcttcttcacgttttgtttttattgagcacggagtagaattccagggctgccttgacttcttccctgcatgctccctcccagtgactttccttccctttcacatgaggatctgccgttcatgttgctttctcctttgtcctcttggacttgagggcattgtgaaaagctttgctgtgatttaaaaatgccagcaattttaatctagcagtgttgaagctgggaattttttggcgcaatccatgtagcagtgacccaggcttgggagccagaaacaagtgtgacctgggattttatttaacacaactgttgccaaagagttggctttgtttatttggttttggcggggagaggagtggtatttgatgctttctgtggacaatgtaaccctaaacacatcatgtattttaaatgccacctacataaataaaacataagcatattgaatacagctcgcctgctgtcctttgtaagcgccagtaagttgcaccgttaagactgactagaaataaaagcaattcttcaacattacgattacaaaggatgaaagtggtgttttgcaggcagaagccttgc

SEQ ID NO: 128580 - DNA, 1082 bp, Homo sapiens
actaatacccagaatctacaaggaactcacccagctcaacagcaacaaaaataatctgatttaaaaatgggcaaatttcagcaggtcatggactaaaaaaataaaaaataagaaaaatgggcaaacgatcagagtagatgtttctcagaagaagacctaccagtggccagaaagtatatgagaaaagacccaacatcactcaggaaaatgctaatttaaaaccataatgagataccaccccacatctgctagaatggtttttatcagaaaggcagaagatcacagaggcggggaggtggagaaaagagagccgtgtgcactctcggagggaaaagagggccgtgtgcactgtcggagagaaaagagggccgtgtgcactgtcgcagggaaaagagggccgtgtgcactctcggagggaaaagaaggccgtgtgcactgtggcagggaaaagagggccgtgtgcaccgtctgagggaaaagagggccgtgtgcactgtcgcagggaaaagagggccgtgtgtactgtcggagggaaaagagggccgtgtgcagtgtcgcagggaaaagagggccgtgtgcagtgtcgcagggaaaagagggccgtgtgcagtgtcggaaggaaaagtgggcagtgcgcactgtgggagggaaaagagggccatgtgcactgtcggagggaatgtgagtgaggatgcctgctatggagagcccctggagtttcctgaaaacactaaaaatagagccaccttgggatccagcagtcccactgctgggcatacgccccaaagaaaggaaatccgtatatcgaagatgtatctgcacatccctattcattgcagcactacttacaatggccgagatttggaatcaacctcagtgcccatcaacagacgaacggataagaaaaatgtggtgcgtaggcacagtggatactgttcagccagagaagaaaggaatcctgtcatttcagccgcatggatgagcctggaggaattggggaaatcagccaggtgcaggaagacaaacaccccaggatctcacacatctgtgggagctaaaaaagccgaactcaaggcggtggt

SEQ ID NO: 128581 - DNA, 1064 bp, Homo sapiens
actaacttccattttatgactgactcatattccatggcatggatggaccgcactttgtggattcatttgtgtattaatggacagtgccgttgtttccggctttgggctgttgtgagtaatcctgctgtgaatgtggatgtgagggtgtccacccacatccctggatatgtccctggggcggaatcgccacatcgaccgtaattctcttatctcttggctgtttgattacagccatcccagtggatgtgagtggatctcaatgtggttttagcatgcatctccctaacaactagtgatgttgaacatcttttaatggcttattggccatttgtatatcaacttgagcaaaacagacatttcaagtcccttgcccatttctgaagtgggctgtttgtattttttgttgttgaattctaagagttctttatatattctgaatactactcccttatcagctatgtaatttgcaagtattttctcccattacatcggggttttttactcttttgatagtgtctttgttacacaaaagtgttcaattttgatgaagtccagtttactttttaaaaaatatttttcttgtgactcacacctgtaatcccagcactttgggaggccaaggcgggtggatcacctgaggtcaggagttcgagaccagcctggccaacgtggcaaaacccagtctctactaaaaatacaaacattagccaggtgtggtggcagatgctactcaggaggctgaggcaggagaatcacttgaacccgggaggcggaggttgcagtgacctgagatcgcaccattgcgctccagcctgggcaacaagaaagaaactccatctcaaaaatatatttttttttcttgtgcttttagtatcatacccaagatatattggccaaatccaaggtcacaaagaccttctgctatctgttcttagatttcctcctatattctcttaacttttaagggcaggcccaagtagtagatggaaagttgcctgtgggaagcgagaggggccatggagcagagagcctgctgcctcgagcgtgtgcgggagcatgtggtc

SEQ ID NO: 128582 - DNA, 1138 bp, Homo sapiens
taattgttcattgcaggcaagtacaacttttaatggattaagaagttttggctacctcaaaaactaatctatgcaattaaatacagaagcttaactttctaattgcttaataaatataactaactggcacttctaaaggaaaccaaaaatataaacttacttttctatgccatttgggtaaatacaattgggcgttgcttgtattatgtctgtataaactgcacatggcttgcttttttttttttttttttttaactctgttgcccacgctgcagtgcaatggcgtggtctcgtcaggctcactgcaacctccacctcccgggatcaagcgattgcgcccgccaccacgcccggctaattttttttgtatttttagtagagacgaggtttcaccatttggtcaggctggtcttgaactcctgacctcaaatgatccaccgacctcggcctcccaacgtgctgggattacaggcgtgagccaccgcgcgaggcctcacatggaatattttctagcagcccacggtgcagtgtcctgccttctactcacccgtgagcatgtcctgccaccttgcttgttcttaaaccctgtggtcccatgacacagaaacatcgagacaatggtttcagcctgttgcattgtctcaaccaccaggacgtccagcagaggctcagaaccctctgcagatggtgagaaatgcttggggccagttatgtacagggacgaaatctgtcattacaggaggtacagccacctccagtttatcatgtgggttcaggcctctgggtaaaaattcagtgactcatatccctaagtacgttaaaaccacaccagtaagaatagattttacgcaaagaaaactcaacctaatagtactgtctctgctggacttcatacccaactccttttggtgaagaactcatattccatttttctagaactgtcttatagaatgttcttcctgcctggaataaaaaggaaacctgtctccaaagaacaaacaccaaatctgtcaaatccaatcaagaagcatgtgtgttttgtgtgtgcattcctgtctatgagagaggaggatgaaaatagattacggtttgttatccttacagagtagagtagaacatcttttttacccacaaatgt

SEQ ID NO: 128583 - DNA, 1077 bp, Homo sapiens
tgtcccttttttgggtgtacttggtctcatgaggaaaaaatgagcaacccctggtgactggtgggtgtggacccagaagctgagcttagtctctgcgtagagtggaccacgaggtgtgaaacacagcaggaagctggaggagcagaactgaggtcattcccatttgcaagattcagaggctgagccatggccagtaaactcctctgccaaaggcaaaaggcctttcaaagcaaagccactcaccatttggtctgatagttgagcctgcttgattctacacgtgcacacgtgtgcacatacgtgctcacgtcacacacatgcgtgcagtctcatgcacacacacatggtctttactgagctggagggcttcccacccccatgctggggtgcacccctgaggcctggtatccattctgtcatcaggagccctcgatgctttacagcctgagtcaggaatggaaaattgtagaagtagacataagtgggtctgttttccaacctctttattctccagggaccaagaatgttcaaggcactctggcatacaagtgctgttgcctctaaggagttcaccattgccttccccgcctctccccaaagccttcgcaccactgtgtgccccggaaaaacaacaacaaacacctctaacagaaacggtgacacggccctggaggccgttgctggttgtgcctgtgtctgagcccgcccatttttgggcatcagcctcgtgtttcacagaccagagggcagcacagatcaagtgcgtcctggctaggctgtggccgcggcccatctgcaggtgggcacgccgagtccagtccctgcaactgctccttcagctcccgtggtgccctccagactgggcattcacactcccatcagaagggccttgttctggtaactcctcagggaataggaagagaggaggagaaagctctgtggtttgggctccgccgtattcaagcatccctcccctcatgctcactggacactcacctcccctctccttccacagccaccctgcccctcctggcttcaaaggtttgtagcaaagcaccggttgatggaatgtttact

SEQ ID NO: 128584 - DNA, 1049 bp, Homo sapiens
gccgacatcgcagctaaatctacaatcaaaagagttatgtggttacatctacctttcttcttcattcatatttaattacctgttggttattgagtcacgcaaatgccacaaggtcttactcatccttacaaactcaaggtcgccaagctgcacacactgggccgctgtggctgaaggtgcatagtcgcggatcataaacagagccatcttcgtgattgttaggctgagtctggatcttaaatagaagattttcctttaagtgaagtggctggaaggattggaccttctgtccggccaagatctgtttgccaaaaatgtgtcagtgcccccaggccaggctgtgcaggggaggcccttgggcccctgcaagcaggcgctgtggaggggcaggtctcggggcttcctgcttggcaccactgccggttaaccccttcagcaggctcgtgtggcccacaggcctcactctggggtgttcaccgtctgaccaggagagttttgttccgggtgaggatgcaccctttgtgtttaccgaggattataaatcagggaaatttcaaaacatgatggggctggcctccagctttctctcagaggaggctcatgttgttgattttgctttataaattatcttttgctcaaataaaatgctctcgagatcatagctctgtatttttggcgggtgtaggcggacagggtcttgctctgtcaccagggttggagtgcattggtgcaatcatagctcactgcagcctcatcctcctgggctcaagtgatcctcccacctcggcctctcaagtagctgggagtacaggtgcacgccaccacacctagctaattatttttttggagatggggtctcactatgttgcccaggctggtctcaaactcctgggctcaagggatcctcccacctacttcccaaagtgctgggattacaggcgtgagccaccacgcccgactaccgttctgtattttaaactcaccacacagaatggtacttagagtattcgtagtggcgatggccatttctgtcactggctgacaggagc

SEQ ID NO: 128585 - DNA, 1097 bp, Homo sapiens
tgcacgctcactggatgaggaatgcaggcgttttggtctgctggggtgaaagcctttgcggtacaacatgcttttacataatattgtaacttaatactccattaaagtggtactaacaggatttcacaggcaacttgtgactttcaacctgaatgctggccttcaggatgagtcatcaagctgcaaaccaccctggtgacggctcttgcctcttgacggacaggtccccagccaggtggccttgtggggagtctgcggccacagtgccttccgggagtgcccccgccccctgccctgagttgctgccagtgggctggctgcctggtttccatgctcacacttccattgggtagttaaattgcccctcactggggcctggttcacatcagaaatgagcccattaaaaacagatgctttctccatggatccgccccatcctcagtcagagtcccagcatccgccgcacctgcctgtcccttctcccttctcccctttattgtattttcactgaaggctgagaggagccagtctccacacggtgggccacttgcgattcccacagccccgtccgcactgcactgtttgtcttgttgctggaaactcaggtgactccttgtgcctgagggggcagctgaccccaggccaggagagcagggtgtgtgtggggaccagggagcggggctgtggggccacagggctttagttctccaggactgctggctctgtggtgactgctccccatccctgctgtcatccgcagccccctgcgccccgaggaaggaaggcggctggtggaggacgtcgcccgcctcctgcaggtgcccagcagtgcgttcgctgacgtggagtaagtacggggccctggggtttctgtttggctcctgttgcttggtcgcagagactgggtgggagggaaggagctgcgagcccatggctcttgttaattacatgagggaacctgtttagagaagtgaaaggtgatttcagcagctttggtaagttatttagaggcagtggaaaccagtgtttaaggggaaggatgaaaatctcctgaaggacagtgtcgctgcagccaagtgtcaaacctttggtgctgt

SEQ ID NO: 128586 - DNA, 1061 bp, Homo sapiens
ttcgcttcccaatttattttcttttaaatacttaaaacatttggtttttaagctatttatagccaacctttttttaaaaattaatgtttaaaatgtttttttccccccaatctatcatggttgactgttagacagttggatggctgtgtggttttcaaagctgaggtcaagtttgaatgagctcatttcagatcactctagattttctgaggctgacagtgtccttgggacaccatgtttggggaatgtgtttttgcagtttacgaagcacccgctgctcagagagccgggaaacctttccttctcttttcttggagtctagttgccatggagattgtcactaaattatggacgagggagaggcgagccggcacttggaggtctctgatacgcaggcttctcaatcagggtgcacagacacagcagaggccgtgcagaggctgcagcttgccctcccggctgtcctgggcgtggatgtagcctcccgaaacagctcgtcagaggggtttattcagagaacggaagtgtgcttatggcaggaagagcttcaagggttctcacatatgtttacagctgctctttctccttagcaggactctgagtggctgcagtgtttagagaaatctgccaaatcctgatttaattttggttcatttgctaacaggattggaggagataggaaattgatcttggggaccgtgaagctgctgaggttcagccacgaccaggagtttggagggataatgtctgtgcgtggccataccattttgaaaagcacaaaaccttttatcattaaagcagaaatatcgaaccaaacgtggattctaaagattatgcatacaacaaacacatgtctttcggtgcgtgggtaaaacccataactaatttcaggcctaatctcagtggctcagcagtgcagtgtgggcaaatgcttaaccaccagcatttgcagcatttgggacctgatttgcagccgggttctctagtgtaaggcccccgccccgccgccactgctgcctcccagttactgacgcagtgtcactgaaggtggagttgggagg

SEQ ID NO: 128587 - DNA, 1023 bp, Homo sapiens
aggccgctgccaggtcccttggtcataggctctcagcagaggggctgagcgctgtctcctgctgccccctgctgccccccaagccctgtccgcaagccacagtcagggatgggcaatcaggcctggcaggagctgccagggctgcctccctcttgtcagagacagatctgggaggagccttcctcctccctctctccctcttccttttgtctttgaaattgcaatcacagctttcatttgagccttgggccacagaagccagatgccctgaccgcagggctgcctgagatgagggtctgggggtctctgtcctcccacgcccagcctggcagaggcagccccgcctccgggctgaggcgctttaatctctcacttttcaggctgattcctagaataggggttcttaatgtggaaatggctttctattcctgcctggatgccgccctggtttaacacgttgttttcgatccgatggaaacatttagaaaacctcagtggggtgtggggactccttggtcccaagggtctgtgctgccaggaggggatgctgagattggggggtagctatggcccaggcaatgcccacctgccagcaggcaggcgcttcactcttaccccccctgcagtgggcagggcgcatcctcatttacatctgagaatgcaagggagaagggaggctttgccaggtgcatggctttgtgtttgctgcagaggaggtggggttggagcctgggcaccctgctctctctccagaatgttaaaaatgaggatgatgtttaaaaagagcatctcttcaaacactgcaccttccttttctatgatgatgcgttcgttcctaggaaaaaatgtgatttaacataaccccagagcctcaggctgtcgtaagccctagcgttttctgcagggagaggtgggaaacatggctttgacaggaatcacatctgggatgggctctggcattgaaacccacggtggtgagactgccactgctgcaggtgacatctgtcatcaaaggacctgctc

SEQ ID NO: 128588 - DNA, 3246 bp, Homo sapiens
tgtctcactgaataaacactttcgtttatcttttttttttttttgtcatattgagacaggatgtcgctctgtcacccaggctggagtgccatgatacatggctcactacagcctcaaattcctgggctgaagtgatcctcctgcctcagtctcccaagtagctgggactacaggtatgcaccaccatgcccagctaattttaaaattttgttagagaggcagggtcttgtcatgttgactagcctgatcttgaactcctgacctcaagcattcctcttgcctcagcctcccagagcgctgggattacaggtgtgaaccaccacgcccaacacacttatgtttataataatagattattcataattattgtagacatttcaacagttaataaaaataattcttttgaatttctagaaagtttttcttaggtgttgaagaaaacccaaagcaatgtaatttacaagtaagtagcctagtctctgtttacaacttgctgatttggaacttttttaggtttctgacgtagaagagcttacccctccagagcatctttctgatcttccaccattttcaaggtgtttaataggaataataataaagtcttcgaatgtggtcaggtaatcactttctctttactgtcctgaaatgctcatcgtggctgtaagcgctcagcagcttttgttctattccttttacactcaagtttttcaaagctacattcttttctatgagaaaaatgtttcatataattttttctccattttatcagtaattagaaatatttacattaaacttacacagagaaaaattctaactttctgtaaagaatattcatctaaatagtctctggttagttatgcttctcataacttaaattcagttaagggagaatatagaatgttaatgtttagtaaaatacttcttaccaagtgtgctttcaaaacacttgacaaggttaaataccggtgccattttcgttgaatacgcagctgctactcattttccagtccatatgtcacttgatcagaattacagggtttgctgtggtgcatgcagggctgacaggttacagagggaattgctttgcagatgtctggtacctgtcgaattttaatagcagatacattcaatgaaaacttttaaaagcaccatctttagcagctatgagtcatctttcaacaacatattaaatcttttttgtgtgcattgagggtatacagagtagcctttttcactcagcacagcatccctgttcccagcagcatcctctggttttaatatctcactgtacaatctggcacactctccatgaaaagcatggggtgagttcagtcaccttcccacgtcccctgcaaactggggtttgtggttgtggttgaaccttggctgtacttctgctataatgtattagggtctatatgatacagtaattttgatgtttgttgatttttttgcaggtcatttttggatgaattaaaggcatgtgtggcttctaatgatattgaaggcattgtgtgcctcacggctgctgtgcatattatcctggttattaatgcaggttggttacattcccctctgtcatctggaaggtggctggtgcacctcacaggtgctgtcatgggattccggggatcagcccctgcacttggctactcctggccagctcaggtgtcccccagcctttccactccctgccttctcatgtgctggacacagtgctgtccacctgggcttcctctccttagcccaccctgcatctgtttttatatcagcttgctcactcttcagtggtggaggtcctgttcattttcacctgttgccactaggtccatttaagtgttcctgtctgtgcctcggcattgaatttctgttgatttgatgtgttacctgtatcttaaaatctgaatttattttggttgatgacggatattttggtgttaatatttgacctatctactatttctcgtaagccttagccttgcctattctgaatatcccaaccagttcaagtagtactgggaaaataattggagatatgtataagatgcttagctcagtataaaatgtagtaacatccctgcagggtgactgcctttacctttctgtattatttgctcagttttactaacgttgaaattattttcagagatgatacattgtagatagggagtgcttctattgaaacaaactctccctgtaagcctaaatggataggatatctgcagattgataagaatactccttaactggtttgacccaggttgggcataagaaaagacttccctcagggactcccctgcattgagatcaccaccaggaggatgttgaggatggatgttggatgctgccaggtgccttgcccttaatacatccttaactacctgcgatagttaaacaggggaaggactctgaaacaggattggtttgctggcatggacataatccttcctctcatggcttcatggggtgaggtccatttgaagtcttcttcccagtaaacgtttgtttgatctttacaacatccctaaagaagggagaattactattccgcgggtcagtatgtaggttacctcaaagggaaggatagggaggcccagcttagggaagttgtaccacatgtgtaccagagtgtttgtctttgtgtagtgatgttaaagtcttttctgtcttttaatataattttcccaggtaaacataaaagctcaaaagtgagggaggttgcagccactgttcacagaaaactaaagacattcatggaaattactttggaagaggatagcattgaaaggtaaaggagagatattcaccagatgtgatcatctaaaactgctcattcttctttggatctgcatgaggttgtattttcatttctgctacttacacccaggtggttaggagactggggactctaaggagagaaatgtttctgttggcaaagacctttagcttacgtttaatttacttgctaattctgtcttcaaaaacaaaacaaaagtgtcatttgcaaaattctactgtagaaaagtgagggcatacaaacttattttatttagttttaaaatcagacattatttttggtggttgctgcattattgaaaccatgggcgtttcccaaggatagacacctagcggacaaatacccacatggggatgtgcggtccctccagagcctctgagatgtgtgtaatttcccccttgctggacagcccattgctacgcacagcctgcaggctaccagtgtattcg

SEQ ID NO: 128589 - DNA, 2293 bp, Homo sapiens
acctacacagatgcatcagccctggctgtgctgttcacgctcgggtgacacgcagtgttgtgtgggaggtccctgctggcgaggtgcactgagagagatggagtccgtgtgggagtcccccatggtggatacactgagagggagatggtgacccctgtgcatgggctggaggcaggaagggcaggagctccagctgttagattctacccaatggtcttagaacaggatcccaagagttcaggttgaccagacggcaggacaggaagcagaggactgattgctctgggttctgagcgcataattgttaagttcacagagttttccaaataaaatatacctttcttttgaaagatgctaattttgatacttgtagagtggcagacatcttgtcaggtgaaatgctaatttctgtcatgagttacctccctgtcctatgttaaccttctccaggttggaaacgagagtcacagaccttgaaggggcccgtggcttccctttgctggttgaaagctgatgtgaagtgagattgttgtataagcacttcatataaaaacctgtctgccagatttgcttcatcctaaaaacaatgtcatgtcagttctcgtaccacgtgatgttgttatcagagagagccattactttttctaggtagtagcttaaaaatatcaatgagctattattttttaatgaagactttaaaaaatgcttaaatgggaggctatttatgaaatattgaagactcggtgtcctttgctgatagaggtcattgaaggttgttggccatactttttctagtctagttcaatttgagttcatttgaaatgttcctgtttttgatgaatttgtttcaagtgcctgtgatcttttatgtaatttgtgccaaaacctttaggtttcccatcagacctgtgtagctttagtcagaatacattgcctcatagctgatgccttattttaatgtattgatgttttgcctctctccctccttattcctgagggtttttcttggctttggggaaagaatatcatcagggcagttcccagtgggctttggtcccgtctatcatcttctggccgtggtgcataggaggtttgagtcagcctgggagtggaatgtagtgggcactggtagcaggcaaacaagatcagtgactccttgagtcctgggggaggatagtaagaatacttattttaaagtgtttttttgtttttttcaaaaccatggtttttagtcattaaaagtgacgtatgtgttttcttgtagctgctttattctgttcagaggcctcttcatgagttcattactgctgttcagtctcggcacacagacacccctgtgcaccggggtgtactttctactctgatcgctgggcctgtggttgagataagtcaccagctacggaaggtgaagtgctttaatcctgaaactgctgtgcctcttattgatgacacaagatggtgtttctactagcagtacattctctacgtttctcaaagtattttttaagaattttcaaacttgagtgagtggtgcactttcctagcagctacacctcagagtttgatagctagttagtattttagactcgtgactattgtgaaacatataccaaggatattatcactcttgattaaaacagaaatatagtccttacatttgaacatgcttttatgctacattcaggagatttaaatgagttgataagtttcttaaggttattttccctcctaaaaggatagaagtagttgtaatcagtggtgagcagaatacaagactactctaggagtgcttttgtggaatagttcacatatctttgcatgttatattattagcctcccccacctttttttcatttctaagctaggatgttcaaccttctaatgtcagtttagactgggcgcagtggctcatgcctgtaatcccagcactttgggaggtggaggcaggtggatcatgaggtcaggagtttgagaccagcctggccaacatgatgaaactctgtctctactaaagatacaaaaaattagctgggcatggtggcacgcacctgtaatcccagctgctcgggggctgaggcagtcttgaacccgggaggcggaggttgcagtgagctgagatcacgccattggactccagcctgggcaacagggcgagactccgtctcaaagaaaaaaaaatgtagctaatatcagtttaaacagacaagttattcattattactgactatcttattttcctaccggtagctgtagatgaattgaagatgattattaatacagaagttattagtct

SEQ ID NO: 128590 - DNA, 1100 bp, Homo sapiens
tcatccatcatttgtttaacagatctaaagtttaagagtaaatattaaatagaccaatattatttgcttcagcttttttgtttaattattattattatttttttttttatttttttttttttgagaccaagtctttctctgttgcccaggctggagtggagtgcagtggtgcgaccttggctcactgcaacctccacctctaggttcaagcaattctcatgcctcagcctcctgagtagctgggattacaggtgcccaccaccatgcctggctaatttttgtatttttagtagaggtgaggtttcactgtcttggccaggctggtctcaaactcaagtgatccacccaccttggcctttcaaggtgctgggattacaggcgtgagccaccatacccagcctgtttaattctttataattcacttctgttgtgaaaacagcattttatacttaagcttaatgattgcaacagtcaaaattatttattttttaaacttcacttatcatttaggaattattttcccgtaaggaccaaatctacttttattatttaaaaaatttactttttggaggagctaattataactagaattctagatctccagtgtagccagtttcattgtataggtatatctgttctcttaaaaataaaacagaaccaacaacactgttctctaattcaggtgttgagggaaccacactgctgaacttctgtatgttcacatgtgcaatgaacacaatttttagtttagtgactaatacactattactgttattgaagatatcagttttaacttaaatgggacaaacgtcatacttatttatttattttggttagaatttaggttaacctgatcaacctggcttttggtattggctcaccaaataccaaagtgtaataatctcttttttgttaccattttatacatgtgttaagtgagaaatgtgtaatgatttcaacaaacttgtgtgattagaaaactgatatattccaattttctttctagtgaagggatttttttatgtttcattacttcttgacattctgaaagagataactggaagttccttgattcagaaaacagattcagatgaagaagt

SEQ ID NO: 128591 - DNA, 1003 bp, Homo sapiens
tagggtcatttatcagcaaattatccaggttagaagtcttaagacacagaaaactttctctttaccaagtttgttatgtttcaggatttcattttctactttagagtggtaattttagacattagtgttattcttaaaaacttacagggacatttatctaactttctagtttatctttttgcaaagcgtaaactgcatactttcagtgtaattttatacattacatataagaggtgttcgattatgtttgtggaattacataaaatatgtctctagatttcttacaaaaacaagaattaatgtatctttatgaaaattcctttataaaacatctttataaaaatctgctttataagataactagcacatggataggagaagctttgtgaggctggatttactccctttttaaaaatggcctttgttgctaagctgtgtctgtctcttacagacctacctgactgtgtgtaaagatgttgttatggtaggccttggtgaccatcagtttcagatgcaactcttacagcggagtcttggaatcatgcaaacaggtacagtcagggctgttttagagcaataaatactcagaaccagtccttccctccctccctcctttactgtgtagctcagaactctcacttttaagtgactgattataatgcaacctggcatatcccaaaaaagggatttgttaggtggttcagcccggaaattaagaggtgtttctgtgtcagacatgactacatccagagtttgtgacagggtccttgggattctgcctgtccttgtggtcagctttgttgccaggctgactttccctgtggattgggctagtggctatttcctggcatctgtgtgggaaaccatcacctttttgctctgctctggtcatgtgctcctgtggatgggggcgtgagtcagacattattgggtggtaccccaccaggacccccggaagttgctgttaccacagggaaagggttagcacagggtgacccatggc

SEQ ID NO: 128592 - DNA, 1531 bp, Homo sapiens
atttttaattacatttgtggcttttgtgtctcataatatttttcattagagctctacaatgttggtgattatctcaataaaaattatttttattcatatttgtggaagaaaaaggaatattttgatgctaaacaaaaattgttcttcaaaagtagaaactcttgctctagaatctgacagatggcacagaaacagaaggatgagggctttgtgtggctgctgtgccctgcttcttcagtgtccagagctggtctcaggtcttgtggtgggatgcagctgagcagcaattgtgggaaactgtatttattcctgcattggagagcatggaagtgctaatataataacaagggcttatgcaccgtcagattttagcttcttggttttcctcaccttttgacaaagttggggagtctccgttgaaatactcagtccgattttccgtctgacattttcagctgtggtgtgatttccacgctgagaagccgggaggagggcgctgtggacaagagctactgcactttgttggattgcctctgctcctgggggcaggtggggcacattctggagcttgttgacaactggctgcccacagagcatgcccaggccaaggtaggttgacatcatgtttccttaaaattaggtgagtgaggataactgtgtattagaaattacatgcttttctagggacgtgtgttttcattatcagtttctctctctcttctttcagagcaacacagcttctaaaggtagggtgcagatccatgacacacgcccagtcaaacctgaattggcattggtctacattgagtatctgctgactcatccaaagaaccgcgagtgcttgctctctgctcctcggaagaaacttaaccatcttttgaaagcccttgaaacgtcaaaggtaactctgtgccctgagagttgagtggtttcctatgattgtgggggtgacaaatcaaagtgtgaagctttcatatttacagtgctatacaagtgttctggctggaacagaattgagagtgatcatgtcacctcattcagttggtacaaggcatggagcctggccagggcaaggttgggagtcaagtcccagttgacacgtgttcagaaatctcacatttgtgttgcacctgctagggcgctaggactcaggaggatggccccagtgtctcagaacacaccctctgcaggagatgtgtcacataccctttcatgtggacactcactccctgcagtccttggcagttttttctgggaatgtttggagagcatttcctgggaacccatcatgctcccagctgtcccacggaggccgtcatctcttcctctcctccaggagccagccctctgaacaccctgttacgctgccctcaagtgtgactgtaccagaagcaaagccccagcagagtggagccaggcagatggggaggacggggcctggtcatgaggcagggaggggacgggtggtgctgcgtgcagggcaagggctgtggacggtgagctgaggctgctcacctggctgtacattttc

SEQ ID NO: 128593 - DNA, 1039 bp, Homo sapiens
ggaaagcagccttcaccattcccctccccctgcatcgagatttgtggtgaaaagtgatgtcttttaataaaacagaagatacagtgaaagaaaaggcatgttttttaatagggtgttatgttcccagatggagacaatagttgatacgttttcctttttagaggagttttcttcatgtaaactgtttctttaaaggatgtagagtcagtttggaatttatatcgtggtgggcatttaaaaataaatttacctccctagaagattctaaagtggagagtagaagacgtgaaagtaagacggatgttctctacatttttgctttagagctctaattctgagatgctgttaccttttagtagttgctatgattagatcctttcacaataaaattatttttatcttaggttctggacaaaacactgtcagtaaacgatgttgcatgcatggcaggtttactagaaatcattgtgattctctggaaaagtattgacagaagtatggaaaataataaagaggccaaactttacacgattaacaagtttgcctctgtgcttccagagtatctgaaagtatttaaggtaagtcttgaactatacttgtaagcaaggtatattaaggttacgtttgtttagaatttaacaaaagttctcaaacatgtttacctccctggatctgtgttctcatctgtaaaatgagagggttggattagtgtttaccttgcagtatagtttctttctgttgcccctcttgagggtggagatcttgtgtctctgtctgcttccatatcctcagcacccagagaaacgtcttgggtaagcacatgattcttctgcctccgatggtcagcgacattatttcagaatctaatttgatttgcaggggtttaagaaagagtttcgtgaacatggaggtacagtagtactcaagttctgtgggcagttaggtacccgaaggcacccagtaagcaaatatgtccctgaagtatttgagttgtgtgtgttgttggggcaaacagttgtgtgtgtgatttcttttttaa

SEQ ID NO: 128594 - DNA, 1532 bp, Homo sapiens
gctgtgggcgtccatgatgatctgggcaggcttgtgtcagagaaggagtcaactgtggatgggacaggcagccccagggattcaggagtgatgccccagcctcttagataggagatggagtgtccacgtcaaaaacgttgtatatatttttactcacttttcacattaatgggccaaaagttaaggtactttaagaaattaaaaaatattaattgacaatcatagctatcattggagagtttactgtatgttaatcatggtgttaagtaattttaattaaacctcttagcaccctaatacttgggtgccttatataacagtacttttaaaaatatagatttattaattctaatttctctacagaaagtcacagattttggtgtagtcattcgaagtgaatttttttaaatataaaaattagttccttttttggttgtgcttgaaatttttcttaagctgtttccagggttacaggcacaattgattatttccttctgcatatgtgctttttgcacagttttggaaaatatgtcccatggagcacattctggttcgtctggaaactgattctcgacctgtgtctcggcgcctggtgagcctcatctttaattctttcctgcctgtgaatcagccggaggaggtctggtgcgagcgctgtgtcaccctggtgcagatgaaccacgccgctgccaggaggttctatcagtacgcccacgaacacaccgcctgcaccaacataggtagggagtgctgttatttctcagttcttgttatgttttcccccaaaagcataatacaaattacagagttcagtatttgtcaatttaataagcttcatactttaatgcatttctgaatgatttcccttaaaatagtacttttgactaattgggattataatttcactatcagatagttaattttgtagaagaaacacatccattaattcttgtttatcctaaacatttcagcaaagctgattcacgttattcgtcattgcttaaatgcctgtatccagagggcagtgagagagcctccagaggacgaggaggaagaggacggaagggagaaggagaatgtgactgtgagtagaacagggccaggccgggcagatagtgcctcagtggcatcactcccatgggccattatgttaggaatattcctatgttttctttgttcctttagtattgttaattaaacaagttattttggaaggtcataaataacatttgtgaaagaattgctatatgtcctttgtagttcattttggagctcaggtaggacttaatacagaagaaaaattcttaccagtcacatcttgtcccagattttctttaccttaaatgtctctgtatttcagttcaatcctggatgtagcatggctggattggattctgggtactcccatatttttgaaagtataatttattaaagggacaatttcttcagaatccaaagcaaccaattatattagaagaaaataacgtttaagacttagacaaacttgttacttataagcattatcttaagct

SEQ ID NO: 128595 - DNA, 1036 bp, Homo sapiens
gcagagttcttggacttggtgcctttggagaccatgtgaccagtagttattctgtgtttctttcaactcaaaaattctctaaaatttagctgagagagagcattaaagatttcttttataattgctttaatcttatttgaacaaaacaatggatggaccaaatagcagtggttggacctatactggttcattaaaagtatgccttttatatgaaatagttctagaaaaagtggtattttccataggtatatttatttcactagtagttctaataaagatggaaccgaatgttttctttaatgaagttttcctacctgaacctttcattggcatgttctgattttgaattgtttatctttctctctgttgcagtgtctgccaatgattttggacaacaaactgagccacccattgttagagcagctccttccagctctcagatacagtctccacgacaattcggagaaagtgagggtagcttttgtggacatgctgttgaagatcaaagctgtgagggctgctaaggtaggatgaatagggcttttttacttatgacatgaaatagggacatgtgttcatcaaacagaaagaaagtagttttaattccacattttaaactgataactgatatgatttgaccagttatctctgtcaaaaatgttattttgtgtttttcatcaaaggttctagaaatattatcaatgtgttttctttctgaaagacattaatgtaagcacccctgccttccattgtattttcgtcatgtatgaaggttttcagtgagatatttggtgtaatatttggatacttggcacctggtgagcacttctggagagtgtctagtatgagccaccccccacccccacccccctgccccacacagagtgaaggagggagacacctgctttatgaggagagtgtctagtatgagccaccccccacccccacccccctgccccacacagagtgaaggagggagacacccactttatgagagatgtgcgttttgatgttttataaactactgaagtgattg

SEQ ID NO: 128596 - DNA, 1016 bp, Homo sapiens
ataattaaagtgttactttgggaacactgtacttaagccttcgtatgttaactctttgggattctgagatactcttcttttattattataggccagaaactctgaagttcgatcaaatgctgcattgttgtttgttgaagcatttcctattagggatccaaaccttcatgctattgaaatggatagtgaaatccagaaacagtttgaagagctctatgtacgtacttcaggtggtcaagcttcttacagatatcagctttgtccaggctgtggcatgtactgcttgtgtgtgtccccacctcccctgtaaccgccagagctctgctcccacatggcatggtttctaaacctggactgttcttcagagagatgccacttctccctggggccttctataacagcgtggacctgtggtgtctttttctacttttgggacatttaattatttattactatgtgtggttttaaacattttatgcatatgcctgttgtttccccaatggagaggtggtgtcatatggtgggtaaagcacatgctctggtgtcagccccctgctctctggggtcagagtccaccactctcacttaataggtatgtggctttgggcaagtcacttaacttctctgtgtctttctctgtaagtgtgattgcgatattgcctatcctaaaggtgttgggtagcataatgagcaaacactggttatatttcagggcaagcctacaaataatgcctgtggcaggtgatttttcagatgaggtgctaggatgttaagatgcggcatttatttccaaggagtattgtggattcttttcatctacttagtctgtatttcctaacacagcttacttaagcagtgcatactatctactgtcctaagtagtaaagttttaggaaacaatgacaacaaagtgctgttgtaatgctgttgcctgtggtgcttctgaagtgctcccttttttctttttcttttctaacttatggaaaacctgacatgcagaaagttaaagtaatagt

SEQ ID NO: 128597 - DNA, 1051 bp, Homo sapiens
tctatgaagcaagtgtactgttgatatcaaagtttgatagtattgtacacaaaaagcaaactatagactaatgtcacttatcaccatcaatacaaactacaaaataataatcagaaaaaaataatccccatactgcagctcttctagggttaagttgatacaagctcacttaaagtgtaggctgttcttttacagcctgtttaatctttcaaaattttcatgtttcactaataaagtttagccccaaaaggtgtgaatagagaagtaaggcaaaattaattgttgttagggacatgaggctacaaagaattttgggaagattctgactggaaaagaagtgagtaggaaaagaagaatgaaagctacaagaatgatcattttctgattttttcataagttttgggaggaacttgatacctaaattaatctcatacagtgaggggtcactaagtgtgacacctccttgttacaaagttatgaaacagttaccacatgttggtaataaagaggttagttaatgttttggaacaagcgtgagctcttagaaccattcaggaatctccccttttccattttatcctgaaggtcagaggtttaaacgagtctttttttgaggttatgtggctgttggcagaatagcagaaactagaacccaaaccattttatagcccaaggccattaatctttttatttcagccgtagattctttcttgtgattgactgcatttactactgtcctatatccattgaagttactcctgctgaagaattgtcatgacatgtggatgccagccagagcctacttgtggtggagagaacaattctccctgttgctctttccaaatgccattttattttatttatttatttttttgttaatgccttccttttcctttttttggtccttaggttctgagttactttcaccatcaaaagaaagttcggcagggagtggaagagatgctttatagattatataagcccatcctttggagaggattaaaggtatacatttcaaatagtttatccgtgtttggaatgtactacttgt

SEQ ID NO: 128598 - DNA, 1006 bp, Homo sapiens
cacatatagtgtcacaactatttccataacattgacactgtattaagtattataagtaatctagagatgatttaaagtgtgcaggagtgcataggttatatgcagatactactccactttatatgaggaatttgagcatccgcagattctggtctctgagggaggtcctagaactgatcccccatggataccaagggatgactgtgtaatattgaagtaattttacctgtttcttttgtctgtttttaatgcagccactagaaaatttaaaattgcatctgtggcttgcattcagtttctattggatagtgccgttcagggacttcaagtcacctcttttagttacattatttttgagaatttgaagatattttctttgattatgggtaactctggtgaatacatagtatttatgttatgaagatagggctatgtaatccacaatcccaactcaacatccagatacccttttggacaaaaaagtgtgtttgttttcccttatatttttcttataccaggttctcaatcattttatttttctctgagaataaaatttttactctaggtcagaaaggagcctctcacaaccctgtgttctatcctgacttttcattcctctttggagagcaggccctgcactgatgggcagagggaggaacctgcagagtggacagaggctgccccatgtctgggtttacttccatcctctctgctcctctgcacaacttacacttgatttgtattgccaaggtttatcactgacttctagaaaataaaaaataggctgggcgtggtagctcacgcctgtaatcccagcactttgggaggccgaggagggtggatcacctgaggtcaggagtttgagaccagcctggccaacatggcgagaccctgtctctacagaaaaataaacaaaataaaaactatttgactagatgtatacaaaattggtatcaacaatgtgtatttctcagtctcactccattcctctctgccctccctctct

SEQ ID NO: 128599 - DNA, 1936 bp, Homo sapiens
ggaaattctagcttgacaaacacttagccttttaactatatgagtcctcagttttctcatctataaatgagaaggtgaaatgaactgggatattcaactccattcccacccacctatgctagatttaaagctttctttcatttgagactatggaaccatccatgacagagccagaatgagatgtttatggacccatggttactgtctgtggtctccatctctgcacctgtggcccttgaggacagaggcgctcagtgtagcggctgctcggccctgggggaggtggcttgtgtggctcctggctgtgcaggccccgcagacagctcaactcgtgcatgtgctctcagtgataattacatgtgcctcgtttttagcaatagcaatgtttagcttactagacgttcaaataattgtttgttatttggcactttttatttggttgcaatgtaaacattctatccttttttatttctagggaagaagatttcttagttgtctcttcaactggaatatcaacttcatcaaaatgatccacgggaccattaaaaaccagttacagggattacaaaagtaagtgttaaaagtactgaagattttgtgctgtcttaatctggttttgaaagattccatttggtctgacttcttaagttatagtaatggattagaagctttagaaatacgttatttattatgtaccattggatcactgggtagctttttccttttataggaaatcattcttttccagtattgaccactgaaattaaggttttaatttgtggtagttctttaaatagttaaaatagtttccagttgaaccttagcctcgctcgtaataaagccatgtccatggtactttgaatgcaatgtgtgctttttggttgaacgtggcctggccagggtggcttctcggaagagcctgtggaatctgcaggagcagcagggaacgttgcagtcatgactctgccactccctgcgtgatggagatgtcaagtgtgtgcttgtcgtttgccaggcacaaggcagagtacttcatttgctccagcactgagtacttagtctccattttaaaatttaatcctcacaactctcttttgagataggctttgctttctaaatttcccagtgtcaggcaactgtataagtaccaagttgggatctgattctggatctctgattgcaaagctcctgttgtatactagattgctttttcatatttcctcatcttcagaatatttgagttgaactaatagatttctaagcttatgattcttaagttgatactggtattttagggcttcttgtacctcaggaattggtagcgtgaaaagtccaacgtgactccaagtcgacaatttatttatatttaaatatttttgactttagaattttgttctggacttatgcactcatagtttcacagaaaatagtaaagttttgggtaagccttgactgagaaggatgaaatagttcgtcacttcagtttcctttcccaaaaccttctccgttttctactttttgctacaggtagataacctatttctatagatgatttgcaaagcactagtttaaactgagtttcttcttcactatggttggagagtagctgaaatgatacatgttgaaagaataattcttaaaatttgcattaaaactattttgatctttttatataggtctttgatggtatacattgcagaaatttatttcagagcttggaaaaaggcttcagggaaaatactggaggtattttcatttttttaaatgttaacacttatttttattatattttagttactaaataagtagtcaaagaagggttatttaagatccatgtttatgcactctgtcaaaataaagccaaataatgaaaatctatttgatgggcaatccagtcacttgctaagatgtgtggtttgtgggaggtaggactgtg

SEQ ID NO: 128600 - DNA, 1962 bp, Homo sapiens
tgttgcccaggctggtctcaaactcctgtgctcaagtgatcctcccaccttgccctggcaaagtgctgggattacaggcatgagccattgtgtctggcctaattagtttaatttaagctccattcagatgttatagatggtgagatgggcagtactcagcaactaactgctatttacaggtttttcagggaagtctgacttactggaccaatgatcaagaacttgttgagaagaaaatacctgattatgtgattaccattgctagatagtgtcaacttaactaagaatttgtgacactgaattttttcttaaagtatgttgtgaacgtgatctgaggagtgattattgactcctaggggagttttactgtattgaaatttaaatgatggtacttttcaagttttaacaaaactgtaaaactagttattaatttagtctaagttaatgaaaatatttgattatgaaatatataaaattttagttacaaaagatgtaaaaatatcttaatgatttttaagaaaacttttcacataccctcatccttcactgtgcgagtgtaattagtttgttgtgacaaagtatctcatcaagcttcttattcttagcatcacttggatttatgtatgttttatagtacattgttttattctgaattcttgagttgaaatacagtgtcttattaaaaagtcaccccaatcataatgaaaatagcttccaaatgctttgtgaattttactatcagtttatttgtatggtctgcaaataactagtgaaatgattagtgctaacactgtagttgctatcaacttcccagttaattcaggaatgttatattagtgtaatgacattcagatacctacagattataattatgagcattagtatcattaatctaattattgagcttttctgttaataaaagcactgcagtttttgtattcattatggtaattgctttgactgtttttcacctctgagccaaaatttgaggctggcacattgagggatagtagtggattattgattggtcagtagacctgtcttggctctggtgttaacagagataccattggtgttgttacactgaggtttggttagcctcagcatctgcctttctaaaattggtgatacgatttctctgagacttccagttccaaaaatctcttttctattatgtctgttgagggtctttttataacaatcgtcaaacagttttttaattaacattatttgcattttataactaatgtatataaatctttggcaagttaaacataactaatattatttgcttagcaaagctttaaataatatataaagtcatgatactctaaactgttgactctgaagtaataagaatttgccttactaattggaaaattactgtgctgtattttaggtattttatatgcattacctgagtctgaacgaaaactacagagttctattcaggatttgtgtgttacctggtgggagaaaggcctgcctgccaaggaagacacaggaaagacagcctttgtcatgttactaaggaggagtctggagactaagacagtatgctcactttttatttttttaaagacagggtctctctctattgcccagatggagtgcagtggcatgatcatagctcactgcagcctcaaactcctgggctcgagcaatcctcctgcctcagcctctcaagtagctgagacttcaggagtgcaccacctagctaggactttatttttaaacgtcttcctaacattctaaacctgcgctattcaacgtagtagccacttgccacagaaagctgtttaaatttaaagttaaaaataatgaaaaattcagttcctcagttgcattagtcacattttagtagctctacagtgaaatgtggctaatgtctactgcactagacagttcagatgtataaaatcttcatcatcgaggaagttcttaaacttgctggatttttaa

SEQ ID NO: 128601 - DNA, 2667 bp, Homo sapiens
caattgttcatgattgaatgtcgggtctataggtagatcaagatactgtctaaggtcaaacatttgagagctggtctgtgtttgcatgtgattgacaggcaaaggcttaaggaaaatggagaggagaattgaaggggaggagggtcaaggaaacgaggaaagagagtagatagaagtgaacaagcggaggtggaaaaagctagatgaaaaatgaaggagcgctaagaagaggagaaaacaaacaccagggcaggagaggagctaggagagcaggaagagaggatggggggatggagggcttatgaggttatctttactctagttcctccatcttactgtgttttttatgaccccgacagttttgaagagtgcaagtggctcttttgtggtatagccttcaatttgcatctgttgaggatctgattaaattttagtgtgcattttggcaggaactgcttagcagtgttaggtcctcggcgctgtcaagacaggaagcgcatggcatggtctgtccgtccctgtgtgggtaggtgtccgccaggtctcttctgggaacctgcctctgtgggaaagtggtgacactgtaatgtcctgctgctcaccaggcttccacccacttgtttcagcatctcccgataattcctgccagagtccataattattgtgatggctataaaacagtgattttctaaccctgtattgcatctatgtttattcactgacattctagagcatgcaggtgctattaattaatgatttgatatttattatcagtatgctgtcattgattttttctttttagagacgggctcttgctatgttgcccaggctggagtgtaatggtacaatcacagctcactgcagccctctctcccagagtggttggcttggcctcgtttatgcttatttcattcaactggttataattaatcactgtcactgttttggtgctcacattgttccaaatttggctatagggagtccctttaattggattctatgcccttttgatgagggccgctatttgcttcatcaaagagtacgtgaggtcatctcagataagaggaaatgggtttagagggttgttggaggagatctgaaatcatcttgttggctggtgggagagaatgatattgaggaatgagtagaaggtggtgttgagggcccacttggggctggaatctgtggccacagtattattattgccattgttattgaactttagcctacttttgtaatctaattctaggtatggagatggtggacatttgggtcccttttagggagggttttgctaagtgggtgaaattttaaaaactctgaagattaggatgctaggaaagaataggtggagaatccctgtgcttcttcccttttaggaatggattttgaatactgcaaccaaactcttgaacttgtaatgaagttaacacttaacttttcttttgatgacattatgaaaaggatatgattaattttttgtatttgaaatgtgacacttgctatttatgttacagaaagaggcctctgatcctttcagcctaaatgaattactagatgaattatcaaggaaacagaaagaagaattatggcaaaggctgaagaatttattgacagatgtgttgttagaaagcccagtggatgggtggcaggtagtggaagcccagggtgaagacaatatggaaaccgaacatggctcaaaaatggtagtatttgtttttcaaaaataagaaacgtttttctcttttttttgtcaaaaaataacttcactgtgtatcattgaattttacattaagacagattttgaagttagaagtcaagaattttagaagtttagtctgttgtagttttattcacttttcaaccctactgttattaatctaatactaaatattgctgttcttttaggatgatttacttttattcaactttaattctttttagaataagctagaattgtggcttgatttttagaaaatttgtaactgaaatttctgctaaaaactgattttaagttgatgattttaattcactcatgctttgatttttcatttatagagaaaaagcatagaaataatttatgcaattacatctgtgattcttgcttctgtgtctgtaataaatgaaagtgagaactacgaagccctactggaatgtgttattatattaaatggtgagttgattttgttataaatggcatatttagaagtgggtgttgaaatacttgtttttgtttctgtttttatttattcattcatttatttattttttttgagacggagtttcgctcttgttgcctaggcaggagtgcaatggcgcgatctcagctcaccgcaacctccgcctcccgggttcaagcgattctcttgcctcagcctccctagtagctgggattacaggcattcaccaccacgcccgcctaattttgtatttttagtagagacagggtttctccatgttggtcaggctagtctcaaactcctgacctcaggtgatccacccgtctcagcctcccacgtggctggcctgaaatgatactttgtaaaaggaaactagttgttttcatgagcattgttgaatttagtagcagaagttgtataaaggtatagctttgcagtcaagttctttttcttcagctagaataggagcatacttacataagagttg

SEQ ID NO: 128602 - DNA, 2207 bp, Homo sapiens
cgtagttcatagttcagccatttgagttgaggaatgagatgaccagacttcactgttaacttatttcgggagtcattaaactgaggttatttttgctttgttcaatttggacattaaaatctagtattatatgtttaagatgactctctgtccccataattattggcaataattttccatattgctctatttataatggtgcaggtggttttcatttatttttaaagtgagggggctcctactgcaaatgtgttccatcatttgctattacctcatctttaggttgatgttttttcagtagggcaccagtagcaccaggtattgtgaatgcgaaatagaatttcctggaaaaacacaggcaggatggagggtatacaaagtcccctgagctctcattatcccgaaggggtgggaggagggtgctgtggttgagcatgcctaatgcatagtctaacaagatcccaggtgacccccggggccactgttttccatctcactttgaataacaagatgacactaacagtgggatttttttgatggaggaatggcctttagaaagggagcatcttcagaatctgcagctgggatcagattgttcttttgttgaatcaactcagctctgccgagccagcatcttgctaaggtactaaaaagggagagatggtggtgagcttcctaaggctatttggatttctccctccttagttggtaattttattaacaattgttgataaaatatcattaatatcatgttattcacatccccagtaaaggaaataagtaaattgtttttcagatattatagcgtgttttatgtcagaatgtttttagaaactgtctgccatacgtggttgaggaattttcttgcagttcttggatgttaatatcaaattaaatcttacaggaaaagatatatttgcaagtgtttcagtatgattgtgttttccattagggttacaaaataaatgccatttgaacagtgccatctgtcatggaaaaacgtgagacgtttgtacaagccgtgtctaaggagctggttggagagtttttgcaatttgttcaacttgatgtaagtttcatgttttagttttgttgtgatttttgactgtgaatatgaaatatgttctaaagtcattatgtccccaaaagaaacatagttatctcagtgaatccttagcgaccaatgtttatttgaaagaagaaaacaaaaccctttatactcaaatctacctgctggtgggctacgctaagatgtaaaagataaacagaagttaaccagtcaaagagggatgttgggggaaaggacccatctaacaaagaaggtcactctgaagactagagaaggtttgttgtgtttgaacttgaagttcagcaggaaggcagaagatgaggctgggggctaggctacacgagtctttaccattttaaggaattcagactttatcttgagaacggtgggtgcttgaagcagggagcgagctgtaggcaagggaggaagagaacaaaagagaaggagagagaactagtggacaaaatagaggtaaggagaaaaatatggtttgccttttggaaatattcctctgactacaagtgagaaatatgtcaaagggacatatttaaggctaacctcttaggttgtgctcttcaaaatgatggttgaattaggaactggaaatgggaagctgcttggtagtgaagtgatggcactattggactgattggatatggatatggtggggaagggcccaggcgtctgactgtgtagtaccattcagcaagctcatgaacgtgggaagagggcagattcaagggagaatgtggctccattttggaggtaccagatgactggtggtgggatgtgcaccagcggatggccagtagtcagacatgcacgtctggataccaggggaaagggctgagctagagacaggttgggcatggaagcctaagtcatgggaatgcctgcagttatctctgtagagtttcagataaaagggcctaggacacatctctgaggaagccagcattggaggcactgactctgaaatacgaaagtatctttggggcaggagacccttggcacacttgtctcacttgttcttattatgtggtgaaaatcaaattagtgacaaagaattagaggaatctaataatgaatttgttactggcaacatttaagaaatcatttttctttataagagaaatga

SEQ ID NO: 128603 - DNA, 1048 bp, Homo sapiens
gccccgcgtgcgcgttccgtagtgcccggtagggcactgggcttagctgctcgaggccgcgccctaagaggcggggcatagacaggaagaagactggcgggcatgtgggcggggcatgatctggaggcggggcgggccgggcgtgtgggcgaggcccgaggctcgcggcgccccagctctcgcgagagcggcgcctgatgacgaccgggagggcggggcccgtctggggcgccggcgggtgcgtttgaatctggtccgagcgcgggaaacggcgggtccccgagcccaggtaagagctgcggtgccgagccgggattgggttcagagcaggggctgggaagtagcagggatcgggcgggaagcccctcctcggctggtcggggtcccagcctcccctcccctaaggaggcggccgacctgcgtgcgggcagtgctgcctctgacggaactggacggaactggcgaccccgggccatcccccctacccagctcagcgacgcccgtccttcttgtccgtgtcggaggaaaatcccagccccgggcgcgggcactgccctcagagagcgaccccccagccctgagcatgggcaccgtcctcagagagtgtcccctcagtcctgggcatgggcactgccctcagagagcgacctcctctgtcctgggcatgggaactgccctcagagagtgtcccctcagtcctgggcatgggcactaccctcagagagcgaccccctcagtcctgagcatgggcactgccctcagagagcgtcccctcagtcctgggcatgggcactaccctcagagagcgaccccctcagtcctgagcatgggcactgccctcagagagcgaccccctcagtcctgggcatgggcactgccctcagagagcgtcccctcagtcctgggcatgggcactaccctcagagagcgaccccctcagtcctgagcatgggcactgccctcagagagcgtcccctcagtcctgggcatgggcactgccctcagagagcgaccccctctgtcctgggcatgggaactgccctcagag

SEQ ID NO: 128604 - DNA, 1157 bp, Homo sapiens
tactcaaaggagaacaagataaaccatcgagggcaaacgttttcaaccatggctgcccatgaaaactacttcagctgctttaaaaatactaaaggctaggcttcctggccaactcaatcaaatcgatcaattcaaccggggattccctgggcattctttttttttagacagagtctcacactgtcgcccaggctggagtgcaatggcgcaatctcggctcactgcaagctccacctcccaggttcacgccattctcccatctcagcctcctgagtagctgggactacaggcgcccgccatcacacccggctaatttttttgtatttttagtagagacgggttttcactgtgttagccaggatggtcttgatctcctgacctcgtgatcctcccgcctcggcctcccaaagtgctcggattacaggcgtgagccaccacacccggcctgcattcatattttttaacctccccaagtgatcctaatgcacaggttagaagaaactgatctcagaaaacatgtaaaaagaggaaacgtgaatgactcgagtataaaatcaataaagctgaggttcctgctccaggctgaacctgaaacagctgagaatcggactgcgcgatgagtggctcctcagcacctgcccaagccaggcgttaacgcgggacaatcactgtcctcttaaagctcatagcatgactgagaaagtggacacaacccaagtgtccatcaacagacaaatggagaaacacagtgtggtcttttcccacaatagaatatgactcagctgtagaaggaatgaggctctgacacccctacagtgcagatgacccttgaaacatcatgctcagtgagagaagccagacacggaggtcacggattgtaggactccatttatatggaaggtccacatgactgtaaaatccacagaggcaggaagcagattaggtgttgccagagactgaggagagggcgtggggagtgactactaatggctgtggttttggggtgacgaaaattatctaaaattagatagtggtgatggttgcacaaccttgtgggtttactaaggccacacagttgtatgcttaaaagggtaaattttatggtataaaactgtatctcaataaagctgttattaaaaattcacggctgggcgcgg

SEQ ID NO: 128605 - DNA, 1119 bp, Homo sapiens
gactggtcatggtggctcaggcctgtgggtggatcacctgaggtcagcagttcgagaccagcctggccaacatggcaaaacactgtctctactaaaatacaaaaattagctgggtgtggtggtgggcacctgtaatcccagctactcgggaggctgaggcgggagaatcacttgaacctgggaggcagaggttgcagtgagccgagatcacgccatcacactccagcctgggcaacggagcaaaactccatctcaaaaagaaattaatttactaaaaataaataaataaaaatttaccagcaagagtatgaatagagaggagccaaggtggggattcggatctggtgagctgaggggaaggggatgcagtgctggtggcaccaggcacagtcaagcccatatccatgggtctggcctcagggacaacgtgagccagagtcctgggtggtgccacagggcagaaagatgttataaaggcttcctaagggtcgtggtatctaaacagactcgagaacactcactgtcaatcctgaacacaacttaaaatcgccgagttcttaaaaccaaaaaacctagccctaccccagaccaattaagtcagaatcgctggcggtgggctggacagagtgattccattgtgtagccagagtgtaggtttgaatgctgccgggggcttgaagctggaagggagaggggcctgccaggcagagggcggcatgtgagtgccaggcaaacacgggcattgccagcatagactggcaaggggtgaaacaagctggaaacaggaactgtcgccggggttcacaccaggaagttggggtttattcaatgggtggtggaatctctctgaagttttttttttttttttttttttttttgagacggagtctcgctctgtcgcccaggctggagtgcagtgccgcaatctcggctcactgcaagttctgcctcccgggttctcgccattctcctacctcagcttcccgagtagctgggactacaggcgcccgctgccatgcccagctaattttttgttgttgttgtatttttagtagagacgggatttcatcatgttagccaggatggtctcgatctcctgacctcgtgatccacccgcct

SEQ ID NO: 128606 - DNA, 1056 bp, Homo sapiens
agtggagcccttgcgcttttcctcgtagccgctcggcatttcacaccaggcacttcctttctccttgactgtgggcctttgacaccgggcacttcctttctccttgactgtgggccatccttcttggcctctgtagcgccttcctctgtattttccttgcacatttttggccattttccaacactgtcttcaccttcaaccagactcaataattggcataatgtgggttttggttctgatcactttttatttttatgtggtgttcttaataccatcaataccctggtttccagatgtatgtcactgatacagatgttgtctgagctcaggaccagttcatcccactgcatccccgtcctctgtgtcacatggacacctcaaggcacaccctttgtccatctgtctgtccatcatccgtcttggtgctggagctgagacctggacagcaccagccacctcccactgcctcagcccatgtgcagacaccaagtccttgagctctaactggagaatgtagccacctcaactctgtcccctcagtccaagccaccgtccctctccatttctcaatctttctcccctgcctgctccattttccatacaacaggagaatctttcagacacagatcactcccactcagctgtgttccactgttcaagagcaagagcatttcctgacttctgcagctgagtgtttcttcttcctctgggaccctcacccactgtacctcaatcaatgcctctcagttccacagacggcccctacacattcccactcaacacccccaggcatgctcctccccgcaagcacctccacacctgctcggaactccccaacatctccacactgctcccccgagcacctccacacttgctcctcccccccagcacctccacacttgctcctccccccccagcacctccacacttgctcctcccccccagcacctccacacttgcccctctccccagcacctccatacctgctccaacgcccccacctccacacttgctcctccccgccagcacatcctcacttgcccctcttccacagca

SEQ ID NO: 128607 - DNA, 3428 bp, Homo sapiens
ctcttgggcttaagagatcctcccatcttggcctcccaaagtgctgggattacagacgggagccagtgcccccagcccagcctactttaactgcttttttaacaacccacaggtattggttgctctggcatctgaagaacttgccaaaggctggacccagtggtgagtgtccctgctgcagacagagaaccccagtgtgtagctaaaaacgctttccccgcccagtgggtagtgtcccccacagacagtggtggaacccgacacgtatctgataggcttttcctacttggtcctgtatccgtcaccaccttcctgtcactgtctttctcaggtatgacctcacggaagatgggacgaggcctcaggcgatgacatagccgcagcaggcaggaggcgtcctcttcagcgtagctctccacctctacccggaacacaccctctcacagacgtaccaatgttatttttataatttcatggatttagttatacataccttaatagttttataaaattgttgacatttcaggcaaatttggccaatattatcattgaattttctgtgttggatttcctctaggatttcgccagttcctacaacgtgcagtagggcggcggtagctcttgtgtctgtggactctgctcagctgtgtccgtaggagtcggatgtgtctgtgctttattatggccttgtttatatatcactgaggtatactatgccatgtaaatagactattttttataatctttacatgctggtttaaattcagaaggaaatagatcaaggaaatatatatattttcttctaaaacttattaaattcgtgtgacaaataatcattttcatcttggcagcaaaaagttctcagtgacctattttgtggtgtttctttttgaaaagaaaagctgaaatattattaaatgctagtatgtttctgcccattatgaaagatgaaataaagtattcaaaatattaacattttcataaatataaggatgtattattgagaagtaagttgaagggcttataaggaaaaatgttttataactgagtaatatattaagagaattgtcatggttcataaatcacattatgctaatctgaaatttcttacataaaaatgaagtgtcttatgtttattttaattgctgttgtaacttactcatgaaacagtatacagacaccttgtacttttcctcaactgtaagagcagactttcaatgttagcaattaagctgttgtcaaacaatcagtcatgagctttgttaattttcaatgttttcccagcctataaaaaaaggaaggtacacgttgtccttttaaaggttgtgaggtagattggagtgagtagacaggatattgcattaaaaattgaaagctcgatctcattattgtcaggaacccccagtgtgacctcacacataggatgtgggacctttgagccgatgtgcactggccaccaccagggttgggggcgccacagctgcgagcccggcccctgctgttctcagcagccacttcccaggctgcctcactttatgccatgactgaccttaatattgggatattgttatgcaatttttatcctgtttagactgttaaaagcaggtttctgtacttaagagtcccccagacctcctgtgaggtgaggctctgttgcagtgtcgtaggctgtgtgtgtctgtaaagaaagaatgcacatatgtagacgattaagtgtatattataagctatatgctgaaaatggcttccatagccatgagaacatcttaaaactatgtgtaaatatattaaggaaagtatagctttgtaatttaaattggagcttttagcttgtttcatggaactatacaacttgtgggtaactcacatgaccaaacaaaccaaagtgcctgtgacggggcgggtggcgtctacccaccctcccttctagcagattcttattttgtttgaatttataaacaaggctggtggctgtctacccaccctcccttctagcagattttgattttgtttcaatttataacttacactttgaaccatgggtttacttataatggagtctgtagcttcacagcatatttcatgtaatcataaagaccagtatattccctcctgctgaatgacatgcgactgtaaagcctctttataaaccatttccaatgttagtatataggattatttgggaagcgtatcaatacctttatagacaaatacgaacatgtatgcacacaaaacatttaactatggtatttatggaagacaggtaacaacattaaatctagttgctttcccttagtattagatttgttgagggttttttaaaaatcaggtctgttgaaagtcttctgtcataatctataaagcagcagcactcatggaaattgtagcatgccagtaatttttaccaacatcccatacatctgagttctgcagtccagtgtgtaatccgctccatgtgtattttgcttaatggaatgctttatttaagcacttaggcagagtagacacaattaaaggtacaaagcccagaggaagtggtagagcagcaccgtgcctgccctgaggcagtggagtcagtagcgctgtccccagggccttgagtgcctggaggtgcttggcctccagtagctgcctccattctcttttaaaaaaagggggtgattctgaggcactgaagtgcctcccagatgtggaggagtgaagccaccatcgaggccacactcagcactccaggatcccagcgatgtcagacactcttgagttgtcaaaacgttaattttcagttttaaataatcagtttatctaagaaaagggaattttaacttttctaccttgagccaagccaatgaagggaaaattaattaacttagtaaatttgaagtgcagctctgttagctcgtacatgtgggttcttatcctgatcctgtgccttaaagtaggaaggtgtttccaagttcagattaaaatagaagcagctggccgggtgcggtggctcacgcctgtaatcccagcactttgggaggccgaggcgggcggatgacctgaggtcaggagttcaagaccagcctggccaacatggagaaaccccatctttactaaaaatacaaaaattagccgggcgtggtggtggagcgcacgcctgtagtcccagctactcgggaggctgaggcaggagaattgcttgaacccaggaggcggaggttgcagtgagccaagatcgcaccactgcactccagcctgggcaacagagtgagactccgtctcaaaaaataaataaaatagaagcagccttgtaactgtatttaccatgataatatattctgcacggtaagaattccttttacagacattctttatcaagaggtcggcccttctttttcaggcacataagccaaatgcaggcctgtgtgtagctgtgtgttttttct

SEQ ID NO: 128608 - DNA, 1062 bp, Homo sapiens
tgaaaaagaagggccgacctcttgataaagaatgtctgtaaaaggaattcttaccgtgcagaatatattatcatggtaaatacagttacaaggctgcttctattttatttattttttgagacggagtctcactctgttgcccaggctggagtgcagtggtgcgatcttggctcactgcaacctccgcctcctgggttcaagcaattctcctgcctcagcctcccgagtagctgggactacaggcgtgcgctccaccaccacgcccggctaatttttgtatttttagtaaagatggggtttctccatgttggccaggctggtcttgaactcctgacctcaggtcatccgcccgcctcggcctcccaaagtgctgggattacaggcgtgagccaccgcacccggccagctgcttctattttaatctgaacttggaaacaccttcctactttaaggcacaggatcaggataagaacccacatgtacgagctaacagagctgcacttcaaatttactaagttaattaattttcccttcattggcttggctcaaggtagaaaagttaaaattcccttttcttagataaactgattatttaaaactgaaaattaacgttttgacaactcaagagtgtctgacatcgctgggatcctggagtgctgagtgtggcctcgatggtggcttcactcctccacatctgggaggcacttcagtgcctcagaatcaccccctttttttaaaagagaatggaggcagctactggaggccaagcacctccaggcactcaaggccctggggacagcgctactgactccactgcctcagggcaggcacggtgctgctctaccacttcctctgggctttgtacctttaattgtgtctactctgcctaagtgcttaaataaagcattccattaagcaaaatacacatggagcggattacacactggactgcagaactcagatgtatgggatgttggtaaaaattactggcatgctacaatttccatgagtgctgctgctttatagattatgacagaagactttcaacagacctgattttta

SEQ ID NO: 128609 - DNA, 1024 bp, Homo sapiens
ttttctaacagctcagaagcacctttgcctccgtttctgttactattttcttattattcaacacacctcttataacaccacacagggagaactatttcaaaggtcaattttgtttcttccaccaagaggaaaaggttaacatctgaagcttgtgataactacagacaactttttcctccgtatctaaagaaacccttaacacacacctatgagtcatggggcttaaataaggagccaacacagacatccgaagacaaacaaaagagactgagcaacagggatgggatccaactacgtgaaagagcaggtctgtcctcacacaacggggaggccagggcttctccagtggccgcagcgaggcccgcgggccagctctgcgtctgtcttcctggcagaggcccaggcacacagcagcgtcccggcgctgcctcctgtctttcctactgtgaaacctattactccatcacgttctaatctttaatgactaaatcctagaaaatggcaggttttatttccaaagtccgagatgcagtgagcaaaacggcaacacaacctgaagtgctttcagttaacctaagattaggcctccctccccaaagcatgccggcctcatgctctgctgcgttaaacgactctcccccagcgtggggtggggggcgcttgctctgctggtgagaaacaacatggtggcacttagttacttttccagctgcctcagcctttgccgcagctcctgggtggcgatgggcagcgagatgtccgaggcgatgctgggggtcggctccttgactgagatgtggcctggggaggccaggaggctggaggagcttctgcccaggtcgtgcagcccctgagggccggcctcagggggctgggccttttcttccataccaggcttatcactgcccccaatgactggtgtggatggagctgtgttgctgccaccagggcctggagacccagacatatgagatttgatggatgttttcctcccctctttggacacagagggacgtttgacttg

SEQ ID NO: 128610 - DNA, 1069 bp, Homo sapiens
aggagcttgtggtgtagtgcgcgatggtcacccctgtgaagagctacagcactctggcctgtgcagcttagcaggtcctcatctctgggaaaaaagtggtatttgtatcacagaagtgacattttggttacctaaactttcctttaaaaaaaaatttttttttgagctaagttttaaagaaatttttgcaggtaaagacatcccaggctgttccagtattaggatgttaccagtgtcaccaagtttaatttttatgtttatgtccacctctaggtgctccatctcgaaaagcgagaaaggcctccagaccaccaacactcagctcaagtcaaacgtccctctgtgtccaaagaggggaggaaaacatccatcaaatctcatatgtctgggtctccaggccctggtggcagcaacacagctccatccacaccagtcattgggggcagtgataagcctggtatggaagaaaaggcccagccccctgaggccggccctcaggggctgcacgacctgggcagaagctcctccagcctcctggcctccccaggccacatctcagtcaaggagccgacccccagcatcgcctcggacatctcgctgcccatcgccacccaggagctgcggcaaaggctgaggcagctggaaaagtaactaagtgccaccatgttgtttctcaccagcagagcaagcgccccccaccccacgctgggggagagtcgtttaacgcagcagagcatgaggccggcatgctttggggagggaggcctaatcttaggttaactgaaagcacttcaggttgtgttgccgttttgctcactgcatctcggactttggaaataaaacctgccattttctaggatttagtcattaaagattagaacgtgatggagtaataggtttcacagtaggaaagacaggaggcagcgccgggacgctgctgtgtgcctgggcctctgccaggaagacagacgcagagctggcccgcgggcctcgctgcggccactggagaagccctggcctccccgttgtgtgaggacagacctgctctttcacgtagttggatcccatc

SEQ ID NO: 128611 - DNA, 1081 bp, Homo sapiens
attgtctgtggacctttctacatttgtttgtttgtttttgaaacagttttgtcacccaggctggagtgcagtggcgcgatatcagctcactgcagccgcctcctcccaggttcaagcgattctcatgcctcagcctcttgagtggctgggactacaggtgcgcgccaccatgcccaactaattttttgtatttttagtagagatgaggtttcaccatgttggccaggctggtctcgaacccctggcctcaggtgatctgagcctcccaaagtgctgaaattacaggcgtgagccaccccacctggcccctttctacattttctaagttcctatctctgaggacaaagggtcaggagcgtagacaacgtagaaaggttctgcagacatgatcctagttatgccagtgtttccaccctgtgttttgcaggtcagagacgagcagcaccagtgttccctggggaacctgaaggtccccctcagccagctgctcaccagtgaggacatgactgtgagccagcgcttccagctcagtaactcgggtccaaacagcaccatcaagatgaagattgccctgcgggtatcgtgtcgtcctgcagtgaacaccataggggatggggaggcgggtgctggcagggatactcatgggccccgggcatgaggccggtgaagaaagctctgtgtcggctgcagctctgggccgcaggagggcgccggtgcagggaggagatattgttgctgggtatcagagggttccggggagaagacaaaggctgggactcagccatagaacaggccacgtttccaggttgcccgagcaggcccacggctactcaaacagtgctttcctgtgaacccagcaaccttaccgttatcctttggcccagaaagtgttactgttggtatcaacaaggttttctcctaagtcttaacttttcaaaggttgttcagaagagagaatttaataaaactccacgagacagtagaacttacaggaaaaaaatattttttgtccaaaatcacgattcatttgtaaatagctaaggaaatattgaaagtaaaactggcaaacatatggggaaat

SEQ ID NO: 128612 - DNA, 1049 bp, Homo sapiens
ctccagcctggcgacagagcaagactctgtcccccctaccaaaaaaaaataaaaaataaaaaaaaaaagaaagaaattgcccgaagttacaggtcatcactcactgaattgtgaacagtttaagagacgtgcccaagtgctcaccctcctcagttcggaggagctattacgttggtgcaaaagtcattacagaaccgaggccaggccacgcacacgaagcctttatctgtgggcgcacaggttggggcctcatgacaaactctaaaggctttagaccgtctcgttatcttttcaacacatccaccatcaatacataatagtgcatacctgcaaatacatgtcttggaatttaattaaggtcaacctaagcttctagttttttgttttatttattttctttttatttttcattctaagcttctaaacacataaaatgagtagcccttttccacagaaaatatcagagctaataatttggatatttcttctagattcgatacaaaaccaatgaacctgtgtgggaggaaaacttcactttcttcattcacaatcccaagcgccaggaccttgaagttgaggtattttatttgcattttttaaccaatttattgacaaataattgactttttaaagtatacaatttgctgagttgtgacccgtgtatacacctggggatccatcgccagaatcaggacaattggtagatctctctgtaacccgggcctcccctagccccaggcaaacacagacctgcctttggtcactgtagattactgttcacattttccaggattttatacaaatagaattatgcggtatgtcctctagttgtctatattctctggtgataattattctgaggtttacctgtgttgttgcagatacccacagtttgtctttttttattgttgagtagtagttatggatataccacaatttgctcatccatttacctgtgagtaagacattgataaaagattgggttctttccggtttagacctattacatataaatctgctgtgaatatcacatacaagactgtgtgtac

SEQ ID NO: 128613 - DNA, 3633 bp, Homo sapiens
aggtgcgtctcagcggcggttccaggacctgacctggcctgagagggacttgggcggctgtggcccattcattgtgcttcaaataaaacctttaattatgattggtattttaggggtttattcagcatagaatagtaaatagaaccctttcctaaagccccactcttgtatttgtgaaatcacaagggatcaagagggtgggggtagtaaaagaatattaatcataggggataaggagctgtcttttgatatgcatagattaaaggttcattctaagatgaagtcttgggcataaagaattttatacgtggcattttggttgtttgtgtaattctggtggttttgtttaaagatttttgtttgtttattcccataaattttcatgtctttaaccttacataaacttcattgcatgttttattaacccttggcatattcgttttcttctgacttgaaagagtaacccattagaatttaaccccgatgtcttgaagaagactgcagttcagagagctttaaaggtaaactgttttcccttcaggtcacagagttaatgaaaacatattgaaagagatgatactttgtctcataagtttattggcaaattacctcccatatttatgtagtaattaattgtctagtggaagagaccctacttttgttatccaataattagtagttagaacaattaaagtcaactttgaaggtaaattttataaagtactagtatgataaattagattattttcctgttggctttaggcaactctctctaaggtgatttaagtatctattttaattggatttgaatttgtgaaaattgtgatatagacgttctacttaaaatcttaactgatgtttaaatcatgacttaaagggtatgccttgtgaactgtgaatatacatttaaatatcacctcttccaatatgttgagttagggtcatctctgagtcaacaccttcatggcttctggtgctgctgggtttgggtgatctcttgagaagctttcaatttcattaaatgaggtctattgaaaactaagctccactccctaaaatatgacatccacgtgtgtgctctggcaaattgttaaaaagttttcttatgatttaatgttttattattttttctttaatttctttgaatattttaggcttaaattttagggagaggtggggaattttaaatgaaattatttaaagaaaattctatctattctaaagaaacaggaactgtttttaaccagtctcatctggaaaaaatgagttagatttcaaaagtgcaggagactggcagagtctgctttatattgtggtatttgcgaacccccacttcgtcctgcaccaaggagataagttgtgggttactaggggttactcctgtggagtactagttagcacagtagttgaaataactgtgccctccagaacattgaaaggaattacatcaacactcttctttgctatctgagaacataacgttaaggctgaaggccctgaaatcagactgtgtttaaattgcaacccaactgctcagcaagcagtgtgacctccaacaagacacttcgtccactctgttgtgttatttgtagaatggaaggagtagtatcctcttcatgaaattatcgaatacattaaataaaagaatacgtatgaaagtgcccagtgtagctaggataatatatattataattgttatattattaaattagctcacctagtttccaaaaatgcccattttgtaaacatgcaaactgaggttcagatagatgcaatatttaggtctcaataatcaagggataaacagagctgaggtttaagttcaagacaatctgacttaacgcttatatttttattatactttgtccctttgacttgtgctgatggattttgaatattgcatcatagaggaaaacttaatgatttaaccttatttcataggattgaaaacatcatccattttaagatacatcattattttatgaaccaataagattttaaatgccgctaagttttgacagtgtttattttatacttagagaattttaggataaacagttttatcatgtcactgacaggtatacctaaacagaaaatggaagcgaaataaattggttagggcagtgacaactctcactactgccaacctcccccaaaaaggtatatattatcgatttaagattcattctgttttcagagatgttagaaaattggggaaaaaaaagtatatgttttaaaattgacaaggtgcagtcaatttctaggaacaggtgaccactttttcagagatgaagtgtttatattaattaaggagcacttggtttctgtatctaataatagaactgacttagaagtagcagtaggtgatgtccctctaaagtccgggggttctggcctggggatctgccacgagctacctgtggctccagcccgaggggacacagcctcctgtggggccagaacttagttacttggccatgcctgactgcaagggaggttagccaacaaaatctgtatttacagaggacttgtgctcagctaaaacttgggaatctaatattaaaggaaaaaggagaaaattaacttaggggggaaattagtattctcttccacagtaatctgtagccttggaaacttttttcaacagtacttattttgcagaattcattcacatcagaaagatgaaccagaaaatagattattgcagtaggtttgaactaataatatttcttccaataatgataggattttgacacctatttctgacactgctgtattgttgagtcttgactctaaaattatttaactcaaaaacatttttgtgaccttctaattaatttccactaacacagatatttaactgcatcttcttgtggggctaagttataaataaacctcatgtcacacgtatctgctgctttactattttctcctatcaactatctgtgctagtgtgtacttcttaccgtttttcctagtcctgaattttttcttcatatttatatctgcttaatttaatatgattctaaactgatgattattcttccagtcaaaattatttagcagctggtaagcaagatttgatatgtgaaagcttaaaaatgctcaaacagaagacgctaagttgagaacataaaaccgtgtatctgacactctgtactatttttattcccgccagagaaatattctgaattttacgttcttttacatttgtcttttaatgatttttggttttcattaattgcactttattcattttcgttatccttgtaaataaaagaactttcgaaaagtgtgattaacattaagaatttttagaagattcagttttccaaagtagttggctttaaaaataccagactctaacctttaaaatttgtgtgcaaatgaaagttttgtagttatggtttggggtgtgtgtagcttatgttttcccattaaattgttcccagatattcccttaaatatcagagataaataaaaatgactactaatataagccagtaatttcatttttagttaagacccatttaaaatgtgtttatttattttgtctgttttctgtttgttttgggtagtcagggaagaaaataagcagcaacccaaatcctgttgtccagatgtcagttgggc

SEQ ID NO: 128614 - DNA, 1074 bp, Homo sapiens
atcctaaaattctctaagtataaaataaacactgtcaaaacttagcggcatttaaaatcttattggttcataaaataatgatgtatcttaaaatggatgatgttttcaatcctatgaaataaggttaaatcattaagttttcctctatgatgcaatattcaaaatccatcagcacaagtcaaagggacaaagtataataaaaatataagcgttaagtcagattgtcttgaacttaaacctcagctctgtttatcccttgattattgagacctaaatattgcatctatctgaacctcagtttgcatgtttacaaaatgggcatttttggaaactaggtgagctaatttaataatataacaattataatatatattatcctagctacactgggcactttcatacgtattcttttatttaatgtattcgataatttcatgaagaggatactactccttccattctacaaataacacaacagagtggacgaagtgtcttgttggaggtcacactgcttgctgagcagttgggttgcaatttaaacacagtctgatttcagggccttcagccttaacgttatgttctcagatagcaaagaagagtgttgatgtaattcctttcaatgttctggagggcacagttatttcaactactgtgctaactagtactccacaggagtaacccctagtaacccacaacttatctccttggtgcaggacgaagtgggggttcgcaaataccacaatataaagcagactctgccagtctcctgcacttttgaaatctaactcattttttccagatgagactggttaaaaacagttcctgtttctttagaatagatagaattttctttaaataatttcatttaaaattccccacctctccctaaaatttaagcctaaaatattcaaagaaattaaagaaaaaataataaaacattaaatcataagaaaactttttaacaatttgccagagcacacacgtggatgtcatattttagggagtggagcttagttttcaatagacctcatttaatgaaattgaaagcttctcaagagatcacccaaacccagc

SEQ ID NO: 128615 - DNA, 1744 bp, Homo sapiens
tagacaagaaggcaaagaagcgtttaactcacttcttgacacacatcctggacctcagttatcggcctctcgatcccctgtagtcttgccttgccgtggtcagactacgcttcatagttcacgatatgcacgcccttggcttcctccagcaccttccacgttctgagaactgtgcatttccttgagctttgcacagaaatgaagtaaatacttgtgcacccgtgcattttatttaaagttacctacaattaagatatgattgatcacttatatttcatactgggaggatgtgattgtactctttgttgtatgtaattgtatataattgcactgtttatttcaatgaagctttcttgaccgattttaacttcttagaagaattcttacatttctcttatttaccttagcctttgatcagtcttccagtctaaagtctgtgactttacctgttacaatttcaatttggaaaaagttatttcattaagtatttaatctttccacagaatttctatacagtagaattgtttgcttttagccatggtaatgtttgttgtaaaggcttccataatgcctgatggaagtgaatttgttttctattttagggtagagagaatagtatcagtgaattgactacaaaaggttaggcctctttagaactgtgtgtgttgtcacattaaattgaaatttgaataatgtcacataagcaaaaaaaacaaaaaacaaaaaaaaaaaaacccagagagactgtattgatcttctgttaaaagggcactttgtgcatggaatgtgctgtggccatcagaagcaaaggatctttgcagagccgcggggtgcctggcgcgggattaaggggcgtcccgcgggctctaggatcctttggctctggattaaggggcgtcccgcgagctctgggatcctttggcgctggattaaggggcgtcccgcgagctctgggatcctttggctctgcctctcactgtctgtggtgctcctggtgctctcattgaccacaatccaccgttctctgctttctcccctggctccactgccctaagggcatctacgagggaaactttgggtgtggctacttaaaagagaggcgagcgtcgggactagtgttttgtgaaaataccgcctcagtctatagagcactatttgtgagtcctccggggttctttctttctttgtctgtttggaaactgccagaatgtggactggaacttctaatgcagttggctggcggtggactgatgttgcatgcttttattttcttgcatgattttaactattgtgtatttattttgtgcttgttttgtgaaatgtaacactgttgtaacattggagagcatctgaccatgagatgaacaaccctggctagtagagaagtggtcctccattcctcaactgctactggctcgttgaaaaaaacctctcctgaggagaaatgaagccataatgattaaaattcattttcttgtggttcatctcaatgtgagatgtaaatttttttgtaaagtttcacaaaactgttttaaaatctatcccctcctttttttttttttttttttttttttaatttgagatggagttttgctcttcttgcccaggctggagtgcaatggcatggtctcggctcactgcaacctccacctcccatgttcaagtgattctcctgcctcagcctcccgagtagctgggattacaggcacccaccacgacgcctggctaatttttgtatttttag

SEQ ID NO: 128616 - DNA, 2685 bp, Homo sapiens
ttactcactgtagcaccaggatctagtacagctgggtggcctgtgtcaccagcctccttgagataagcatggtactgtgctgggtcctctgcattcggcgtccctctgccaggagcgcgctctggggctgcgtggggctgtctgtcctcgtgtctctgtggaggggttgtccctccagaagcccatctgttctcctctgagccagcctcacctgggcactgctgccttgccctgctcttgtttgtctcagcacctgcttctcctatacacacttgcatttccccgctgctgggatgtactcggcaccagaagagggtctttattccctcggcactcccaattctcgagacggggttaggtgcgtagctatcttccatgccagttaaacaagccagccaagggtctaaacttcagtttgttcttcttttcagggtgttctaaggatacattttattgaagctcaggatcttcaggggaaagacacttaccttaagggacttgtcaagggaaagtcagacccctatggaatcattagagttggcaaccaaatcttccaaagcagagtcatcaaggagaacctcagtccaaagtggaatgaagtctatgaggtggggtgtcgtgtctgctgtgttgctggggtggtgggctgagccctgagcgggatggccaagctctcattccagcacagtcacgtgggagtgtggctcatttaggccatcatttaaatgttccttgtttaatttcccatctttaaaaagtgtcgtaccttctctccttactacacaacattcttgtcatgccaacaagtaatgttttaaaccttaattacataatgctatcatactgaatgatcagcaaaatatttttcataatgtgagtagcttgtatttctaagtataaaatgttacgtgtggttattaatgcagtaaacacaaaaatgaggttagttatatacctccttgcaagcttttttttaaattaggacatcttcacatgtcaatgaatagagatctacgtgatttttaataaccattccatcgaatagacgccttcatctgtttacccagagaggcctaggctattcaggtcagcattacaaacaatgctgtacaagtagaatgtgagtgtctcttcactcagccaagttttccccagataaagctctttaaagtgaaattgctggatcaaaagttacacatttttaaaggactgaaatatctttgtagaattacccttcaggacagtcgtgtgatttatactccaccagtttttaaaggactgacgtatgtgtagaattacccttcagaacagtcgtacggtttatacttcaccgtacgactcctctcccccactcctttgtgagtctggtctcttgccagtttcttaccctgagtggtgctaagcagataactcgtggttattccaagatagcatctgagtggagccacttcaggactagagggatgtgtcctggatctttggtctgtctcatgccttgcaccaagcttgtgggtgacgtatcatgaccttgttggagtgattgaacttgatctattgagacgcaatccaggatccctagaaacaagcacggtagactgttactgtgtggcaggtgtttcagtgacctcccgtcctcaagaggtgtgtgtgacttgacaataaaaaaataagtgtcctaaaagaatttactggctgggtgcggtggctcacactggtaatcccaacgctttgggaggccgaggtgggtggatcatttaaggtcaggagtttgagaccagcctggccaacatggtgaaaccccatctctactaaaaatacagaaattagccgggcatggtggcacatgcctgtaatcccagctacttgggaggctgaggcaggagaatcgcttgaacccaggaggcggaggttgcagtgagccaagattgtgccactgcactccaacctgggagatagagcgagactccatctccagaaataaataaataaataaataaataaataaggatttaccaccagagaaaagtacctggtcatatttactacaatcatcatatcatactcagtgtatgactatattagtaaaaatgcacttaactactaaccattgatgttttaggctttagtgtatgaacatcctggacaagaattagagattgagctctttgatgaagacccagacaaggatgactttttaggaaggtaaataaagcccattgtggttattggaggagggcatggggtcagtctttttgtttaataatcaaaagtatgttttaaaatacatttgtatacttgttgtctattcattaaatggttcttagatataacaattgtttcaccttggatttcttaaaacatttttattcctaaaagtttcacatttaagagaagtgagtcttctagatctgtgctgtctattacagcaggcactagccttaagttaattaaagttaaataaattaaaaactatctgagtggcactctctttgtttacaaggcttaaagctacatgcagaacctgccgccgtattgagttctagtggacagttctattccagattgcaaaaatgggttttttaagttttttgagttgctggattaatttttgtcaggatatagtaattcacattgggaaaataaatactggtttgttcacttcaattgaacaactagtatagcttt

SEQ ID NO: 128617 - DNA, 1046 bp, Homo sapiens
attgtgttttaataagcggctctaagctgagtgttgaagtcgtaagaagggtgaaaattatgattaaatatccgttatgttttgataagcgtctctaagctgagtgttgaaggtttaagaagggtgaagattatggtggaaacaaaatacgggtgatgagtagtcgtggttccgaaggacacacagggaaatagtgactcccaagaaagtaaccacttcaatagacgcttctgtggagacctaggggagcagcatccacatccacagttcggggacatgcagggtgtagtggggtgaggaggcgcagtgaggggagccccgccagggagctccgtcagagctgctgtggcctccgaggccaggagtctgtgtgtgagaaaggtgggtgggtcctgcctctgcgtggtgaacacacagccagtgtctgctggctgaagccctccgaatctctgtggaagtattaactgtctgaataactgacctgttcataagtagagtagtgttacatatggtttttcttttggggatttaaaaaattttttcccatattaaactgaaaagtccttgaggtgctgggtcatcacacgtggatactgtcttgcagtgggtggttgggcattatttgttgaacgctgacgattatcacggtctcagaatttatttgtaattatgtatgttaataattttagcatctaaaacattacgggcgagaagcaaagtactttcgcaacttcacaattcaggtaaaggtgttatacagcaacgaaacttaggtttataaatgtgtttaaaagtgctgccacatatgcattatttaattctcacgtttaccctaaagaataggacatatatatatgtttgtttgtttaaatagagatgaggggtctcgctctgtgttgcccaggctagtctctagctcctgggctcaaacagtcctcccacgttagcctccccaaagtgtagggattacaggcgtaaggcaccgtgcccggccaaaaaagatatattaaaagtacatctttgaccaggcgtggtggcttacgcct

SEQ ID NO: 128618 - DNA, 2034 bp, Homo sapiens
gtttttggtgaggtatgtgaaaaggacattttcatacactttggttgggaatgtaaatggatacagtatttttggagggcaggtaggtaccatctattgacattaaaaatgaacataagcctttgaccccaaaatctcactttttgaatgctagtctgcatatgtatatgagaacatgtatgtaaaaagatattccctgactcattatttgtaattacaataaagaaaagttgtcaaaattctaagtatccatccataggagagtgggtaaataaattatttcatgattttactagcaaaaactgtgacattatcaaaaaacaaaaagaggcaggtctccacgtaccaccaaagaaaaatgtccttggtatattacgaaggatgaagggtgtgggtctgtgttgtgtactaacccattttgtctacaaagaaacaagcctgtgtgcacctgattcaataattggaaattgtttggaacttaatattttgcccttgttttaaaacagcttttagaaattaactggacaggactgacgaatcttctggatgtccctggattgaagtaagtctcgtgtctggtcccggaggcttagcgttcgagggcgtgttgtgcattttggatgtcttgacaatagtgtgagaatggttaagacctgcgtctgccaggtgaatgggtgccttctccacaggctgtcgtgagaaacaagcagagggtacaggggctttgttctgcctgccgggagctgctgggaggcgatgggccagggcgggagggctctggagtgccagctgaggacgcagtcttcatttgcgtttgttcaccacaaggtgtcttcctggccttggcatgttcgaaaagtagaggtcttttaatattttgtaaaaacagtttgcaaatttttttttttaatcttctcagaaacaataaaggaaactttaaaaggaaatgctttccagggtctctccagcctatggctaccccaccctttctgccttttttttttttttaacttttattccattcctttttgaaatgggttggggacagtgtggacttctggacttcgccagaactcttgagtgtgagaggtgaggaacttgaagttccgtatcatttcactgggagtcccttcattattccgtagtgatctagtgtctaaaacaggagaaaaatgttccataacaagcatctgaggccctggagggtgcatccctgcttagagacaaggagtcattctagttgccgtggtgccattacctgaaacagtgcgtggggctgtgggtggcagacctgttggtcacctccaaataggaagttttgaaattacagcctctaaatgcttttgctggctttaccgttttatttgaaagttaaaacatatcacctgtgggttaaagttatatgtttctagtggatattttctagtgtgatttgttttccctaaaatagtttagaaaattatgaaacttggtttcagactatttttttattctcatatatttgtttatgcctctgaaatggcctttctaaagagttttgtttcattattagggaaaaattaggactttaattatctgaagcacagtcatcatgaaagtcctttttaggtgctgtggtttactggatgcagaaaaatgctgtgatctttaaaagatctgcggaaagaaagcacaactttaaaagattggttaaagagttcattaagattctggttgcaagcaacaaacctgacttaagtggtcttaagtaggtaaataagtaagtttctttttttttttttgagatggaatctcactctgttgcccaggctggagtgcagtgttacagtctcagctcactgcaagcaccacctcccaggttcaagcaattctccctgcctcagcctcccaagtagctgggattacaggtgcgcgccaccacacctggctaatttttgtatttttttagtagagatggggtttcgccatgttggccaggctggtcttgaactcctgagctcaggtgatctgcctgcctcggcctcccaaagtgct

SEQ ID NO: 128619 - DNA, 1009 bp, Homo sapiens
aaggcagagtcagtcaatgcagcaaacttcactgttgtcttaccctaaccttcagcaaccaccaccccggtcagtcagcaaccatcagcactgaggcaaaaccctctaccagccagattatgacgcgctgaaggcttatgtgatcgttagcattttttagcaataaaatgttttaaaataaaggtatgtacatttttaaaaagatataatgctattgcacacttaagtatgccttgggaaaccaaaaaatgtgtgtgactcacatgttgcaatattccctttactgcactgctctagaacccagcccacaatatctccgaggcatgcctgtataggaaaaattctttatttctttgttaaatagcatctttgaattgtattctctttcctgttcttttaactacaatggcctcatctaattgtatttagaagcttacctgccactttccttgacacagccatcctttcctgaagttcatgtggcccctgtgtctcacagctctgcggatggagcagtcaccagtgggtgtcctctgatggtgcgctgtgtgaggtgcttgcattttaacctgagtcaaatgcaagattctgtgctatatctttgatatgttcttacttcctgatgtagatttgtgatcagaagtaacaaccttcagaactaaatgatagaatcctgttgtgatgcccttttaaatcttcgtttcctcatgacaggtatttttgtatgaccagaatattttgctgtggcagggagtacctgttcctttttaagttgtgtaagagaaaagagaaaggaaaatgagctcttaagtcagtgtttataaatatattcatatgatttagaatgtagaggtttagccaggtgggttcaatgggtggactagggaaaaacatttattttaagggggaggtaaagcataggttgatactgatgtttgcaatccagtttgaagattagttgcctattttttccttcctaatattttatatttatatctcatttctgtta

SEQ ID NO: 128620 - DNA, 1054 bp, Homo sapiens
tgctttaagcaaatggggataaaaaggagacgaatttatttaaaacataaaaatagcatatattgatgtctcatgacgtgtacaggggactgcagttgagtctcaggaacagaacggaaccaggaattcgaaagccttcgtgactctctccacctctgctcgctttcctctccctctgagactagcttcatctggttctgcagtccacatgtggaatagcatgtctgccagcacttcagagaaagccttgcgtcttcctgcatccttggcctctccctttggcctcccagagtactgggattacaggcttgtgagccattccagctgggtcagataccgacccctggaccagctgggggtaggagggttgcagtgtttgaacagggctccctgaagcccattcttaacagccttgcagatgaggctgcagtgaattccagagtcagggccacaggcacatccacagactcagaccacacgttagtaactgggagtttttgcagtatttatcctgctcttttccccgactttctgggatctgtggtttgatgtttatattattttggacagtcttgcccacccccagtagagggggtacagaggagcttcctgttgtcctggtccatcctgggtcttggggccagagctctcccagagaccctcctcctcctccctgtgccttgtgtctttggcgggtcttttgcaggagagggtctgcacctgccccagcaatagaggtctctaccagcctgggacattgtcctaccatgtccttaagggacctctccccagctgcagtgggttctcaaggtgcttccctcccccatggcttctgtcccttaaggtggaaggtggggcggggcttcctttgtgcccttctacagtggcagctgcctcctcccgggctcctccccatgggaagtgtcctccctggggtcgtctttgcacaccggggatgcaggtgccaccacgtgatgtgcacacctctgtggttctctgactcacccacacttggcctgtggcctttcattaggatcttgctggagtcgtctca

SEQ ID NO: 128621 - DNA, 1388 bp, Homo sapiens
tgttatagaggcctagggcactgtgagatttatcatgattgggaagcaaggtgtgaaatttatttgtgtgaaataaaattaaactttttaatgtttaaacatcagatttataaggtaagaaaactacattgcatcaaaagactgcttcagaagttgcagtttgttattcgcatcttcttttgaacatggacatttatatttagttaagtgttttatatataagaccaacaacaaccacagccattgattgattgattgagagtattcctcccaacgtcatagcagtgttggatctgataacagcctgcacacctggagcagtaaaatactataatttgatgggccacattttagggtttttacctacaatctgatttggttgctttactatcattttattcagattatacatcttgcaggtctataatgattaagagaatagttcatttcacttacatcatgtaatgcagaattttttgttagttttgtaggaaattgtgagattgatttggagatcaaacgatatttttgtagagctggtgtgaaaagtatccaggtaagttttttgtttttttgttttaatttgacagttttctaaagttctctaagctgtattcaaaaataaaattaggaagtttttttagcttggaatttttttgacgttcagtttttagctgtaggtcatagttgagataaataagaagtcacatgctcaaaagttactaagattcgcatgcaaactccttgcgttaagcggccctgcagaatgttttctattacatattttggtttcctgtttgagtttagattcatggtaccatgcgggtgatcctggaaccgttgattggagatatgcccttagttggagctttgtctatcttcttccttaggaaaccagtaagtcaatatttatttcatttttattttcccatttggtggcaaaaatacatacccgtggaagaatatataaagtggagaaacaaaattttatcaactcaccgttgtccctttctgttgtgtgaatcctgtgggagttttttgtatttctttgtgccttaactgagagcttatctcttgataaacagctctctttcctgattataaaaatgttacaaaaatttggaaacatggacttcttcagaagggtgggtcttagctcacattttattcaccacctcactgaatatgatttatagatatttgctcatttaatcctcatgactctaaagctaaatgttaacattgttttctcttactgttcagaaactgagattttgaaagtcttatttttccaagtcacacaattaataagagcctgtatacagatccagtttagtctgatacagagctcatgttcctgaacactttgttgagaagactcatctgta

SEQ ID NO: 128622 - DNA, 1064 bp, Homo sapiens
aagtcttaagaaatgaaaaattatgagacataaagaataaatgaaaggaagttatgtttcaaacatggtagtaaggatggagtagagggaaagggtcaagttagatgtgaagagacgagagtaagaagcttgaaaagagcacatacgtattgttacatgtgctgacaacagcaatcatacccagtgcttattaactgctgtgggcaaggcatgcactgctgtcttgacatttattttgtcacctaatttcacagtaatcttatgaaacagaggcccttgttttctgcagctcacgggaggaaggtgaggaacaggtgttaaatagctgaaaatcaagccacactctgttatgaaggcagaattttaattcctgttgtagtctgaaatttaaagcttgttctgtttgtctctatggtatgttacacggtttgatttttttttttaacctctgtatcttaaaataagctacttcttatttcagcccctcaggatcaatggtgttaaggtatacactgaaaatgtagacaaaaggcaaattattttggaccttcagattaggtaagtttttatttgttatatttgtgttatggttaatggcgtgtaatgtcacttagctgtacctgtaaggtggaggatacagtgagcacacgtcttacctgctgttgattggaattcgactaaattcttgttagacatccaaatattatttaccttctgggtctcagtttctaacagccttgatcattgccattcataaaatatgttaaataagaagttaaagacactgcaaaaaaagaaaactatggaccaatattctttatgaacattgataaaatccttaacaaaatactagcaaactgaattcggcagcatattaaaaagattttacaccatgaccaagtaggatttattcccagaatgcaaagataattcagcatacaaaaatttgtcgatgtaacacaccacattaaaaggaaggaaaaaaccaaatcgtgattatctcagttgatggagaaaaagcatttaacaaaattcaataccctttcatgataaaaacactgaat

SEQ ID NO: 128623 - DNA, 1117 bp, Homo sapiens
gattacaggcatgaaccaccgcgcccagccttttttgttttttaaagagaggcggttctcgctgtgttccccaggcttgaactcttgggctcaactcttgggctcaagcgaaccacctacgtgagtctcccaagtagctgggattacagttgcatgccaccatgctcagggctgtgaggaagattcttgaagagtttttatagagattaataagggcaatttttcattactatttttatttatttgaaaatattatctcttcataggataaagtctgactctatcctgcttttactattgccaataaatgctgattgtatggctgctatggataatactgtcacggataatactacttaactgttctgacagttggtcttttattaccctcatacttggattattgagaattaaagcatattagcttccttggttatgttgttctgtacttttgtatacaaactttctctggggagagctttcttcccattgcccttctgggaagttcaggaaaatttaactctagcaaaaatatggtatgtatagtctaagaactaaatgaacagaagaaaataatgcactgtgatctcatgtaaagaaagggcaaatatttttttattctcagtgttaatcattgacttaatactttaataaaatattgtgaagacttgtaactgaaaatagttggcatagctaattcaggagccacaatttagctattttaaacaagtgcttcttcagcacctgaatccgagtggtcatgtggttgaggaagtgttggagtcctcatcgtagctgcagataggatgaggatgctgcttgggtttcttgttcacacccacactgcggctgagacacagaagggaaaggatgtgaccgttgttgcttcagttctgtggtctgagaacctccttcagttagaacattaatgccccaagatggctaaaaataaagcagtaaatatcaggtttttagtttaagctaaaaaatagatttaaatttaggatatatgcaatccatcagcctgtatgttgtggatttagtaaaatttctacttaagattaatattattatcattctacatttaaggatgggagggtatagagctaggactgaa

SEQ ID NO: 128624 - DNA, 1081 bp, Homo sapiens
gacagtgattatgttgacagttttagagagattttaaaaatatcttttaaattatacttatgtatctattttgtgatatttattaaaagtgtaatatactttattttcataataaaaccagcaggttgcatggtctcgaagtgtgcctgaaattctgctgcgcggcaggggtggtgggggtggtcaaagcacatcaataatagaagaaactatgaataagaaaagttaagatttcagtattacttgcactttgggtttgtttttgtttttttttttttctagagatgagttcttaccgcgttgtccaggctggtctcaaacttttggcctcgaggcatcctcccacttagacttcctaaagtgtggggattacaggtgtgagccaccatgcctggccaatattactagtaccttgatttttaccatacatacattggtgcttggggtttctgaactttggactggtattttgccttgaacaagatgtatctgtacatcccaaaggctgtacttgttttcatagtgtgtcgttgacaaccgtgaattcatggcagagtggaaacataggaaaacatgaattaaggagatactaatttcctcacctcacctttgtatatattcactgacagcttttcttcttactgagtaaaaactgaagctggatatggaaatgagataagagtattaatactttgagaaactatatgtactgttcctgattgaggctattaggatgtgacagatggctctcacttaactgtgataattctgtaagtttggtcctacagctttaatataaacagtgttgttattcttcacttcttttcccatgaacagttatgttccaactgcttaggggaaaggcctggcaggctggatgaattgaggacagggctttttgttgtttaagtgtctaccctgtggtaatgggccctggaccattagactaccctgggtgaagaagagaagatttatttatttattatttcatttatttatttatttttgagacggagtctcactctgttgcccaggatgaagggcagtggcatggtctcggctcaccgcaacctctgcctcc

SEQ ID NO: 128625 - DNA, 1026 bp, Homo sapiens
ccccgcgcgatgacgtcagtatccaccccgcccgctcccggtgacgtgccagccccaggcccacgccgctcccgccccgcgtgatgacgccaccgtcccgggcggaggcgggcgtgcggcggagccgcgtcccctcagaggggcgctggcgcggggctgagccgcccgggatcagcgcgagcacccagcccgcctcggccgggagggcagcgcggcactgcggggcgatgagcggcgcccggggcgagggcccggaggcgggcgccggcggggctgggggccgcgcggcgcctgagaaccccgggggcgtgctgagcgtggagctgcccgggctgctggcgcagctggcgcggagcttcgcgctgctgctgcccgtgtacgcgctgggctacctggggctcagcttcagctgggttctcctcgcgctcgcgctgctcgcctggtgtcgccgcagccgcggcctcaaggccctgcgcctgtgccgcgcgctggcgctgctggaagacgaggagcgcgtcgtgcgcctgggggtgcgcgcctgcgacctgcccgcctgggtgagtgcagacccctgcccgtcccgacccctgaccaccagtcccgatctcccctcgtccaggcaggcactcccctccccgcgacctgccgcctgggtgagtgcagaccccagccctgccccggctcccgccttcgtagtcccccacccaccccggtccaggcaggcgcttcccttccgcctgggcgagtgcagaccccagccccggcccccgggccggttcctgcgacctgccaacctaggtgagtgcagaccccgccccgccccccggccccgactcccagcctgctggcgacctgcccgctagggcgagtgcagaccccagccccgccccggcctccggcccactccctgcgaacctgtccgcctggggccgccgcccgctgctcgccgctcccgccctagtcctgagtgctccgtgccctccctccgtccaagtcgggcgtccccttctccgcttccccgcccgc

SEQ ID NO: 128626 - DNA, 1049 bp, Homo sapiens
cttatatatagtaatttgatgtcctttttattctttttattaatcctaatactcaatatctggctaggttgatttaggtcaagctgttacctgtaaaatgcttgctatacttctactaatacttaccaatatgatgtaattaaatgattttataatttaactcatatttaagtgcagtgcataaaaagatgtatacataggtatctataaaaatacatacactttcacattctcagcacaaatgtttgcacgtgatgatagttgataggtcttctgtatatggttctgtattgtgtgatttatttttagagaaataaaggtagcagtttatataaatttaccttcaaaaacattaaaatcagggaactataaatatctttcttagctgtaataaggacattgtctgttttaagttataaagtgtcatgttttgttcagtatgagggataattgaaagtcagtttgtcttaaagggttccaaaagattattattgtttgcaggactatgaagatgactttgaggtttgtgatggtgatgatgatgaaagcagtaatgaacctgagtcaagagaaaaactggaagaacttcctctagctcaaaaaaaggaaatacaagaaattcaaagagctattaatgcagaaaatgaaaggattggcgagttatctttgaaactgtttcagaagcgaggtagaacagaatttgaaaaggagcccaggacaggtaaacaaatcaatgctactaatggtgtccgtgctcttagggctctgtgtactgagccctcacagatgctgtcacacacaggcctactctaataaggtgggtggagcagtaacatcttccacatgctggtggtgccatgcccttgcagctaccacataggaggcccctgaagacttgagcacgagcccatccagaattctcttacacagagaagttgcacgtcactttctgctcagcacccaggccttaggttagctgagggtgccgtggccccactcagtgagcactgatgctcctgttctccagagggagctgaggatgctgtggc

SEQ ID NO: 128627 - DNA, 1086 bp, Homo sapiens
gggcaccacttgccaggcgaggataggagcagggagggttgggagcagcccagtgtgttccagtgaggacaggctgagcttgtggtgcctgtggagatgcccaggagctaggggcctccatagcagaaaccccagatggaggtaaggatttgggagtcgtcaaccaagaggtggcatttgcagtcctgaatgtggacagaaagagaaaattggaaaggaggctgatagcatggccacatgctgactttgatgatgtgggtgtggcagatggagcaactgtgggcatctctctgttacaaatacataggccatataaaggaaaaaataaaactaagtatagtttttaaaaggaaaggaaaatctctaaatgccataaacaggagagagcttaaagttagtgtcataagcttttgagctgctatgtgatggcttggaggctgggtgtgaagcccaggctgtctcagaccttctgagctgtctctggggcttgagccccatgcagaaccaggcgacgcattgggtttgcctgaggcaaggaggtagaactgagacccctgcacaggactctggaactcactgctcctgcagtgatagggaaattcagaaagccgcaccacagccaagggaagacagaggagcttggaagagcttgaaatcctaagctgagtgggtgtgtgggaacccacaagctgagatgttagcatcacagttctagaccagtggcctcagtgggttcatagttaaagtagacgcaaaaccccctggtgggtaaagatatgtttgcaaattggggctcacaggtttcttatgagaagcagtctgctgcagatgagctcacaactacaagcatgaagaaatagtctaccttggtgcaaaaagtaggagtcacacactaagaacttgagacagttgtacaatctaaaagaaatttctagaaatgaaactgttatctctgaaatttacaaccaagtgaatggttacatagcagattagatatagctgaagaaagaattagggaacagaaggataactctgaaaaaattatcaagagtgtagtagcagaagaaaatagaaacagagtggcta

SEQ ID NO: 128628 - DNA, 1067 bp, Homo sapiens
ccttaattctggcccactctctctcatctattctaagcttcaaccaaactgaactacttagagttgctgaacatgaatacatttcattttcggttgcttctaacttctggcaaagagagaatacttgtttggaataatattccctattccacactccctgacccctgcttgtttttcaggtatgagctagaatgtcacctctggtaaacctttcatgggatacgcagtattaggccagtaaaaccacgtttacttaccccatttgatcactttagtacacagtactgtgttattgtcactgtcaccaatgtcgagccaacgtttaattaatgagcagacatttaaatgttaagaactttaatctttaaaattaataaatgttctaagtgaaaagaaacttttatgaattatatatactttttaacataatttaactttttcataggagaactatgccatttttgggtcaggactggagatctcctggatggagttggattaagacagaagatggctggaagagatgtgaatcttgtagtcagaaacttgaaagagagaataaccgttgtaacatcagtcacagcatgtaagttacagctgagcagaaccatgccatttgccagtttagcatgtatggccttacctatttttcaagtccctgcaaagctccataacttttgagacttgcccacccagaaggctggtgtgaagagacaagttgtttagctaaaaaatgaggctagtagattgcctaatattcatacacagatgctttcgtctttttttttttaatttaaaacatttaatcctcacaataattgggagagaggtattatttttaatcccacattatagctgaggaacctgaggaaattgaaatgcacagttttggtggcatatatcagaaatgtagtaatagtggcttacacaagacaaatcagtttttctcccttgaaagcctgagttggcatgatgactttgctcgtaacattgtcaaggggccaagcacagtctgtcttgtcgctctgccatcccaagagtgcagccttacctgcatggtccaaaac

SEQ ID NO: 128629 - DNA, 1029 bp, Homo sapiens
cttcattattgaatatttctccatcttcactatttaagatactgaaataaagacacattctattaaaatattttttcagggagatcttcatttggcttttcttttgtaaaaggatataaatacttcaaagtgacagactgtgggcttgaaatcacaagggtaatgtctaatacatttttgtttcattttgagaaataagatgtatcctggttctttgagaatattgtaccagaaagtgctgaacatgttttagaatctctgaagggtcttgatatacttatccaaggtagtttcaaacatcaaaatgccttattaaaacagagatttttttaaaaaacaactattaaaactccagaaaaaagatggtaagaatatgatgatacccaatactgaccaatgacttgctgtataccttccccatgctgagtaaccactcaacatttctgtttactccctatataagggtttacctgaagttaattattactgcactgaacatgtttttattaagcaccaaccaaatacactgttaacacatttaactggaaccaggtgaagtgacatgtatatttttactatttaaatacatttaattaaaagcttttcttcttcgtgaaacaagaaaatcaaatcataaggcaataactaaacaatgggaacaccttttactttttaaaaaaacacctgtaaatagtaatccacatcctcaaaactaacgctgtgtaaaatttttattttccacacactgataacagattttcagtgtaaagtgaggaaggaagctctgtggagacaagctggttggtggaggcatgtgagagtggtgctcaaatccaaggaactaaaattgcttatttgccggtcatcgttctttgacaagaaaattgtacacaagcccctttccactcaccagtattcacttttattaaaaaaaaaaagctgactttgccaaatgagtcactttctcactgtcagaacagacttaaacagcggtgccaacagttgtaaatcatcaagacaagcaaagca

SEQ ID NO: 128630 - DNA, 1154 bp, Homo sapiens
aagaccattaaatatttcatctgctctgttgccatactgattacagaacagaggatcccatccaagctagcatatgcaggaaaggaggatcttcttgtgaggctgtggggatgctccctggaatgctaggaaccaggacctaacaaggctgagagggaccagaactaggactgggtgctggtgtccctgcaccacgtcatgtctccataccctcacctggtacagagcaagtgcctgctgcttgtccatgctggctggtgtctcaccgcttccgaggttacatgctgtggttctaggtccgcacatgctctttgtggtctgctctgtgaatcagatttaatttcctgttgtaagatgggtggtgaccttggaaagtgcctgctgcaccatcgtgtggaatatcagctgtgatggatttcagattataatctatatcaaaatgagtgtttcctttccccagagttcccaggaaaatgttttccacatagcaggcagtcagtcaacatatttggatgttttaaatgagtatattttgttgagttgtgcacccgtcagggcgattggggttggcgcacagaagcacatgagcctctgagtgtatcggctgtcagagacaaaggtgctatgactccagctgctttctctaggacatctcaagtcacctgtttggaatttgagaccaatcatctcatgttttctattatttttttctagcttatctctacaactttgacatgaaaatctgtagattttaaatatttcaaatatggaggatgaagatggagtttaaaatgacttctgaaacctagtgtgctaatctatacaaaccaatataggataagggtatatcatggaagaaaaacatctaagagaatagcagcagtgtttacagtactgaaaataaattgtttcattttcttccttcagttcttggacctgtgggtctaaacaccagttttttttggtgttttgggttcttggcatccgtgctcccagcctgaaagctgcccgtggtcacatccagcacttgccttcagccctctccatcccaatgctggttttcagaagcaccttcttgctaccgaagcacctctcccagccctgatccttgtggttgagcatacttccagcctgggcagtgcatggctgctctg

SEQ ID NO: 128631 - DNA, 1183 bp, Homo sapiens
ttgtctttgtcattacttcagcaggttgtaaaaaatgtcagttaacggtgtctcaggtatacataaacagcttaaattattagcattgctataattttactatactctcatctaaatctaaaatcagtcttcaaaataaaaacaaattgtcctttgccaaaaatttttttaatcgcacaattaattgacattaactgccaattctttttggctaattgactaattttaacttctgtgttgcttttccagaggcatggctattgcaccttgggagaagcctttaatcggttagacttctcaagtgcaattcaagatatccgaaggttcaattatgtggtcaaagtaagtgttctatttcaaaaactactttgatgactcttttgaacaactatattttgaagattgtaagtgtacaacgttgaagatgcttttggcagcttgaaggtgtgcctgtttgctgcgtattaatcaaaaaacagaagggaacaagttcaggagaaaacagtgaggttggaggatttctccagtattggtggcagaggttgcagagcctcagtgggagcaaacactcatctgccctgtggctctgtggttgctgaggatgccacaaggtggtcccttgggggttgtaccacgtacctacatactgtgtcagtgatagaacggtcgtgggatctttacctgatgatttcacaaatgttttctgcttcgtgtttttcacaaggaatgaggcttgtgtcgcagaggaagaagtagctaatagaaaacaggaatttcatacaaaatagaattccacaaaagccttattgcattaatgatacccttttggaagaaatttttatcttgggccacactcaaaaagaaaggatcttagccatatattccatttattgtttgcttttgtccaaagattaattactatgtggtttatgcaccttcattctattatggataaaatagaagctatagtttatgaagctattaattttgtgtttctaatggttctgtgagacattggaaaaatgttgcttttaattgcttttaggcatttaaaagtgctactgggaggaccaaaaatttagggagttaaataattgtaagccttagataatattatttgttcagtttgcttctgagcagaatttccagggctgcttatgtaactactacttacaactcctgt

SEQ ID NO: 128632 - DNA, 1047 bp, Homo sapiens
catgttgccctcatggtgcattggattcatctaggcagcagcgccacatccacagacgctgcccttctccaggtgcgtcttgatgcagtagaggagtactgacctcctgatgctgacgcacacctgtcgcatggggaggtgcagcagtagggcctcacccaggaacagcctggttctgtcacgctgtgcagccctctcttgctctcctcctccagccttccccacggtggtggatgcaggccccttgacaccttgcgacgcatgacatggagagctctttttgtgttaccatgttttgaagcattcattccagcttgactcttcagttactgtgtgaacaaacattggccatcttctcagtgagttgctgttgtgttttcctttcagcaagtgaacaatggcctcaccctcagtgaccttcctctgcacatgctgaacaacatcctataccggttctcagacggatgggacatcatcaccttaggccaggtgacccccacgttgtatatgcttagtgaagacagacagctgtggaagaagctttgtcagtaccattttgctgaaaagcaggtgagtgggatgcagcagtctcccctcaggctgggagtttatagactctgcctgggggccataccctataaactcacctggagagaaagaatggctgagtattttctacttttaaagaaccaggaacaatcagagtttattgagattgctgtgggttctctcctatagaatgtaaggtttatttttcatattgaatagaaccatgactctaaaaataacccaaaactgaacagcaaagcaagaactgagttcttttctctcctgttgataacgaggtgcatagagtccctggctcactgccttttctcctgatttgatgaatcagattccagttcttttgaccaagctgcacatccttgaaaagtcaggtgccctctgtgtgcctcagtctctcagcactcggtagatgccgctcctgagtgtccacagcccctcccccctgccttgtgtgctgcacttgggagtgcacgtggggca

SEQ ID NO: 128633 - DNA, 1699 bp, Homo sapiens
ggctgcaccatttcacattcccccagcagtgtgtgaggtctcttgattctccacccctccccagtgcttctcattatttcactttttgattaaagccattctagtgggcaggaagtgggtctcattccatttccctgatgactggattctagagcatcttttcatgaggttatcgtccatttctgagacttatttagataaatgtctttgcatgtcctttgaccattttttaaactgggttatttgtctttttattattgagttgtaagtgttctttatctattctagatataagtctgttatcacatatgatgtgtgtagcttattttaatttaataatacattatggacattattctggattggagtatttaagtctgtttaacagctgcttggtattccattatacaggcataacacaatttatttgatttgtcacttattgatttaacccaagtgagtttaatttcaaataattgttttatgtactacactgcctttgaaaaataatttcagatagacctggaggccattattctaagtaaaataacttaggaatggaaaaccaaatatcatatgttctcagttataagtgggaggtaagccacgggtacacaaaggcattcagagaggtataatacacattggagactcagaagagggaagggtaggaggagggtgagggatgaaacactacatgttgggtcactgcatacttctccagtgatgggagcacaaaaatcccagacttcagcactgtacaattcatccatgtaaccaaaacccacttgtaaccctaaagctattgaagtttaaaaaaagaaattaaaaactaaaataaaatgaaaaagttttacacctaatattatgttttgaaagtcatcttatgcggattctgaatggagttttgtttgtttagttttgtagacatttgatcctttcagaaaaaggtcatattgaatggaagttgatgtactttgcacttcagaaacattacccagcgaaggagcagtacggagacacactgcatttctgtcggcactgcagcattctcttttggaaggtactgatttaaatgcactcttggaatttcaggattaaattttggtgaaacaaactaatcacctatattttaagtataagactaaaaagcggaaaatactgtttgttataagtaagttaaggagatatattttaccaaatattggggtaggggaacagatgttcattcaatgtgtagcttaaaccagaaacgctgaaaaccaaaatgcttctcctttttgcagaagttagcatgcaggagggcgttgcaggcggattgcagccagtgacctttcctggcagcagctccagattccctgctggcccccagcctgaggttgaaggctggagtgtgacccctctgcccatctgaggacaagtgcaccttcctcgtttccccagacttagccctcggccctttatgtccccaccgactctgcagggccaggaccagcttaggcttcatttctcaaagccacattcttagaaaaaaagtgtccatagagaagtcctagattttaaaatctgcatttttctcattcatatgatcagaacttaacaagactatcgttacttatctgcaagtctcatcccttcatccagttacttcctgttctcaccatccagactgtgtgtctaaatagaatgtttttcacag

SEQ ID NO: 128634 - DNA, 1004 bp, Homo sapiens
ttacttttgcatccatctagctaaatctataatctgtgtcaatcacttatacctatcaatcatccgtatctattcacctgtcctctatgtctgtcttctctcagtctacatccatctagccttctgtcaatcatctacttttttttttaatagaacaagaagtttacttatcaagtcttgaaagggggacatgtttcaattggtgttcaaacaaaaattccagcttgtattagaaccttgaaatggtgaagttgtggaggttttctttgttccataatacagagacaagttcataatttttagtataacagctaagttgacaaattctaagtttcctcaggtaaatagtcataactgtccttttccctagagaagtgcttgctgggatagtaaaaacatacaccatttcatgacttctgcaaatactttccagcggaagtcagtgtaggtttgtttttggctaacatggtcttgctgcgcaggaatgtaaacactgtgtttgaaactctggaaatcacgtgtgtggggagatggggacgcttcccatgttgtggggagctctgtggctgtgatggctgcagttgccgtgcctctgttggaacgctaagtgcctgcaactcacgtcaatcatagaattgtgacgcacagttggcaaaatagttctttatgctatttctcaaaatttgaggacaaacccagattgggattggaatatgcactgtaaatcaaatttttcttatctacaaagactaatgtaaaaatgattttttcttctgtgcctgattaaattaactgtggtttttaatataaatatttattggtgtgctttgggagaaaaattatcttttcttgaaagaagttatcaaagcaaatttattatcttcacaagttaatgggagaatgtggttttgattctgggtgtttgaattgtgtaaacacacagcttccttgtgtgaagagagttgtcctgtgctccttctactgtactttttttattttttaat

SEQ ID NO: 128635 - DNA, 1030 bp, Homo sapiens
gaacacgtgcagggattgtacatttgattgccttattgcagaaatattcacctatcagtccatgttttgcagaaactggagatgtgaatttatgatgctctcccataatacagcagtaatgatttgcagtttctcacaaaatgattttcatgctgctctgtgttgtagttctgtttcagaacttccgtacctttttcttgtatgtagcacgtataaatgcagctgtcatgcagttcttttcttttgctagaaaattagtcaggaggtaagatgaatcttccaaagttatgttaaattttgtttaacttgacaaattaaactttgttcttattaaacaaatacgtaaacaaatactggaaaagcaaagcttatatttgggagtaaaatgtatcttaaaatgcatgttcatcttttgctgagggaggaatagcttcttgtatgtccactggatagtaacagtggttcttttttggaattttatttttacctcttttgaacttctaaatcggtccctttattttcttaaaacatttgctctcttttttgtttacagattaaagaagtatggatcaattttagtcagttgataatttcatttaggaaacattgtcttgctcattatagagagttaagactgtgcataaaatactgaagtgcctcttttttattaggctcatatgtttgttcttgcaaagcgagatgcctattgtgattggtgttagatctgtaagaagctgtgttttttccacaagaataatcgacgaccggtttgagagcatctctcgcgttctttttctgtctgcttactgtccttgacaatgtgatcctgcacagtatcaggtgccagttatgcgtccctggaaggttggctcttatcagcaagtcctgcagatatctcttagataaaagtggtttgaaagaaaaggtatatttttcttttttgtttaaaagtaaaataaaacctccagttacactgtgcattcccctcacgtaaaaacaagacaaaaaccctttcctgagttgctcggca

SEQ ID NO: 128636 - DNA, 1036 bp, Homo sapiens
ggacagacacatggcccttcgtgctctggcggagctgtgacttcaccttcatccttcatctgtagaggatgggtaaaccggttccctggttgtcaggcgacctgctaatacatcagcatctggaaggagagggcctgggcactggtgttcttaacaatgttcccaggtgatgctcgcggacagtcagggtgaagagtagtttaggatctttcttccctagctgtcgcttgctaccatttcctttttatagtagatggtgttctgaattcttatttttgttgagtaaattacctactaaatgcttgaccttaccttgctgtgttaatccaattgaaaacctatttgataaattgaatagatttcccttgtttcttaatctagaccctggattctcatagatctgatttgctcaaaatcttgagtaccaccttcctattgccttgaggttctctcttgtgtgataatacttctttcttgtcagaactagttctttgcttatgtattgccaagtggtgtcctaaaatgtggcttttacacacttcattaacaacatatagtgactaatttttccttaattttaatatttgaaacttttcatatagacttgtgttagttttctaaacaattttttaaaattttaaagaattttatgtttgtaaaatggataaagcttgaggccctaagacctgggtcaccaacacctaactctttcatctcctatagaactaacttacgattaaaagaagagttgaaggcagagaagaaatctggattttgggacaatttggttttaaaacagaatatacagtctaaaaaaccagatgaaattgaaggttgggagcctccaaaacttgctcttgaagacatatcggctgaccctgaggacaccgtgggtggccacccatcctggtcaggctgggaggatgacgccaagggctcgaccaagtacaccagcctggccagctctgccaacagctccaggtggagcctgcgcgcggcagggaggctggtgagcatccgacggcagagtaaaggc

SEQ ID NO: 128637 - DNA, 1390 bp, Homo sapiens
gacgggccaggggaggcgtctcaccagacagacgtgtagacgggccaggggaggcgtctcaccagacagacgtgtagacgggccaggggaggcgtctcaccagacagaggtgtagacgggccaggggaggcgtctcaccagacagaggtgtagatgggccaggggaggcgtctcaccagacagaggtgtagacgggccaggtttccacagtcgttcatgcagtggtattttgtgctgagctctgttctgattctctcttctggtagcttctcatctcccagatatgtcattctgtgtggaagcgtaggtttgagaccttccttaagagaggaaagcttatctttagtttatagaaataaaaacaaaactgtatttccaagcaaaactgactttatgtaggtgtctccagagatgcagcttcagctgccctcgcagatgccgctgaggagctgctggaccgccttgcgtcacacagcatgctgccctcagacgtgtccatcctgtaccacatgaaaacgctgctgctcctgcaagatactgagagattgaagcatgctctggaaatgttcccagaacattgcacgatgcctcctggtaagtaccgtacgatttattcaaggtcctgcttaagatactctcatcgaggtttgcctctgaaagacttacacgccaccaaaacagcaatgagttggaaaatatgacactgcacatatggcatgggagaatagagtcccagagagaaacaggcttcctgcatctctgcttgatataaaaatatttcacataatatatgcagaaatgcatgtgcagtctaagtttccggacttgggagctgtcaactcttggagccaaattttcctaagtttaaatagaaatgaattcatttcttcctcttttccttctcctctactgctgtggtagatggtaaatttttgcttacctccaactctctggtaccttattgaacccctgacgtggtgatgacgacttttattttctgccaccttcaccgggcatccttttcatgcaaactgttgtgtgctggagcagctgtgctcatgtcttcccaatgccgtgtgcggtgacacaagctgtggtgagggtattcaggccacagaaacctgcaaatgctgaaaatcagaaattcaggctgttgagccattcacctgcacaccactgagtgcagagcagcccacctggcccagggctggcgtcccagaggaggagtggaggagggtccgtggcacccgtcagtggcacctatcccagaggaggagtgaaggtgggtccgtggcacccgtcccagagaaggagtgaaggaggctctgcagattttgtggagggagtttcagagtaagtgtcgggagtggtttctgtccgtagaaaccac

SEQ ID NO: 128638 - DNA, 1105 bp, Homo sapiens
tttgggagcccgaggcaggtggatcacttgagaccaggagtttgagacaaccctggccaacatggcgaaaccccgtctctactgaaaataaaaaaaattagctgggcatggtggtgcttgcctgtactcccagctactggagaggcagtggtaccggaatcacttgaacctgggaggcagaggttgcagtgagccgagattgttccactgcactccagcctgtgcagcaaagtaagagtctgtgtcaggaaaaaaaaaaaaaaaaaaaaagcaacaacttgtacatccttcaaaacacaccatatattatgattgtcgcatctgtgagtgtatgtactgctaatttatattacgttagtcctaggatctttgatggtaaagttgagaatcaccgaagtaaatagtgtaaactctttttctactaaaactacaagatcctgatggaaaatttatttagcctaatatgtttgttatggtttcattgtactgaaaattgttatatttgaatttttttaacagatcaggatcctcatgaccagccaaagagaagaagaattaggaagcataaatcaaagaaaaaatttaaaaatcccaataatgttcttatagaacaagcagaattagagaaacagcagagtctgttacaggagaaatctcagcgacagcacacagatggcaccacaataagcaaaaataaaaaaaggaaactgaaaaagaaacagcaaattaaaaggaagaaagcagccggcttggcagcaaaggctgctggtgtcagtttcatgtaccagcccgaggacagcagcaatgaaggggaaggcgtgggagaggcttgtgaggaggatggtgtggacaccagcgaggaagacccgacactggccggggaggaagacgttaaagataccagggaggaagatggtgcggacgctagcgaggaagacctgacacgggccaggcaggaagagggtgcggacgccagtgaggaagatccgacaccggccggggaggaagacgttaaagacgccagggaggaggacggtgtggacaccattgaggaagacctgacacgggccggggaggaagacggtaaagacaccagggaggagga

SEQ ID NO: 128639 - DNA, 2024 bp, Homo sapiens
gagccaacactgcttcccagacaggctgtgtcaggactgagctacagcagtgttcttacaggaagtggaaagatacttgcaccacatagacaggcatttctcttcacaagctgcttcttgaggacacgtgtccaggagcccttgaggagtcactcctttcctgttgcccgggcccccttgccaccttctccaggcgccagtgacttgaaatggtaaagttgggaaaaagacagcaaagcccaccctctaattgtgtttcctacctttgttcttcaaaatgaaagagaaaatgcccagagcaagccccaagcacagccttgcagctgcagagccgatggagcctccagggccctcaggagccagaggccaggagaagcaaggatgggacccctctctctctgaccctccaaggtcagtgtgggaacacggcacacaagaaggaagagcctttgagcttttttggttgcagttttaagcacagaggtgagaactggagctggaaaaataacggccaacgttgttgtcgtggtctctcttggaagcactcaggtcactggctttcattttgaacacgtggggcccacacgtcaactcccaggaagctgcagaggaaagtgctgtttgtttttgcctttgctgtgcctggcaccaggccccctgggcattcacactcaggaccttgcgcagccctgctctgcgccggggcatccccacagcaacttggatcggccgcccagggccttgtcgcccaggcaggggtggcatacctggtgcttagccctcagtctggcccctcctggctgcccggcctctgagacttggtttccaccctcccggaggccatctaggcccccgcagcggcacttgctgcgcccttgggtctgccggtcccggttccaacaggctgagggcctgccctttgtcttgtcctgggtacctggctactgccttgtgataaatggagatttagtgctcactgaccatatcaattagggcctgtgtgtattttttatgaagacaggcagacctgtgcccaaaagccaggacaggaagacctaagtaccagcagtttgtctcagtctgtcttgtctgtgttctttgggtaatctctgaatgtgacaagcacagactgtgggtgcttttgggctcacagcttgtcaggaacaggtggaaggagacgggctgtgggaagtcttgaatggcattgtgttggatgtggttctgggacctctgccacctgggttaatgggtcttggctctagacagaaacatgcacgtactcctcctcttgttgacgtggggttgcgtcttgctctccagaagccagtaaacctctggcctgttagtgacagaacaacccactatagattgtgccagaagaaagttgtcctttttggcagagtctccatggaaaatgctacacagccacatttagcaggcgaactcacttatctggcaggacgctcttctgctcacggtcctggcgcgtcgtaggaacactgccctacatgaatttacagagtctattacagtgatgtggacattcctctgggcagctgggataagcacgttgtgctcaaaataccgcttacgtccgtcttctcctgtgtagaccgcattacaggactctggacccagctgaccactgtggggacgctgggcaccttcccagcagcacgacagtgtgtccctatgccacggtgccggaaacaagtccagccatgtaatttttagaagaaaatgtccgcagtgcccccaacatgcctcttccctgggttttccagtggcacacagtgctggcagcttgcatggtggtgcaccttcctgctcctgccagacacctccaggaggagacaaggggtgtgggggcaccgccagcatctgaaagcctcgttcagggaacacaggaattgatcagtccgttaggttttggaaatgcttaccttacatcaagtcaagatcataggtgaggccaggcgcagtggctcacgcctgtaattccagcactttgggaggccaaggca

SEQ ID NO: 128640 - DNA, 1335 bp, Homo sapiens
agggactcctcgtgtgatgataaagggtgtgtcgtgcaaactgtttatattttgctgctttatactcatgaattagttatgtttttgtattgtgttacaaaaacccagaagtttgcataataagtaatttcatgtgaattcaaacaatcatgggcagttcctttttcttggctgggtgtgtagctgacctgcttttctggcacaatacttgacatattaaaatcagtatttatgacagtggttaggttttattgagctctttgatttcatgtcttgaatgaatttagagaaacaatgccgatgtaatcaaggcaaataaatgactgcattttgtgatatttaccagttcctgttattttcctcctgtgttgcagacactggctctgagaccccgactgcccgacggctctacactgccagcgggcctcctgagggctacgtcccctgttggccggagcccagcagctgtgggagccccgagaacgcctccagcggggatgacacagaaggtaaaatgctgggtgggaggaaaggtagacatctttgcagataagctcgtatttcccaattttctggtattgtaatacctttatctaaattcatacttggggggtgggtgagcatgttgttacactgtataatgaaccacatggtgtacctttgtattttatagccgtgaaaagtgatgcttaaaagacttgtaatgacaggaaaaaagacttcatatggaggagattgaaagtgggaatatgactatagcccatgtttgttaatgctttaggagtaccctggaactaaatacatattaaataccattaaataattgttaacagtacttgtcttggtttagcaaaatattattttcttgattttccaagtttttcagaatttctgacattgtacatcaaatctgtaatcaaggaaataccttatttcgaatgtcttttggaaaaaattattataattcctattgttgttgcatgtcgtacgaatgaaagaatatacaatattctcttaatacggttgactgttgagcatggaaaagctgaagttgcccatatactttttaccttaaaagggaaatagttgtttttcacttcacgttgatcttttttaaggtgcacaagaggaatttagagttttcaaataaaagttgtacctagatgatttgtaacaatataaactaagaaactctatattataaacattaattaatttgaatatcaacaaaatgtggtttttgactgcttttgtctttctggcttcctaaattaaaggatcagaaaccataaaaacaaaaatgagataactaaggaataatggattcatcctttc

SEQ ID NO: 128641 - DNA, 1069 bp, Homo sapiens
tctcattcttcacattcccaaataagctgtacacgtattttctctgaaagtcacacttttccaacagacaccagtttataagggtgatagcaaaagttttgaaattttagagaatcacgaatgatcattattttaatctcttccagcaccaggagtcgcatacccaactgttagattttaaattcagcaactgcatttaggaagagtttagaattgaataggttcacttccagtggtcaaactttgtttctttgtgagctacatatatttacagtttttcctaagtgtgtaatttccatagaacactttactgaaagattttattggtatttggctgtgtcttttatttgaaatagcaagtgtaggcagcagtcctttctgagaattataccgaagtgacttaattcccctgtgaaagggactcatttctgctgggtgttgcggcatgtgaatttcagacggggtgttttttctgggccttggccttttgttgttgtgtctctctttttctcggtgctgattgcttggcctgcttcgtcatttatttgttttcctgcaggttttttttttcgattggcattaaacactccgtcctctgcctttttattttccggtgattgctttttgatgggcactagagtttcaagttaaaacttgctcttgctgctggaaggggagcacgttgatgaggtgtgggaaggagaatggaaccagcctcaggcttctgacagacacggagtcgtcgtgactgcaaggcattttcatttgggccatgcagcatcgggggctccgggagctcctgctgcaccagctggtccagctctgtttttgtgggttccttttgttttcaacacattgtgaattaaacagaaaagaggcttttaacctctaacttgatttttgtcagcctctatctagagctcataagcgtacacacacttaggtaaaaacacattggatcaaaaacgagcatttcaacaaaccaaaaatgacaaatgcttcactgtgtcctggttattctggagggaaaaaacctttcgtttatgttctgcttttggtattagtcgcg

SEQ ID NO: 128642 - DNA, 1035 bp, Homo sapiens
agagcaggccacaccctctgcccctccccacccaaacctccagatgttaccaagattttacagaacagcatcaaacatcaggaaagcatccaggcagtcgcagggaaatcctgagggtaccgtgaaaggcagaagtcagttcggagtctcggaggggccgtgacagaagaattctcccaggagcgagtggccagatgacaagctcagagcagggacacaaagtccaagcgggatcccgggaccagagtcagctcatcaccggggagcccggtcgtgaattcacctgcttgctaaactctacctggaacccccaaagctgtgctcacactggacacctgttctcactggacacctgctctcactggacgcctgctctcactggacagctgctctcactggacagctgctctcactggacgcctgctctcactggacgcctgctctcactggacagctgctctcactggacgcctgctctcactggatgcctgctctcactggacgcctgctctcactggacagctgctctcactggacgcctgctctcactggacgcctgctctcactggacgcctgctctcactggacgcctgttctcactggacagctgctctcactggacgcctgctctcactggacgcctgctctcactggacgcctgctctcaccggacagctgctctcaccggacgcctgctctcaccggacgcctgttctcaccggacgcctgctctcactggacgcctgctctcactggacgcctgttctcactggacgcctgctctcactggacgcctgctctcactggacgcctgctctcactggacgcctgttctcactggacacctgctctcactggacgcctgctctcactggacgcctgctctcactggacacctgctccatgacggacctgtgagtctccgatgcacaattttccactgcagttgaaagggcaacatgcggccttatgtcagtgcacactgcacacatctgtcctttgcatgctttatttggtccagatttggtgcatttt

SEQ ID NO: 128643 - DNA, 1050 bp, Homo sapiens
caaggccaaggatgtgggcttccaggccacaggtgtgattgagggcatggctgaaggtgaaaggcgacaaggacccgtgtggcgaccaggaccaggcgtgtgcatgtcaggaagggtattttatttcatcttaattttgagaaatgctcaggatttcaatagaaaagcagaagaaaggccaggggtgggggctgagaaacagcagaggcccaaaaggtcaggctgtggagaatgtgagtggtacagccctggtgaggtgtacacatggcagacgaggggatgcgctctccctgcggtcggaagctgttctcttggggttcaggtgatgccaggtggcaccttccctgcacccgtgtgtgcgtgggcagctgctgggccacaggatgggagcctcgcctggggagggctgatcgcaggactgttccatctcagagagcgtgaggccggcctcgagagcctccgggattcagaaggtggctggttctgggagtagaggatgggtggtgtggacaggaagatctaatttaaatgataaataggacccttgagaaagaagaatcccatgacaaagagacaaagagaattctaaaagacactgtggagtgcaaagcacgccaggatcccagccagcccaggacggggagggcctgggagagattctcactgcctggggatacaaagcctgcatcccagccagccgaggagggggaggaccttgggagagcttccactgctgcagggaagccgggctagtgactggggccgcatccacaggtgtctgggggctgcgccacacagagcatggaggtgatgctttcctgtaacactgcacgtaagtgtgcatgagtcagtgccgagaaagccccttttgccccttaggatggccactgtcaaaaccgcagataatagcaagtgttgggaggatgtggaggaattgggtcctgggtgttgctgctgggaatggaagatggggcagatgctgtggaaaatggtgtatggagattcatcaaaaactcgagacggaaccaccttgtgacccagccgttcccc

SEQ ID NO: 128644 - DNA, 1262 bp, Homo sapiens
gatgggcttttataaccatgcacgtttagttctagactgttttctgattgtgtagactgggtacagtgtgattcttagtgaaagacagtgagacaggcacggctgtgtctgtgccacgctgtgtctgtgccccgctgtgtctgcatcgatcctgaacaggtgtacttggtgttcaccgcagtcttctgtgttgttgtctttgtgaacaagactgtggtgataccttgtggataaaatacgagttgctgtggatttgtttctgggaagacaattgtgttaacccaccctgttattcaacttaagttcttaactaagataatgttgttccatccttttcttttatagctttttagacatagaggcacgtagacatatacgggtaagacaaactagcttgaattgaagacaaactgatatagttatgagctattggagacatcaaagcatattttttgagttattggaaagatctaaacattattttttaaacattcaaatctgaagactgagctttcagtgctgtagggttttttgttgctgttgttgtttgtttattttgaaacagggtctcactgtgttgcccaggctggagtgcagtggtgcgatcagaactcactgcagcctcaagttcctgggctcaagtgatcctcccttcttggcctcccaaagtgcatggattataagcatcagctactgtgtctggccaaaaagctttgctctattttgagagtaaaaagtacttggcatctaaaaatacattattatttgacccgaaatggaaagacttgacattgtaattgaaactggtttaatgtattaggaaggagttgtgcacataatatggtaggactggtaggaaggaaaaacagccgtcctgtcctaggtgccctcatggtgctggggtagctgagacagagctgccgacatcaggccgcgacgggcaggatgcttgtgctttctgatgttctcagtctttcttgtttgcctaaagtactaggttttgggcagcgtgagtggggaagggaagctggtggagtctgtgagtcccccctgctgatgagctcccccactgctgatgagctccaaggaaaggcaagtcctgctgggcagtgttcatttgctgccaccatccacccagttaacatcaggttggccttgagaatagagtccactgttcacactggggtcctgagaataggagaggctgcgccagtacaggatggggccccggtgtgcccgggatccgtccggccgagaagcag

SEQ ID NO: 128645 - DNA, 1253 bp, Homo sapiens
cctgagggcagccccaggcccctcctttccctgtccctgtgcagaaccctggaggggagagatgagagtgttccggcattaacagaaaaccttggaaactgcagctttcaagaaaacactaaggcccagaggaggacggttaactacgcccgttctgttgtaactggatgtgaagtagaaaggctggaggttgttttgatgtggcctcataagggttaagtggattagtcattcgaggcttggtataaagagtctgaactaagagtctaaagatgcactttcctattccggatctttcaaataatgattaagccacgcaaaatgttctaaaatagattctcattttcccaatttaaatgtaaaacaaagtaaaccaggctttttaggtttacatgtttgcctttttagaaaagagcagccccacatttcaatacggttgtgcaccatatcccggtgttgtgttccatgaggacctgctccccgtgttgtgttccgtgaggacctgctccccgtgttgtgttcggtgaggacctgctcccggtgttgtgttccgtgaggacctgctccccgtgttgtgttcggtgaggacctgctccccatgttgtgttcggtgaggacctgctcccggtgttgtgttcggtgaggacctgctcccggtgttgtgttccatgaggacctgctcctggtgttgtgttcggtgaggacctgcccccggtgttgtgttccgtgaggacctgctcccggtgttgtgttctgtgagggcctgcagggaacagtggtcccatggaattatacagcccagtccttactgcagtttttctatgtttagctgggcttagatgtacagaccctcgccactgtgttccagctgcctgcaggactcagcgcggtcacatgctgtgtgggtgtgtagcccagaagcaacaagctgcaccacacagcctgggtgtgcggcaggctcaatcgccgggtttgtataacacattctgatgttcccaccatgaccagattggccaacaacacgtttcccagaacctgtccctggtgttaagagatatgagattgatttagctacttggtattttatatacttacgagcgtgtgtcagaaatattgaagcatagaacttagtgactttttatgagggtcctaaaatatccaacatgcaaatcagtctctgttaagagattaaaagctcattgtaaagtgttggaagtctgttctttactagtttttggctgatggaaataagc

SEQ ID NO: 128646 - DNA, 1770 bp, Homo sapiens
gaggtgggcagatcacttgagatcaggagttcagagaccagcctggccaacagggtgaaaccctgtctctactaaaaatacaaaaattagctaggcgtggtggcatatgcctgtaatcccagctactcagaggccaaggcaggagaatcggcagaaaaatcgcttgaaccggggggtggaggttgcagtgagcagagattatgccactgcactccagcctgggtgacagggcaagactctgtctcaaaaatagataaaaatgataagttctctgtcttcttcattgaaggtgtggcaggaatgtggtttggtttccttgggtctgtctttgttgagttcaggactctgctgtgtcctgtggacagtaatgatggggaggccgtgctgcctggaaaaggcagctttctcctggggagggactgaggggcttttacgtgggggctgggtcatgacttccaaagcagatgtgggagtgacagggagtgttcaactgagattagagaaaggtgttcgtttcaactgagcgttgaaagttgaatactttttaaattaacttatttttaaattctgtaactggattccccaacaaaattgaatttgggctaaagaaacccaattggacctgatttattttatgcttgataaagcatttcaagcattattttatgcttaaaaactcacgggcacgtgaatcagaactcttgaattccacacagctgatggttagaagagagcctatattattaaaaaaagaaaaatgtaatccagaatgttggtgttgtggtcaaataggatctttcttatattattaatgggaactcagacagccataacctttataagagattacaccaattctagaatatttttcctgtggacatactcaaagacatgggtaagtattagcaaaaatttggaaacaaccttcaggttctaacatagaggaatgagaaaatgaattatgtacccaaaacttggcaacaaaaatcatagtcttcaagaatatttaataacatgagtaaagtgcttaacatataaaaatgactgaaaaaaatgactcaaggctgaatactaatgatatttatacaaaagcttgatgcttatgtttagattttagatgctttctttgtttctctaaattttgaaaaatattttcaaaaatttctgaaatgaactcattataatttttaagcatgctataaagattgtatatggaaaaatttgcaaataagtaagcttattttttgtttaagaatgacttggagaaatacatctcaaggtatttttctgctttttagatgattcagaagtgtccatattctgcctacgtatataagtttttttttttgctatgaaattgccattttagacaatcgtttttcctaagaaatctttggaaagtaaatttgcattttatttaaggatttgaagatctttaaggttctgagaggttgctatacagttttttgtgtgtattaattgtataataaaattatgcatcataaggtggttcaccaacagaatgaagggttatacagttaatttttttctgaagaaaaaaagtacgacacagaagccatgagttctgagcatcacatgcctcataattttaaatgttagagaaaatgagttgataggcttagcatatcccttgaacgtagagatttgcaagaaagaagctagatgcagtgttcgcacacagagattagaagggaagccagtgttcccttatggcttcgatagatatttgtgaattatttgggtctagta

SEQ ID NO: 128647 - DNA, 1035 bp, Homo sapiens
gttattagaaactcagaccgatgggtgttattatcaccttccagaaaatgccaagaccctggaaccttttaactcctctgatatcttcctgctctgtgtttagccacagatacgaattctgtatgtatgtttaaggtcagtaagacatcagtgttattgttttgtgtggttgatatttagatttagtgacccacatattcacctttctttgctcttcatttcttcacttatttccttgttttttctggggttgttttgttcctccctgaagagctcccctaatttttgctttagtgtgaatctcttcgaagaaaattctctcaatttttgtttgcctagaaatgtcttcatttcggcttttgatgaaaaagatgttttctcagctctagaactgtaagttggcagttatctgtttcagccttttaaagctgtcattacactgtcttctgccttccctgtttttattaggaagccagggcatggtatcattgcttaaatcttacgtttctttggcttcttataatattttctctttgcctttggtttttaaaagttttaccctgctgtcctaggcatggctttgtatccatgtgttctgtgtagagctgaaggctgaagaatcttctatctgggaatgcaggactgtgccagatttgtcttttatacttaaaattccccttgggacagagacgaggatttgtcatcatgcctcattcctatgaatctactgtggcttctagaaaatccaaggagagaagggtggtgtccatgccctgttgacaggattggacactgctcaacttggaggttattctaatgctagagaaagaaaaacaaaatggatgaatataacactttcttccatgtaataatggacatagaagtgagagcatacatgtcagactcaaaaacatagatgagttcttaaaaactgaaaaaaagtgttatgtgagaatctgaaaaactaaatatcattatttgaaatatattaaacaccacttctcaaataagtttttctgactttaaaaataagac

SEQ ID NO: 128648 - DNA, 1080 bp, Homo sapiens
gagctccagccaaggccccgggctgtgtccaccacgcagggctgcagccgctgggtggttcctgtgtgtgccctttcttcccggggctccaggagagctgccagggcccctttatctcccggctccatcggctgctactgcgcacccctccccgggttggtgtcaggagggagggcgggtgctgcggaggccgactccatgcagaagccagagatagcatgcgctcggcttcacagacctcaaagctgcctctccaaaaatatgtgcataaatgtagagtagcctccatagataaaatgctctatgaatttacacaggagatgctgcagtttcctcttttctaggagattaaaataaggcaccttgtgccagaaaacactgggctgggcgtttgctgttcacgtgtggagctcggggaatgagccggttctcagcgggctgcgtgtggtgagggttcaggttcacgtacacaaaaccatcagacagatttctccatctgtgtcaattagcacagatcagtgtggtcttctcctaatttaagtgagactctgcactaatgatgatgaatccacagtgtatccaggttaagtcttgtctacattgtgaatcttttttaatgggtgttccttggggaagaattcattgaaagggtccgtgctgctgtgagtacgcttgctgtgtgttcagcttgctgggtgattttaaacatatgtaacctgtgatgaagatgaactgtggggaaagccctgaatctgtggtcagttttgacgcatattttggttcgcgttggacgagaggtgcggaaccacagtctctgatccatgtctgagtgagccgcctcgtgaggcttccagtccctcctgggggcactgagtggggacagccatggccaggggggccaagttgaacccagtgtgcctgtgggctcagcgctgagggctggtcacagatcccacccttgcaggtctcagtctgcctctcccttccctgaaatcagtgcctcccacaggcaccatggtgaagccggcgtctcccctgccctgggggaaccccgggcacatccaggactccgctctgtcc

SEQ ID NO: 128649 - DNA, 1108 bp, Homo sapiens
tgcttcgtgcagacgctgatcagatcaggagcgcgtctctgccgcttccttgaagaaatgattcctgagctggggcttaaagcacagctaggactcaggcagaaactcaaggaagaaactgcgggccgacgagcagcagccgtagaggcatggaggtgcgagaatttcaggaagactggctgggagcgggtgggagcgagagggcagctgggccgtctggtggggccgggtcactggggtttgcaaccccacagaggacggcagtcttcactcctctggctcttgcacagagccgagacgaggctcttggtcgggcgggcttagggtcaggctgcctttttagcaagaatgtcctgcaggcaggatggagagtgggtgggaagtcctgccaggcccctggaggctgaggaggcacccaggtgagcacttaaaatggtttcagccccgaggggtgacacaggtgagggccggcggggtcgagggtgacacaggtgaggaccggcggggtcgagggtgacacaggtgaggaccggcgggttcgagggtgacacaggtgagggccggcggggtcgagggtgacacaggtgaggaccggcggggtcgagggtgacacaggtgagggccggcggggtcgagggtgacacaggtgagggccggcggggtcgagggtgacacaggtgaggaccggcgggttggagggtgacacaggtgagggccggcggggtcgagggtgacacaggtgagggccggcggggtcgagggtgacacaggtgagggccggcggggtcgagggtgacacaggtgaggaccggcgggttggagggtgacacaggtgagggccggcggggtcgagggtgacacaggtgagggccggcggggtcgagggtgacacaggtgaggaccggcgggttggagggtgacacaggtgaggaccggcggggtcgagggtgacacaggtgagggccggcggggtcgagggtgacacaggtgaggaccggcgggttggagggtgacacaggtgagggccggcggggtcgagggtgacacaggtgaggaccggcgggttcgagggtgacacaggtgaggaccggcgggttcgagggtgaca

SEQ ID NO: 128650 - DNA, 1121 bp, Homo sapiens
ctggaccgctctagctttagtttcattttctttcctcctatactgtcagtggatgttaccttggtatgtttatgcacccttgtaagttcattaagaataaggtacagaattaaatattttgtagtttaatgtttgcgttactggggtagtgatgtgtccttgtttctatcgagtcaacacaaaatgaatgatctttcttttagattgaagatggatacgtgacaatcccagggaccgctgcactgacttcatttccttagacaagacacagtgtagggcccggcccgtgttggccccaggactcctttggaatatagctgtggacaatgaatcctgcgagcgatgggggcacatcagagagcatttttgacctggactatgcatcctgggggatccgctccacgctgatggtcgctggctttgtcttctacttgggcgtctttgtggtctgccaccagctgtcctcttccctgaatgccacttaccgttctttggtggccagagagaaggtcttctgggacctggcggccacgcgtgcagtctttggtgttcagagcacagccgcaggcctgtgggctctgctgggggaccctgtgctgcatgccgacaaggcgcgtggccagcagaactggtgctggtttcacatcacgacagcaacgggattcttttgctttgaaaatgttgcagtccacctgtccaacttgatcttccggacatttgacttgtttctggttatccaccatctctttgcctttcttgggtttcttggctgcttggtcaatctccaagctggccactatctagctatgaccacgttgctcctggagatgagcacgccctttacctgcgtttcctggatgctcttaaaggtaagtgcatgcatcagcagaagatgacatgtgcctcacgcatttaatcactggctacaatgtcctggacgctgccataaactcaacagcaggctggattgcagcacacacattcagttacaaactcattttagttgaatgcaatattctggttttgtttatttatttatttattttgagacggattctggctctcgtccaggctggaggcaattttcttaattttaagtcttttaggctttctcttcctta

SEQ ID NO: 128651 - DNA, 1125 bp, Homo sapiens
ccctggggaggaaattcttttgctttgaaatgaatttgttttgtttggtaagtaaggtagcaaatacctttttgtgatgtgaagaatgaattttggcagtttcgcattgacttgtgcatttgtcttctctccatgcaggcgggctggtccgagtctctgttttggaagctcaaccagtggctgatgattcacatgtttcactgccgcatggttctaacctaccacatgtggtgggtgtgtttctggcactgggacggcctggtcagcagcctgtatctgcctcatttgacactgttccttgtcggactggctctgcttacgctaatcattaatccatattggacccataagaagactcagcagcttctcaatccggtggactggaacttcgcacagccagaagccaagagcaggccagaaggcaacgggcagctgctgcggaagaagaggccatagctgctccagccggggctccggggcggcagcagagctggcacaccgattctgggaagccccgcgaatgatggcttttgaattaatgaggcagtgaatgttttgtgtttacttctaagggaaatactaactttctttcgcattagtattaattttgaagtagctacaaagtatttttaagaaattataattttatgactgtctggcaggctctgtcagtttagccgcgccggaccgtgtcaagcatctaggagaggagtccatggtgtccaggcatcggggcgtcacacctgttgaggagtggggtggctttgaatgctggaaatggcttcatagtgaagtgcctcccacagggcgggtgggtcagcgttgactctttccagctgcacactcatatgccgtgtgtcttattcagaagtcacattcttttcagttggagagaattgggctaagatagaaaataacatgatttgttccttattaaagcttcccagcgtatgaaattctaagctgggtggggtggctcacacccgacgtaatcccagcacgttgggaggccgaggcaggtggatcacttgaggccaggagttcgagaccagcctggtcaagatggtgaaaccccatctctactaaaattacaaaaattagccgggtgtcgtggcacacacctgt

SEQ ID NO: 128652 - DNA, 1969 bp, Homo sapiens
tcctctctgtccatgggatccgattgtcggaagcattgatgccatctggcgtggaggccgtccaccgtggggactgtgcagcgtgggggccatctggcatgggggctgtctgatgtgggggacatccagcttggaagctgtctggcgtggatgccgtccagtgtggttgctgtctggcatggaagctgtctggtgtggggactgtccagcgtggaaggtgtctggagtggaaggtgtttgatgtggggaccatccagtgtggggctgtctggtgtgggggccatctggcatggaagctgtctggcgtggggactctctggcgtgggggccatctggcgtggatgccgtccgatgtggggactgtccagcgtggaagctgtctggtgtggaagctgtccgatatggggactgtctggtgtggaagctgtctggtgtggggagtgtctggtgtggggactgtctggtgtggaaactgtctggtatggggactgtccggtgtggggacagtctggtgtggggactgtctgatgtggggactgttttgtgtggggactgcctggtgtggaagctgtctggtgtggggactgtccgctgtgggtactgtctggtgtggaagctgtctggtgtgggtactgtccggtgtggggactgtctggtgtggggactgtctggtgtagggactgtctggtgtggggactgtctggtgtggaagctgtctggtgtgggactgtctgctgtggggactgtctgctgtggaagctgtctggtgtggggagtgtctggtgtggaagctgtctggtgtggggactgtctggtgtggaaactgtctggtgtggggactgtccggtgtggaagctgtccgatatggggactgtctggtgtggaagctgtctggtgtggggagtgtctggtgtggaagctgtctggtgtgggactgtctgctgtggggactgtctggtgtggaagctgtctggtgtggggactgtccgctgtgggtactgtctggtgtggaaactggtgtggggactgtccggtgtggggactgtctggtgtggggactgtccggtgtggaagctgtctggtgtggaagctgtctggtgtggggactgtctggtgtgggtactgtctggtgtggggactgtcttgtgtggaagctgtctggtgtggggactgtctggtgtggaagctgtctggtgtggggactgtctggtgtggaaactgtctggtgtggggactgtccggtgtggggactgtccggtgtggggactgtctggtgtggggactgtccggtgtggaagctgtctggtgtggaagctgtctggtgtggggactgtctggtgtggaagctgtccgatatggggactgtcctgtgtggaagctgtccgatatggggactgtctggtgtggaagctgtctggtgtggggactgtccggtgtggaatctgtccggtgtggggactgtcctgtgtggaagctgtctggtgtggggactgtccggtgtgcaagctgtccgatatggggactgtctggtgtggaagctgtccgatatggggactgtctggtgtggaagctgtctggtgtggggactgtccggtgtggaatctgtccggtgtggggactgtcctgtgtggaagctgtctggtgtggggactgtctggtgtggaagctgtccgatatggggactgtctggtgtggaagctgtccgatatggggactgtctggtgtggaagctgtctggtgtggggactgtctggtgtggaagctgtccggtgtggggactgtccggtgtggaagctgtccggtgtgggtactgtcctgtgtggaagctgtccggtgtggggactgtccggtgtggaatctgtccggtgtggggactgtccggtgtggaagctgtctgatatggggactgtctggtgtggaagctgtccgatatggggactgtctgatgtggaagctgtctggtttgggg

SEQ ID NO: 128653 - DNA, 1071 bp, Homo sapiens
gcgagcgcatttccaacacgcggctccagcttccgtacaattcagagtaaacctaaaggcattctttctccctttaagttggctgagccagcccccctccaggtggccagatctgcagtcccacctgcggcttcaaaggctgaaagatttttagctagatttacttgttttttttaatttttaaaggaaaagcaagattactttcctgattatgcctctcattatccactggctcactaatttctatgttactgtttcatatgatcaacttacaaggtagaaccatcttagttacctcctgattattaaactgcctcctggaagttttcattctggtttcaattatgacgttgttaaaacaaagatcttagtgtaattagatgattccgctgtgtgcctattaaagcaggatcgttacaggattaaattattgtcttggctgtttgctaacagttttatttccgaggtaaaatttgtctgatttttttctcattactcatttttattacccagatggcagtgaattggaataactatatttggaaatatgatctctaaactagcagtctctgaacattatctaagaggagtagaaatctttactgtggttgcagatagtaaatgctattaaaagaaagagcgtctgtaatactggagcttgacaacagcagcagataaggaattttcctgaatttttatttcctgctagtgtggggacaggagtggtggctggatgtcaggggagagttcgggtttgttggtctcattttctgtcttatgtggctgaggaagcggttgtctgtatgtttttgatgcagtcatatgtcatagtttggacgttctcttgcagggagggcaccgctagtcaatgagtggaacctcgatttaaaggtctttttatgaaacggattttcatgtgaagcgtgtaactcttacagatatttgagtaaacctcaggctcattgttggtgtcctgtgtggtcatctcatacagcacggttttgcttacagaacttgccttcttttttatgaaacggtttcactttcacagaaccccagtgttgcacgtga

SEQ ID NO: 128654 - DNA, 1554 bp, Homo sapiens
ttcttatttctggaagtctgtgtgccaccgttgtatttttttgtgcgtcagaacgtcaacttcataagcttaaaatactcgtcagagagccatatagaagtgtgtaattgaacacaaaatcatagaataagtttgacctggaaaccataaaactccttcctagtgacattttacagctggtccatttaaagagacatccttcattcccaataaattattctgccctaaaaataatgcttatgctttggtaaggtgctgttagctaccttacagccctcattgtctactagttgggacaaagaacgaaaaagtaaaaaataaaaaaaaaactacccttataaaccaactttttgaataatcatgacatcatcggcgactgtggccctgtaaaatttaaattgcactaggttttgttggtcactgtttaaagtgtttctccccgtttattgcagatccagaggaagcaatttacgatgacgttccaagggaaaactcagactctgaaccaggtttgattttgtctggaattgatttgaggagattcagctcagcagcctttccctctggatgccaaagtgactatttagtggacggcccagacgttttctgtattcatgttttgtatgttgcttctagaatggcttattgatgtgtggtggaatattggtgtttgtgcacatatgtgtgtgtgcttataacccttgaaatagggcagtttaatcttacttatcccaagcaaacagaggagtaaaggtacagaaaatgccggcaaagaggtaggaaacacagaggctgagaagcagcaatgtatatcgaataaatgacatcagtgagaaagtagagagaatcaggcaaaggtaatagtcaaagaaataactaagaattctctacaattaaagaaaaacataaattctcagattttagacatagagattcaaagcaagatgaattacacgttgatccatacctaggccgatgcaatggaggccgcggagcaccaggcccagggtgaatctcccgagagcaactggagagaaaacatggctgcctacacaggaaccgctattccactgacccacaggctgggggcgggttctcaaagcgaagaaggacgtggctcttttaacctgagcggccacgtccagcaaagtacagtcctttagaaagggcgatgggccgcaggaggcagagcgggggagcttgctgcccatagaatctaaggaaatagttaatgatgcactcgctgcagggaagagcacactgaaccacggaggaggtgacaggggcccggagggagtggggagcccgggaagtgtcgggcgtgtggagagtcgataccagcaccgctcaagacagcgctgatagtgccgattgagtttcagatgcagccggagccccagccagtgccgactgaagaggagggtgaccgttcatgccgtgtgttctgaagttctgaagtcggcatttttcagggggaggatcttgttaccgattttttttttttttttttttttttttgctatggattggtccagtttgcgttttatgggtaac

SEQ ID NO: 128655 - DNA, 1078 bp, Homo sapiens
aggcgatgtcttcgtggcttcggtaattaagctgggacacctggatgtccatggggctctccatgcacctgtcctctcttcccttcttaggctgatgttttgcccctgatctcctgcaagctgacaagtgtgcagttctctctaaaggccaggctgaagttgcaatgccctggccaagcgtgtgcgctagggaaatgataaatggatctttaccagggaggccaaggcgttagaaaggcagacactggacagaagctgtatctgaggacatttaacaatatgcactttatcgagtcttggatgccccattagacgatttgctgaagctttttgttgttgaacaaggatgccgtgtgtttggcaatgttgtaaaattgccgtttttaagccctcacacaggttctcttcctgatctaggtgtcactttctgggtgcagaattatctgtgcctgggaaaaatagaaaacacgtgatgggaaaattcctagatgttttctcaaacttttgcccttggctgtagcttctgttgtgtagatacaggctttcggccctatgctgtgacacaggaatatgatgttgcaacagcttgcctgaacacttcctggcaggagaaagggttagctgcctggaaaccactggtggtttctgcactggcagtttcgagtcattttatcctcactccgtgtatgaatcatacttattgtatattggttggattctacctagatgtagaggattatgagtgaaacagattggtttctgtaattatttgagactatgatgctatcaaagggatataagcttgcaagttttgaaaaaagtgttcctcttcttaaatgaatgttataataataatacgtgaaatgttttcctatatagtttgtatatgtacttgatgaggtctataaatgctttgaataaatatggaaacaaaattctttcaaagatatttgcataataccgtttatggatccttaaaaaaagagaaatattggatatttattttgttattggattttttttctggctgttttatatattaggttcaaccttatcactgttctttaaatacctacct

SEQ ID NO: 128656 - DNA, 1829 bp, Homo sapiens
ccatatctaaaaaaagaaaaaaaaaatagctgggcacagtggcatgcacctatatagtctgagctacgtgggaggctgaggccagaggattgctcgagcctgggaggtccaggctgtggtgagctgttattgaggtgctgcactctagcctgggtgatggagcaaaaccctgtttcaaaaaaaaaaaaaattcacaaacattttttgtcttcacctatgcatgggctaagctgcattgagcgtgaaaagagatgcaggacccagaaggcggcagttcatttgccaggctacatttcagcttgatgcttacataactacttgtctgcagcagtactctgaatttatgtgggctttcccgtattcactgaaggccctggctcacagggagatggtaatttgtatgaactgtgttaagttattgcatctaatattcattattgctaaaaatcattattgctacaaatcattgttttgtcattaggagtagtttcttacgttacaatgacattcagtaatgtaactgtgcgaactttatggtaatacactttaagccacatattttccccatttctccaagtggtttatgtaggaacgtttataagcagcaaattgtattcagttatattcttgacatggttcatgttatttaaaatcatgctccctgtggcacttgaacctccgaatacacatggggcacggagcaagcccagaggcccaggaagaggggatgatgcttcgcactgaatgtcacccacatgcctcatcgttcccgtgcacttggcagggacattcagggaggcgggtgtctcgctggttgctcagagctgggcagcagcgtaggtttagaatcaaaagacagcacagaccaccggggctgaggactctgtttttcttgtgggctgagttgttataagtattggccgggtgcagtggctcacgcctgtaatcccagctctttgggaggccgaggtgggtggatcacgtgaggtcaggagttccggaccagcctaaccaacatgacaaaaccccgtctctactaaaaatacaaaaagaaacaaattagctgggtgtggtggtgcacacctgtggtcccagctactcgagaggctgaggcacgagaatcaattgaacccaggaggtggaggttgcagtgagttgagattgtgcggctgcactccagcctgggtaacagagcgaggcttggtctcagaacaaacaaacaaaaaaggtagtgtgacttctacatcgcataccattgtcttggttcatacaaagcgtctttctgaagaactgatggttttgctttggctcagtgaagtaaaatatggcctacctttaagaagttaagatagtcatttaactatgcttaattaggtttacttggggaaaagtaaaattacaaaacaattccttgcattcctcaccgttcctggttaatgtagtgtttaaatcgcgggagggccaactgcggtgaaagtctgtgaggaaggaggcggatgttcagcgcagtcacggggaacataggaacgatttccgtaaagcgctcagtttggaaaagtcaccctgagactccataccagacttctcctcatctttttcttttccgggtaaactgaactgtggtccctgggctgtgttttgaatgtccagcttctcagcagtggaagccgatacctcattcgatcagatgatatgatagaaacagtttacaacgacagaggagagattgttaaaaccaaagaacgccgagtcttcatgttaaatgatgtgttaatgtgtgccaccgtcagctcacggtaagtgcataaattctctatagtagtcctacc

SEQ ID NO: 128657 - DNA, 1102 bp, Homo sapiens
tctgagcctgtgggcccgtcgtgggatttagtgaggaagtatttgaacattacttcctgtagtacacaggaagccctctgtgaggggtagagcaattctcacttgggcaaatagaccccgggacacgcgtcgttcctctaacccaagtcatcgaagacaaaccatttctattcccttaaaaaaaaaaaaaaactttaggaaagatcattggggaactcattttcatggtagatgaccccagttattggaaatgtggttcagattaaatgtcatttctaagtgcctcttactaatagctgttatgtcaacggtgtctaaaaaatacaaaagggacaaaacatgaatcaaactcaaattgtgagacattctttaactcaccagcatcctccaaaaatgtcagggtcgcgaaagaggaagattgagaaactcccccagactggaggagatttcagggacgtgaccaccgaacgcagtgcgagtccctgggctgaatccgggactaggaaatgacattcatgtgaaagcggtgaggtttgaagacggtctgtaggtcagtcaggagtgccgtgtcattgtggtgtcccggatttgacggtcatgatacgcttgcgtcagatgttatcctctgaggaagccaggcctgggcattcaggaggcagctctttgcaacttttccatctaaaattatttccaaataagtgttagaaaaggaaaaaccactaaatgcttgaaaatgtccactttttaaaagttctagattcacccctcaacttaaaaattatttagtatttgagtcttttcttccctcaagtattggagtaaatatggctttacctttgtattctttttttttctttttgcttattttgtagacaaagtttacatggggccaggacaactgtatcaagatttacaaaacttgttgcatgacttaaatgtaattggccaaatcactcagctgataggaaaccttaaaggaaactatcaggtaacaattgaagcaattggatttaagattctgcctttacttataagtcattgtaagtatgtgattatatctccaagttctaccagaagtgagaattcattttgactttaaaaa

SEQ ID NO: 128658 - DNA, 1086 bp, Homo sapiens
ggcggtgcacaggactcctctgggagaggctggggtgggacagggaaggggagaggcacaggccatcacaggctgtacttgatgcctgcagggccagccctcccatctgaagcgccctgagctgccggatttcagtgtgctgatgggatctaaagattaagataccaaaggttgaatctccttaggtgttcacttctaaaaagctaacttctgagagttgtacttttaaactttcatcctccctattttaatctttggtaggtaatgaacctgtaatttctgtgtttatacattggaagtaagtcatccatttaagacgttatgtagtctaggagcctcttagctctgttttatatgtgagcgtttgattttattccattttagattgaatgtgctgcttataaccctgaaccttacctaaataatgaaagccagccagattcattttccacggcacatggtttcctgtgggtaagatgtgtttatttggttttggtacaagttcacagagaatcaacgttcatggtcggtgtgatgagagactgagatgtgaattgctcagtagagagttggcggtggcgtatcccagagtgtacttagaaacatgaaaacttctttgaaagggagctgatcacttttggaaaagatttacagttcttaggaatgcaaatatttgtttcttttccttttcatctaaaacatttaccagataaagttgagtccagagacaactaactaataagagaataattttaatatgtttttccattttggtgtcaacattgcatggattttttttcttgttccaagactggctttttccagtggaaacttagcagttaaaattaatttgttccaaatgaaatattgcatctgaaattaggctggaattgcagtagacgttcctggttcttgcaaaccagaggacattcttgaagctgtgtggtcccaggctctcccctctctggtttcctgtgttccctccctgcagcctcagactcgccctccagggctccactgtgcttttccaaactctcatcctttcctcccaggcgtcctgtgcagcacgccactgcctctcacttc

SEQ ID NO: 128659 - DNA, 1092 bp, Homo sapiens
tgcttcaacgtggaatctcgcatcctgtgcatgctgtacgttcccgtcgaggagaagcgcagagagcctggggcacccccggaccccgagaccccggccgtgagagcttctgatgtccccacgatctgtgtagggacggaggagggaaggtagggcatgctcactgcgttacagagaattagcaagctctgcccatggagggcgtggtggggagcctgtcctggaaagagtccttgactttgactcaggagtagcccgtgcaggaattaggggataccaggggaaatttttagggtcattgcactttgaaataactagtgaattgggcccatggaaattattctaggaaactcttaaagagaagtggtatttctttaaaggggacagtttggctgtttgccactgaaatgtctcatttatattaatggttttgaaaaggacattccccccttatattttggaataaaacagccatattctatgtcatgatcatactgaattgctgacaccatttaaaggagagttaaaatgattttcctgatgtgaagttccaagatacacagtaggaagaactaagttttttcatatatcccagaatttcccttttaaaaataaagaaatcaaggtggttgcaaattttttaaaagtactggcaagtgtccctaggaatggagaaggaagggcaagagggaagagttgaaatgtttgtgtttatgttaacaggcaccctcgttcttgttacaacgagcaaatatatttattagcttgtatttttctcttaaagcatttccatttataaaagcagtcaaggctccaagaaagtgagacttcagcactttttcactcctgagaagtccacagtcatgagcctggcttgcacgtctcagagcctgtacgctggcctggtcaacggggcagtcgccagctacgccagagccccaggtgaggcgggtctcacggcctcctggccggtccttggggttcactcaggggactgtgcatccggtttagcctccccacctccccaccggcctcctgcctcccgcccctgtgcctccgcccctgcgctcgtcacccttgcccaaggcccgg

SEQ ID NO: 128660 - DNA, 1114 bp, Homo sapiens
tatgatattactctgggtttatatgaaacgtcatttcggtccatcatcagaagccaagcaacgcattactaatgcagttaaaatgatggaaacactgaggcagtgattcagttgaatgtagagttggatttatgttgagtaaaacgttcttgatccttttttaaaagtgaataggttagaaggatttatcgcacacataagtcttttatggataaatattgccattttaatgattcatttttcaactgaacatcacaatttcctgcatcgatttaattaaacattgaaaatgctgctttcggttaaagttacatgtcgtaatggtgcgtatcccttctcattttcagtgtatgatgatatgattttggcaatgagtagagtctgtggtaagtaaatgccttttaattttcaagtcatttggggtgctgaaatcactatttcctgacacgggaagtcactgctgcaaaagagggcaccatggagctgtggtgcgtgttctgtgggaggccctggatggaagggcagggtggtgatctgctgccgatgaagctttttaaaggacttccctcagttttgtctggagtttgagttttactttaagaaactcaggttgggcgtcctgattagccacttcttccatcctgtcttaggttaattggcatgactgctttgtatataattgctatgagcagctttttacatatgttgaatagccgtaatgaatttttaaacctctcactttgcgtcgtacacattaaaccatatgttatctttacaaataaatgcccagaggtgggattgctggatcacatgtcagttcagcttgtttttggaggaaactccacactcttttctatagtggctatattaatttacatgccaccaatcatgcacaagtgttcctttctctgcttgccagtgttttatcttttgtctttttgataatagccattctaacaggtgtgagatgatatctcactgcagttttaatttgcatttccctgatgattagagatgttcagtatttttcaagtatctgttggccatttttctgtcttcttttgagaaatatctgttcagatcctttgcccatttttaatgggttatttgtttt

SEQ ID NO: 128661 - DNA, 1050 bp, Homo sapiens
ataatccatagtgtttggatgcacgaggactcagatcaagcaaacgcctgagcacggcatgcagctggctgaaaaagtaatgctcggaaatgagaagagcaagctctggaacagaaggctgcagtgtcaaccagctgctgtgtcacccagctacagtgtcacccagctgtactgtcacccagttgcggtggcagctagctatagtgtcacccagctacacagtcatccagcttcagggccaccaagctacactgtcacctagctacactgtcactcagctacagtgtcatctagctgcactgttacccaacttagtgtcacccagctacactgtcacccagctagagtgtcatccagctacagtatcacccatctgcactgtcacctagcttcactgtcacccagctgtagtgtcatccagctctactgtcacccagctacactgtcaaccaggtacagtgtcacccagctgcactgttatgcagctgtgctgtcacccagctacactgtcacccagctgccctgtcacccacctatactgtcacccagctgcactgtcacacagctgtgctgtcaaccagctacactgtcacccagctgtagtgtcatccagctgcactgtcacccagctacagtgtcacgcagctgcactgtcacgcagctgtgctgtcacccagctgccctgttacccagctccactgttaacactgtcacccagctccactgtcacccagctgcactgttacccagctacactgtcacccagctgtggtgtcatctagctgcactgtcacccagctgcagtgtcacccagctacagtgccaaccagctgcaccatcacacagctgcactgtcacccagctagtgttacccagctacagcatcggccagctgcagtgtcacctagctagtgtcacccagctgcattgtcaaccagctgtagctgcagctcaacaagcccagtggagagcaactacccttcccatgggaattaagttataaatattttacacattaaagacatgttttaagcaagttcttaagctcag

SEQ ID NO: 128662 - DNA, 1064 bp, Homo sapiens
tctgccttggaaggtgaacacatgaagccagagagaccaaggaacagaattttaaaactcacttaattttaatacatttaaaaaccactactttattctattactgggaaactttcaagtgtgtttggaaaaaacgtggatatgtatatctacttttgcaattgcaacttccatgacaactaattaccaaaaaagtatttctaatgctgtatgtttacaggaagtagaagaaatgaagataaaagtcttataatttatacatttttgaaaattttaacatacgttcaaataatattttatatatagtaacatgtttttaaaaatatgggtactaggaaagtacaattatatttatggcttacacggtattgctatagagctgtgctcatctagacaaggttagcattttgtgagctgattcacacaagccttaaaatttatttacaaagttattatcaacataggtttaccttcaaacagtacccatttttcccagcatagctgcagtctcaagttctaacagtgttgatatgcaaatgtgggcactgtaaacaatttgcttgtatattttaatttttctgtgaaatgtggaggatatactgaaacagtgatgtatgcaagtgctcagattggtatccggtcgcacatttcggtactaaaatttaattgtcagattctagacaactgaagaaaacatgtcgtgtctattcaattattatttattagaaattattttttcagaacgtggtaacatatccactctctttcaaagcttattatatactacattataaaaacgtgctaatatcaaatactgcaatatacaaagctaactatatgcctaaagagagaaagtaacctttgattggcctatgcttgcttaagaaataggccatggtaaaatcttcttttaagcgtacttctaaataattcagaatatttacatttgaagtgtacggtgtaatgaagagagcatacaaaacagagttatttattttcaacgcgttagttaacgctcagcgttctagctatgagttcactgtgttctaggctgggaaggaagc

SEQ ID NO: 128663 - DNA, 1606 bp, Homo sapiens
cgacagctgaggtactgaacactggtaaaaaattgtatgagggtaaaacaaaagaagtctacgaaaagtcctcctgcagtccaaggacaagattacagcaggaaatgtagctagaaagaatcacctggaaggaaaagctgcaatctcaaagaaaatcaccagttgtatttttcagttattataggaagcaggtattaaaactgccttcaccagaaaatgtggggagacagctttcattgcaccccagtgcgaaatgattccaattgaatgggtttgcagaagaatagcaactggttcttttctcaaaagaaatcctggtgtcaaggaaggatataagtttacccacctaaagtggagttgtttttcaaggatgctgccaataatgacccacagtggtctgaggaacagctgattgctgcaaaattttgcttcgctggacttgttacaggccagactgaattggatatcatgagtcatgctacacaggctatatttgaaatgctggagaaatcctggttgccccagaattgtacactggttgatatgaagattgaatttggtgttgatgtaaccacaaagaaattgttcttgctgatgtaattgacaatgattcctggagactctggccatcaggagatcgaagccaacagaaagacaaacagtgttatcgggatctcaaagaagtaactcctgaagggctccaaatggtaaagaaaaactttgagtgggttgcagagaaagtagagttgcttttgaaatcagaaagtcagtgcagggttgtagtgttgatgggctctacttctgatcttggtcactgtgaaaaaatcaagaaggcctgtggaaattttggcattccatgtgaactttgagtaacatctgcgcataaaggaccagatgaaactctgagggttaaagctgagtatgaaagggatggcattcctactgtatttgtggcagtggcaggcagaagtaatggtttgggaccagtgatgtctgggaacactgcatatccagttatcacctgtcctcccctcacaccagactggggagctcaggatgtgtggtcttctctttgactacccagggtcttggctgttcaaccacactttctccagaaggatcagctcaatttactgctcagatatttggggtagacaaccatttagtatggagcaaactgtgagcaagcattttgaacacatgtatttccttgaagcaggctgacaagaaaatcagagaatgtaatttataagaaacaatgccattgaaatttttaggggaaaaactacaaatttctaatttagctgaaggaaaatcaagcaatatgaaaaggtaattataaattagagaacacaaataaaatgtattagtgaatcaatgcttctctagatccatactaataaacatgaaaacctaaaaaaaataaaaaaaaataaagggaaactatcatgcttaacttaacatgacatctgcttttgaaacattttatacattttaaatttatgacacagaaactctccctgctccttcctgactccagggcaggcacatgcccagtgttttcaggtgttggaggttggcagcatatgagaaggacagactgtag

SEQ ID NO: 128664 - DNA, 1035 bp, Homo sapiens
ttagccaggcatggtggtgcactgtagttccagctacttgggaggctgaggcaggagaatcacttgaacccaggaggtggaggttgcaatgagctgagatcacgccactgcactccagcctggcaacagcaagactctgtctccaaaacaaacaaacaaaaaaatttttattattctgtgaaaatagacttaactaaatcaatagatgctgaagcattttttaaaaagcatatcagctacattatgattaaatcaagttactgtcaactcacttgcttttcagttaggtaaaactgataaaaaacaacaatgtgtgtgcatgcacttctgtgtgttttacaggaaacataaaaattttaacagaatgtatatgtatttcacaaagaatttctagaattgtgtcagtagataaatatacaaatgaatcactagtgaaattatagtgctgaaacataatggacaaaacaaaaattctggttctgattgtaggcaaaaatgcttggaccagattagcacattgtcataattcttttctctacttggagcttttatggaagtcattggtgggtaaacttttaaatttcttcctctatgacttgaagtaactttgatgtgcatcacataatatttgatggaaacatctatgttaggttaccaagatggcaaaatattttgtttaatatcaaaattcagcaagtatagtcagcttattttggaacatttttatgttttatagaagttttcctggctgggcgtggtggcccatgcctgtaatcccagcactttgggaggccgaggtaggtggatcacctgaggtcaggagtttgtgagcagcctgactaacatggtgaaaccccatgtctactaaatacaaaaatatcagctgggcatggtggcgcatgcctgtaattggagctgcttgagaggctgagacaggaaaattgcttgtacctgggaggtggaggttgcaatgagccgaaattgtgccattgcactctagcctgggcaacaagagcaaaactgtgtctcaaaaaa

SEQ ID NO: 128665 - DNA, 1033 bp, Homo sapiens
gcagtcccaccctctgtgcacctggaagagcccaggagaggggaatagcggacacgtgtcttgtagagtttgaccgtgagaaaaaaggggcctgtattgtggggcctggagtcataaaacctcatagccaaaagtaaagactagaggctttatacaaagtctgtaatcagatgtggctatttttctaatgttagtattttgttaaattaacctggttttcttttagcgttacccccaatcattgaccaacggcacacctggaaaatgcttttaaacatcaggttttgagaagaggatatccactagaacaggggtccactcactatgccccccaggccatatctagcctgctgcctgtttttgtaagggtctacgagctaagaatgtcttttacatttttaagtgattttaaaaaaaggtcaaatgaaaaattatatcacattcacatttccttctccataaataaagttttattggaacacaggccggcccgttaatatattacctatggttatgtttgtgccacaaccgtgaagttgagtagttgtggcaaatactgtattggccacaaagcctgaaatatttaccatctgtctctttacagaaaataggtttctgcactggaaaaattaagcgtaagaatttggggaaagcaactaattttacaaatgtaaactctcatgtattgtatgggtacagttgttctttgcttaaaattttaataaattccactgaagctattttgaaaaggctttcagtagaaatttatttatgagacagagtcttactctcttgcccaggctggagcgcagtgatgtgatcacataatagctcaagcaattctgcttcagcctcctgagtaacttgggactacaggcactaccacgcccggttatttttatttttattttttaatttattatttttttgtagagccagggtctcactatgttgcctaggctggtcttgaattcctagcctcaagcaatcctcccgcctccaccttgcaaaatgctgggattacaggcatgag

SEQ ID NO: 128666 - DNA, 1050 bp, Homo sapiens
gcccaagtgatcccactgccttggccttccagagtgctgcaattacagcatgagccaccacacctggccagtagagtaaatttttgttttacttttttctttttttttttttgaaacgggtctcgccctgtcacccaggctggagtgcaatggcgcaatctcggctcactgcaacctctgcctcccgggttcaagtgattctcctgcctcagcctcccagtagctgggattacaggtgcccgccaccatgctcggctaattttttgtatcttttagtagagatggtttttcaccatgttggcccggctggtctcaaacccctgacttcgtggatccacccacttccgcctcccacagtgctgggattacaggcgtgagccactgtgccggcctcggtttactcttaaatgtaaatagaacaaaatctattgggcaggggatgctggaatttcaaatgtatgtttcatgttcatatcttgttttcagatgtagtggcctatgttgaagtgtggtcatccaatggaacagaaaattattcaaagacatttacaacacagcttgtggatatgggggcaaaggtaagacacttattttgctgttgattcatatgacagtcttctgattggtaaaaagttacatttgcattttcttattttgggagtttttacttagaatctggacgaagcaatgggtaagcggtgggagaaaaaagagccaaagtgtgaagaatttagaacagtaggactttcagaactcaatgcctgtgggcattgagtgaggaggaggaacctaggatgaaatgctggattcttacactggttacttgaatgcatagtgctattaagcaaagtgaggaatacaggaaaaggaacaggtttctaagggaaaaattgtaaatttgggcatactgaaaaatatctgttagatatttggatatacaagtctggagcttggagtgttcaaggctagagatgatgatctagggggtcaggaccataggggtcatgtgaagtcacaggtgtggacatcgtcccatgtcaggcatggtta

SEQ ID NO: 128667 - DNA, 1037 bp, Homo sapiens
gtgacagtgtatttgaaaatactttggcaacatggtaatgatagatacaaaattttcttcttagaccaaatatgtatcgtaattaaaaactatatgtataaagtattaatgattcaactaatgtacatttgtatattgtcagaactacagtaagggtgattcaggcttaagagtcccaaaggagaatatattaaatgattcttggtatttttttgttgggggtgagtatcaaagttctgaagggctctttgagcatatgcaaggtagcattccagaaaaaaacacaactctgcacccacacaaaacgagctcataacttcatggttccgggaccatgctgatcccacttcatgcagtcaagttcatgtctgggtctgtgagtgtgtttgagggtaggagtgatggttcatgggggcagtttctgaaacctgagacaagaaacagaaactaaattgcattccagctttacaacttttaacttctgtgtctcagtctttgtcttcaagtggggatactgatttgggtttggatttgaggttggatgcactaatgcatatattgttcttagcacagtgcttggtgagggcagttgctcagcagatgtgagccagcagctgtagcagcaacatcactgcctgtggaggtggtggaggtagaatattagcaggagtaggtaatgatgttgaaagggaagaaggaaaacggggtgtggggggttgttctttaaaaggaatcacattcctgaagtatgaaggcactttttggtcttaaagtggattttttgtttattttcagatgatgatgtacctattctcttatttgaatctaatggttcattaatatatactcccacaattgaaattaatagtaggcaccacagcgcaatggagaagagattacaagagatgaaggagaaaagggaaaatctttcccccacctgtaagtaattagtttgtaaaatgaaaattatgcaaatagccgattcaattatggtggaaagcttcttttttctttgcctagatattttaatgtttcct

SEQ ID NO: 128668 - DNA, 2797 bp, Homo sapiens
atcacagattacactcttagtgacatgtcacattgcttatcgggtttttgaaaagtgtgataaaacataaaacaattttaggtgctgaataagatatattgagcatctaaaattaaaagtgaccttatttccaactactgccttgaagacacctggggcacagttggaagggaagctttggtggttacctgtgttcttcctttttaaagtagaacttcagtgatttcagacagagagttctaacacttacgtgacctccagattgagtgatttctacaaaacacaggccctccaccagcaagtgctgagcccctattgagggagccagcacgggactagagacttcttcatattcattccagtagcttatagcacagtgacgggcagatgcccacgtaaccatggggcagtatgatgcatgatggtgtgtagcagagggggcaaggccagggagagctggcaagggcagtgggagggtcccagggatgttgacaacccaggtgggtttggaaggatgaattgtatttacccagaataaagtgtggaggaaaggggaaggcccagagggtacagaggagtatagaatatttaggaggtagcagcagcttagcattactctcaggaaatgagtaatccatataagagttgaaacattaaagcctaccaaatggctcacttttgaatatcagtgtaatacgaggactttactggaagacagggaaggtaagggtgagctgtgttcattgagggaatgtttcatgcaagtctagaactttccctagatcttacaacagtagttcttaggttttagaattattgatctcctggaaaatttagtgacaaactatggatgctcttttggaaaatgtgcacatgcatatggaaatttgcctaaaatttttagaagtttgttacacctcttctctatccccactgctatcccatacacccatcaaagcccaggttctctagttaaaaatactggcctaaaatgtacccttaagtggaaatgagaagaactcaagtgtggttaatagtcttcttaactaatagctgtactttaaaagttgttttattggtcaactgaaagttgaatatagaataatttaaaccacttttaaaagttagctctccgttaatgttttccagatgaatactttgctggtggcttacactcatcttttgatgatctttgtggaaactcaggatgtggaaatcaggaaaggaagttggaaggatccattaatgacattaaaagtgatgtgtgtatttcttcacttgtattgaaagcaaataatattcattcatcaccatctttcactcacctcgataaatcaagtcctcagaaatttctgagtaatctttcaaaggaagaaataaacttgcaaagaaatattgcaggtaaagtagtcacccctgaccaaaagcaggctgcaggtatgtctcaggagacgtttgaagagaagtatcgtttgtctcctaccttatcttcaacaaaaggccaccttttgatacattcaagacccaggagttcctcagtaaagagaaaaagagtatcacatggctcccattcacctccgaaggaaaaatgcaagagaaagaggagcaccaggagatctatcatgccgaggctgcagctgtgcaggtcggaagacaggctgcagcacgtggcgggacctgccctggaggctcttagctgtggggagtcttcatatgatgactatttttcacctgataatcttaaggaaaggtattcagagaatcttcctcctgaatctcagctgccatcaagccctgctcagttgagctgcagaagtctttctaagaaggagagaacaagcatatttgaaatgtctgatttttcctgcgttggcaaaaaaaccagaacagttgacattaccaatttcacagcaaaaaccatctccagtcctcggaaaactggaaatggtgaaggccgtgcaacttcgagttgcgtgacttctgcccctgaagaagccctaaggtgttgtagacaggctgggaaagaagacgcatgcccagagggaaatggcttttcttacaccattgaggaccctgctcttccaaaaggacatgatgatgatttaactcctttggaaggaagccttgaagaaatgaaagaagcggttggtctgaaaagcacacagaacaaaggtaccacttccaaaatatcaaactcctctgaaggcgaagcccagagtgaacatgagccatgttttatagttgactgtaacatggagacgtctacagaagagaaggaaaacttacccggaggatacagtggaagtatgtgaatctccttttccaagtcaccttcgctaaataaacatgtaacagtgcatccatattttaaatttatcacaactttttcataacttatttccccatttactcctctttttacttaaagaatgtgcatttgatcattccaatgataaactctttaggaatagatgacttgctgtcttgtggaacttctagacttattggttaagtctgttaggaatctatttctccaagacttttccttcttataggtcaaaaggataagtagtccatagtatgaataactgaggggagtgaagtctttttccttattccattggagtcttggcgctgcagcgtgtgtaaagatgtatacgatagagagttttttaaaacctaggttcttaatagtgaggctatttaaagaaagaaattaaggtagattaagccatcgattgtatcatagagaaagtgtgaaaaactacttttagaaatctgttgtcaatattgattt

SEQ ID NO: 128669 - DNA, 1055 bp, Homo sapiens
tatatttattcatctgcatctacattgtctattgggttgtgagctccctaagtgtgggactatatcttgtgcattttgcatctccagtgggtagatgattagctatttgttaatcattaggtaatcaacagtgcagtttggctatcacctgcctggcaggttctagtaccccctaggctgctacataacttttgcgtcaaagtttgcattataccattgagaccatgttatggtccatgttagctcctccttcaaaatcccatgtaagtcataaagtaggcaaactgtttgaaggaggaggaagggtgagagtaagaggcaccctctgaggcagtagatgagtcaaatcaaagtacacatttcacatttcatcgtgggttacttaggtctacagaggttagcatctaaggaaaccacatttcacttgaatgagtatccttttggtttgtgtgtcttcatggcaagacgctggtctaaggtggaaacttggggggagtaaaatcatcatccatcatttgtaggttgaagcctgaagctctgtactgaagactattttctagaaaatctcaaactgaccccaaaagttagattaattattgcctctaatatggaactgcctactctgaagagctgttctttgtcattattttaaaatctaagaatttaagtttgacgagtgcgtaaggtatgggtatacattttcttacattatcaaatggacggagttgatgctgtagaacactgtaacctgattgttaccgaccattgaattaagtgaattgcttgggatattggaatgtaataaactgaaagttctagatagatctcaaagagccagatatatacaatttatttaaaaggcctataacttcctgtttccattatgcataaatgtgatttttgttttgcttaagttgtatttggtccatgtaaagttctaactaatttttaatccccttgggttttaggtgttaaaaatagaccaacaaggcatgatgttttagatgactcatgtgacggctttaaggacctcatcaaacctcatgaggaattga

SEQ ID NO: 128670 - DNA, 1357 bp, Homo sapiens
agcctgggcaagagtgagaccctgtctcaaaaataaacaaaaaagaaacttaaagattttagtctcaattttctacactgaacccatctttagatcatagcatgtataaaattaaaaatgggggaatatcaacattattatatttaatgctatagcttattattgtatttaataagctacttgtttaaagatctgggatctcttgggtccacagactgagtctttctgaaggtgctttacacgatgtagctgccagggatctaggtcatataatatcctcaggatgggatttgaagacatttttccagaatttatcttttgtcatattggattttatttttaaaaatttcctctatagtcaaaatttatataaatatatgattctgatagtaccatatatatttagatgggcttatactgggcgtgaacaaggttaataatctttgtgaatatgtgggttatctccttattttacttattcttaaggaaaattaatttcactgtttaccaaagaactgatagctaaacccaaaagatttcaaagaatgttttgtttttgaaatgtttctatttatcactaataaaacgggtatatctgtttaacttgacctatctttggtcttactaaaacaaaatcagctagaccatttcccaaataatcatgcattcaatactctttttctctctctctccctgctccctcatctctactcctttagaactttcagaacattcttttgtgtagatacagtgtttcatgtctgttattgtttctcactggtcgttggattctttcatgtgaccacctttttcacgtttgctctgattgcctttggatgcgcctaactgtgtgcttttcctgttaaggaaaagaatcctgcatgtttttttctcatcgaataacaatgttaaaaacagaaaagggttgtttttcttctttgcagtaggcattctgtagtagataccttgacatacttaaatttgtgagatgtgtctagacgaatggaagagtaatatctcatattaatatattgctaataataagataaaggtttcagcttcctggagctgtccatataatagaatttgtacttgttttttcatttctgagatcctcatactttggggttttttttatttttttattttttcgagacaaagtctcgctctgtcacccaggctggagtgcagtggcgcgatctccgctcactgcaacttccgtctcccgggttcaagcgattctcctacctcagcctcctgagtagctgggattacaggtttcctgccaccacacccagctaatttttgtatttttaggagagatagggtttcaccatgttggccaggctagtctcga

SEQ ID NO: 128671 - DNA, 1010 bp, Homo sapiens
catgtttcatgaatacaagtaaacccatgagtaactcatgaatacacataaacttctgggcctccaaacgatgccctgccagtggccatgccacaggaatcagaggctgtacttcactttgtggttgctttattattccaccattataagctttagtagaaaatgtaaagagggttgttaaactgaaggagtgttgtctcaaactgaaggagaaaagtagtgttgctgctgtaagatgtacataaactaaggggtgtcttttctaccatccagttagcaattaggaaagtccttctttgctcataccattccaaagggagtcatcttattctttctctaaatttccttacaatggaggctgctacagtttaagtatcgaaggtccttttttttcagatttcacctgcagtgcctataaatttgggggaatgccttttttggggggtgaccaacatactcagtggatcttggacctaccaccaagtgaccttccttgctcacctgtaaggctgagaacaccgtaagcaaagtaccaggcttctttccccaaaagggctttgtaagcgttggcgccataaaatcaacctgaggacttaggtggctggttatttctgagtaagtgaatatcactctcaaatacgacattccagcaaaggccatggttgcatagccactgtttttagttatgtcctggtaactaggaagatggattgttttttaatctatgcaaataattatattgcgctgaaaaaaatgatactcaattacagtttcacaattctggagggatcaggcagggataataagataccatttccagatgtttcctttctgtttataaaagcacagtcgactgaattgttaggagatacaggcagagggagaagagaaagggttccttatgtatccagaatatagagtgttaaaatagcaacaatactgtaaacaaaagccgcagtcctccttcagtagttcatctgggcctagtcattaatttttgttccacttga

SEQ ID NO: 128672 - DNA, 1068 bp, Homo sapiens
tagatgccaaggctatatgaaactgtcagtattcactacagtggcatttccacagtacaatacagacatacaaacagacatagataatttgtaagctgtaattctaaaatttcaggccaggcgcggtggctcacctctgtaatcccagcactttgggaggccgaggtgggtggatcacctgaggtcaggagttggagaccagcctggccaacatggtggaaccctgtctctactagaaatacaaaaattagctcggtatggtagtgggcgcctgtgatcccagctagttgggaggctgaggcatgagaattgcttgaacccgggagatggaggttgcagtgagccgagattgcaccattgcactccagtctgggcaacaagagcaaaactccatctcaaaaaaaaaaaaaaaagaagaagaaaaaaattcagtcatagaccaaacttaaaagcagaaatataaaattttactcagatgtgtacttcctgatggcatgaaattcttaattgttttgaaaccaaagtagaaaagcagacaaacgaaaaatactagcaaatcagattctgttatctttcacccaacagagacaagatctctataaaccagcagtccttccccaaatacgtagtatacaaaccgcttcatgtctgtcattttcgtcaaccctggggtccttcaaatgccttttgttccttctcatttacttcaccttgacttttcaagacatattggttatactacacagttggttacatttgaagtatttcatgtaaattacaaaagtatatgaataatgtgaattcatttttgtttatatatgtatatgcatgcatacacatacacacacactcctatagagtgaacatttggctgaatatactgccaaattgttaaacaatagtcatttctagctggtggaattacaggaaaatttgtgtttctgattatatatttctatagcatttaaattttttgcaagtcagcgtgcatttcttagataagcaaaaaaaaaattaaacattttatttaaatttttttcaattccagttgatagcagatgtcaatag

SEQ ID NO: 128673 - DNA, 1072 bp, Homo sapiens
cattggaacatttcagtgaaaaatatgctgcagagagggcacctttagaacattttcagtagtgggatccttttcctgcctggggcttagaaataaaagcactgatcatcaaacaccatacattatatagtgaaaaagggggtcactcaaaatttttgtaaatatattatgaaatatattgaacattctaaatagtctaatacagaagcgaatattgaatatatgtgtaatattttttaaagtctttgtatttttccaaaataaaagaaaaattactagttaactgcttattttctcattcaagatttaaaaataaaacttttcatttaggccgtcttcttgtcttactctttttttctccacatggacttcttgtgatacttaagaataagacctggacattctgattttatgtggattagctgagccttgcagagacacttgttacttactggcacatccagcaagcagctgccagcctcaggatggagttctagggagtgtgtagtttagagctttttactttttgtttttgtttttgttttcttttatcatttttgcctttatttctttccaagtttaattatttttcttgactcaagcacacattctcgggttgaagtagtgatgaggcccagatcttgactcacacatcttttctaccctaaggatctcttaagaatttaaaagcatgatataattcagccctttcattttacagataaagaaacaggttttgagatggacatacctaagatcactagagataaaactaagaaggctgggtgtgttggttcacggctataatcccagcactttgagggtcccaggtggacatattgtttgagcctaggagttcaagaccagcctgggcaacatagcaaaaccttgtgtctacaaaaaaatgcaaaagttagccagacttggtggtgaattgcctatagtcccaactacttgggaggataaggcaggaggatcacttgagccctggagatcaaggatgcagtgagccatgattgtaccactgcactccagcctgggcaacagagtgagaccctgtctcaaaacaata

SEQ ID NO: 128674 - DNA, 1057 bp, Homo sapiens
gcgctactgttttcaggaaagagaataatttatgtttttcctccttcatgactgaattgtctggcagatacatggaaatagaaaaccatgccaggagttgccgagcttcctatttatgggagacaggaagtaacacaacagaaaaataaagaaattaatttgaccaaagtgtccctttagactcacattgttttgttatgtgttgttcaagcatagcacaatttgaacctttaaatactctttatcccactctcacttaatttgatgattcctgcactttcctgtgacttgtctaaaattctactttccctcgaaacccttttgtggatgctaacatacaagcagagtgtcctgtgattcagtcttccctttttccagctaccactccgtgtcactctgtccagcacagtgaggaataactcagcctgtattcagattttaatattttgattctgaacagcttatgaaaaggatctgataatagagatttaaagctaattcacttataaatacaagtgtagggcttaaaagctaaatcagctttacaacaaaatgtcaaggccgctaactatcaacagataatctagtgttttcttaatcaaaaatgatttcatgatgactattttcttgagataatgtgatccacattgaacttagtaagcagtgagtcagatgagatatgtttttatcagtggtgagcatagaatcaatgaactgttagaataacacactcagttcattccgttcacgcctctcattttacattaaagaaatgctgagccgctctcctaaaattataactcatgggagaaccagaactggaatctcagcttttcactggtgttagttcatcaccctgcattcctaagtctgttcaaaagggatcatcttgaaaaaccattctctttttaactttcagttggcagattaacttcataactcatgttaggaagaatcttcagggacattgtacttggtgtgtcacactgacactgagtttctgagggtgcccttcaggtctctctggcagacatttattgctcgcacttgcaagctg

SEQ ID NO: 128675 - DNA, 1192 bp, Homo sapiens
gtccatgcctgtgtcctgaatattattgccaaggttttctatgctatagaaatagcatatttctatgctattcatcattaataacaattatttaataatattaatattaaatagttaatattaaatttttagaatattaaaatttaaaatttttttaaaaataaatattttatattaaattatcaaataaatattaataataattatttaatattataaaattaataatctttcattattgaattattgattgagttaagtaattaattgattaactgataaggattattgttaaattattgtactcttgggtagtacagagactgcatactgcgctttgccatgtaaatactattgtctacttcctggtacgtggctctagggaggctatggcagagtcaagtgcttttgcccttaatgtgaacaaaaaatagtgattgctcttagtagccataatatttggtttattgtctgtgttggtaataatttctgctgtgttttcatacagtgaagtgatgtttctgctgtttattttagttgcattggaatttgttatatttatttctttgttttccttttgataagagaagtacgcacttagttatttataaagatgtttggacttcacatgtgagtacagtggtgacatgctgggttttcctggtcattgcttagctgtatttataaagtgaatattactgagcagttaagccttaacatcgagaatcacccattttcatttttgaaaactggaaaggattaggtagaatgcaaggagaataaattgaacttaaatgtttgtgttcaattgaggtgagctttttcataagaatattcaagcctaggtcaacatgcagcttgttttccctctcaccacctggaattcagtctctatcggtcaatgtcttctaaaagggaaatgggttcttaactatatacttttagtactttattgcttatcttccctttcttggttgaataggctgtgttagatatttagcttcctgcccctttctttatgagacagctagagcagtgcttttcaaaaccttactaatgtgtggatcacctgggggatcttactgaagtgcagatcctggttcagtgggtctgggtctgctcaggcttgaggtgaggtccacgctgctagtcctgtgacccagcattaggtccccaggatacaaaatatgac

SEQ ID NO: 128676 - DNA, 1038 bp, Homo sapiens
tatgaatgataatattaaaatgtaaaaaacactattttcattatgtaatgtgtcacctacaagatgctgaattcctgttgcagcggatgctgaattcactctgcccttcttataagaaatatgttgggccaaccttttgtttttaagtttgcttacagccttacctgtgctctttcaaagtagattttcactattttgaacactctattaaggtaaagatgtgttcggccaatgaaactactagagcaaaatgtttacactgtatttctgatttgattgttttaatacaactgaattagtgttttctcctatctctatgcaatattaattcctgggatgtctgtgtaaattaattaatttactgaccagaactctactttagcttcttatggttttgttttcttaacatttagaaacggctaaatttagaggacataaattttctccatgagattgtttaaattcagttgactttttaatgtggattatatttgaacttgaatgccgcacgcatttttaaggctggttcatggcttctgtcactggtacgttgtatttctcactgtactattcttttacgttgcctcttgtctgaaatgaacttgattttaaccttttattttctggtctaattatatgagcttgtggggagcctcacatattgttagtatatctccttaaataacatgcattgaggctgaggtcagcagatcacttcaggccagaagttcgagaccagcctggccaacacggtgaaacccgatctctactacaaatacaaaaaaaattagccaggtgtggtggtgggcgcctgtggtcccagctactcaagaggctgaggcaggagaattgcttgaacctgggaggtggaggttgcagtgagctgagattgcaccactgcactccagcctggatgacagagtgagagtttgtctcaaaaaataaataaattaaataaataaataaataaataaataaataaataaaataaacatgaattgtataatccagctttgttattttagctctaaacttctg

SEQ ID NO: 128677 - DNA, 1150 bp, Homo sapiens
gatggtaaatgcagtttgctgttctcaagaaattattataaacataagggtggacttaagtttttatccagtcaagcacaattatgcccataattaaaaagacattcacagaacttaacaccttttatcaatttattcgcgagaacaaatgtgagaacgtgagaccattgtgcaaaaagtagtgaggaatgcagtccaaagaaaatttgacgattaacatcctcagaactgagaaaaacaaaaatgaaaaaagactgaattcttgggcaggtagtcttatatcttgcttaatgtttttactgttaatagaaatagaactgataggtataaagattatggcttgctggtgctgtgataacagtatttatatttttatggctttcctaaattccacttcaactttcaaatgcttcattgaaaagttctgggttctaattttttttaagattaagtaataattaagtggataatttaaagtttgcttggatacaggattgtgcagaagttgcctttcatgttcaaaaatgttaatttgtttgtcacagtttattcattcaaaagattaatagctgaaagataaatggtgatttttatctgccactggtgttgttatttagctgtttgagtaggccatatgactaaaacataacaaggagttgaactgtgctccctgatcactgtagttatctaggttgttgggttgttttgttttcatttttaagattactgtttgatttcctttcagctttataaacattttcttaaggagagacaaaagctcctctcagcaaaactgtttgtttgaaataccgtgtaaggaattgaagtgtaaagtaaaaacacaaattccccccattctcgctcataagagattatatatgatgcacaatgacataatgagatttgtccttgaattttttatcacctgcctacaaagagaattgatataaattgtgttgttgccagtttttcctgcattagcgtttccctacctaagtatccatcactcttgtcattgagatatcctagaaacttgttgttgtctttcgaggctgtgaaattttcttattttcagttgtttttcaacttgatacaaggccatgataccgttgttgaattcataaaaccttcttaaatataaagtagatac

SEQ ID NO: 128678 - DNA, 1050 bp, Homo sapiens
gttccaagatgatctgtattgtataacataagtgttctgttttccagttatttactgataaacttgcacataacattcttggttgtgacagcagcgtctgtaaactgtcagtctgattctcagcctcgggttcatctttgcataggtgttctgtctaatcacaattatggatgtttagggtcttgctttggtccgttaagtgatgcaagtttaagtgataaagtttacaggctctaatctggagcatgtgggtcccgtcagcaccgagcacacgccctctgtggtggaagaggacacagtgcgcagccgtgactttcagtgcactgggcttaagtctttgaaaatagttcgagacagttcctcaggtggactgggatgtttagaaatctgctggtcggatcatcatggttgtggccttgagcgaatagcctgagcctttccagtagtaccatttaatgccgttgaacttatttgtgttctgcctctgtggatagtacattccgttcaagttggaaggaccacatgcatcaaaccaccagcctgtgaaagtaaaacacagaaggaattaggaactaggtgatgccagctcccaccacgaagacagcaatactcagctaaggcaggaggcacactgcaggcgtgtggagtaggcacatgcagatgatggtgagtataggatgtgcactggcagagggattgttttccagccatacacccatgacatcacagttccattacggcaaatgcttttacaagccttcttccaccttttcccttgtgctgtgtggagaggcctgaattctccacagtcctatttggtaagcccacagtgtgtacacacttacagcaggagtaagcaaacatctgaggcacagttggaaaactctccttcaaccaggattactttgcagtcccagcaacatggtgggctggactcgctcaggctccccttgctctattaaatgattttttcggttgaagtttaaactaaaatattaagtactcagtggagctacataaaaaggaagtctctatgtttcagagacaaaa

SEQ ID NO: 128679 - DNA, 1005 bp, Homo sapiens
ttgtggacatcgttacaaatcacaatttgtagtccaaattgccagcctttccctctatgaaatcattccttgccaatacaaataggaagacagaaagtcatccctacctcctgttagcatttgtgaacatttgcaaatacatttgtcgttgtctccatcctttgtgctaaaatcatttcctggttggctgatgctgcttattttgccggctgtccctgtaagtcctttaaggtgaatcctgtaagcgtgcaaagaaaaaaaacacattggctagggtcattgatttaccgtagtggcaaattttttgtgatgaagaattccattctacagaagcgtgttctgtactcgttaatggactaatgcatactctggacaaaatattttgcactggtataaacaggaaccaacttatcatcaaatccttcagcaaagagggatgttttcatgaaaccttcaacacatatcacttgcacaactatcagaagcgactgtagagccctgtaatttattttcctgctgctttcagataaacagaagagaaagaaatgcagcaccaggctcctcctcccaggtctccagtcatcttccatagagacggagtcctgagacaactggacaacctcaaacattattttccgcagggggccccgggggggatggagaatgcagcagacaaggaatggccactgagtttggggaagaaatctacagaacggtgctgaaaataaatccttgtggctacatttcctcatgtctgtatagtagggtaatgtaattaaacttttagacattgagaaaggaacaaatgtcggagtaagttagacactatttacaatacagacgatccctgacttcccatggggctatgttctgataagcccattttctgttgaaaatgttgtatattgaaaatgcatggaatacacctgacctttggagcatcatagcttagctctagccttccttaaatgtgctcggaacactcacattagcccacagtcagac

SEQ ID NO: 128680 - DNA, 2764 bp, Homo sapiens
cctgagtgcaggactcagccgagagggttctctgggatataaggcacggagtagaccatcggggttgtctaagaaacagatggtttcaaataaattgaaagtgatggattaaaatgatggtgaaacataaacagtaatataatataaagtgttgatgagaatatgactcacttgtcatcatctgttccaggctaaagaccccaccctgatggctggtccagagattgctgtttttttagagattcattatgaatggcacattttggcagattggccccgaaccccacatctccatcctgtagaaaaccattgacttgtgttcacagccttgaaacctttcactaaatgccagcccctgcccctccacagagagctatgtgaaggggatactctttgatcatagggtttggaggactcctgttacattctcgtactgtggggctgtttggcttcctttatgtgcaatactaatcagattttttggttcacatctgagcacaagggccttgaggctccagtgtcctggtgcaaggtgtgtgacctgggcttggcttagcaccttggcctcaagggcatgacttcacgcttctctgtacatagctcactgcccacagtttttctctaagcaactctttttatttctgctcttaaactggctctgtgggtttaaactttgtccagaacacagaattctttcttaagctaagcgcatgcatgctcaatttcaactcagctggagttttattatgaaattaaaaacccctgaaaataagattacataaatagttttaaataataaagattacagtagaacgaaacatgttttccagaaagtaagataaattttctgccacatacaaggtaggaaatattgaagttaaggttcaaaaccaattgtaaatattcttcttgtgttgtgtcccatggtctttttgagaataatggaggcgatttggcagggtaagcttcaacgcacactgttctctgtttacgagttagaatcctaaagaggagagcgaaaagagaaccaagagagtgctattcctgttctttcatttcctacatgaggaaagaggggtgcagaggaagtgcagtggctgcctgatgcctcattgccagtgcaaccagagaactgtccctggaacagcctggtctgcaggggacttctccccagcatggttctggtctctctccaggaaggtcacccagctcgtattgccttccccagtggcactcatgtttggaaacataggtgccattaatgaaagttacatttattaagaagaaaattatttcctcattttaaattaatctgatgtagaaaatcagtctgcacaagctaaccccttgttaccgctctgtattgctatgatttttattatcattgctacacaccactctcatccaagtactctgccagatactttgtgtatattatctataatctcacagcaactctgctgtagtatcataattctgcatttttgaaaggagaaaagatttagcaaagttcgattttgatcagttactcaccttctaagtgatatataggatttgaataaggtctctttgattcctgttatgttttttttccactgacatcatgctgccaaaaacagagaaacctgaccctttggtaaataggccaaaagtccctcaacacagttccaagtttaaatcagttcatgaataatactgcctcttatttgcctgcagtcaacaaaatggtcagtgctgctcacttctatcaatatttctttttaaaaatctatttcataaaccagctgaataagctactttggtttgaggattcatgtacatatattgaagttaattctgtatcctaaatggtatgctcttgggttgaaagcattgacgtggctcttggtgagcctatccttgttccaagaatgtttgattcttcagtgtcaaaattactgctatgaagttaccagtacttaaatacatgttctatcttgttcagagaacaagtttatcttgttatggaagtcagaggcaaaactcttaaatgtctgagagtcactgccagcacataaatgatttgagccatatgagtattcgctttgattccattagtgatgatgataaggttattagaacattttcttagtacttcatccaggtttttagaaaaaagaacagaggatttgtaaaaactggagtattatggttaattggactataaaacttgcagagaaagatagtgttcaaatagagttatctacccagccagaagatactgagtaaaagtgctgaaattgattatatcaggatcagcaaagcagaagtcctcagatacttcccaagaccttaccactccaattacaacaaacctaagggcagttaatatctttaatctgtccactggtgcatggtgcaggaacctgatatctttctataaagcttgatgtttttcagcaaataatacttgacttgcttcaactctgaggcaatgattaagtgacgggttaaatagcaaaccatagagacaaccgttaggagtcaggtgtcctgtgaaatttagggaaggaaatgaccatacatgcttttgataaatgccatcttgcagtctctctctcgtagaagaaccaaatgaatttttcaaaactaaagctgcagtattttggcctttcaggaaaagatgtgctcaaagaccaattgaacattcttttcttgaattagataaatgagtgcagaatcgggtctcctgccaggcagagaagttgtctggtagtctttgaag

SEQ ID NO: 128681 - DNA, 2113 bp, Homo sapiens
ttatctgtatcatgaccccattgcctgccccttcaggccattatcccactgaggacatagtggggtgcagtgacacatctcagcttaccgcatcctcctcctcccaggtttaagtgattctcctacctcagcctcccaagcagctgggatttcaggtgcccaccaccaagcccagctaatttttgtatttttagtagagacaggatttcaccatgttggccacgctggtctccaactcctgtcctcaagtgatctgcctgcctcagcctcccaaagtgctgcaattagaggcgtgatccaccacacctggcccttccctccaatatataagagacgctgcaaagtgaaacaataataaggaaggcaaaatgtgcttaagaacctggcaagataagggaactagcatctcttaagtgccattgtattatctcatttaatcttaatggccatcccatgggtctgatattatttttcccatgtaaaacctaaataaatgaatatcggctgtggtttagtaatttgcccagtctcatccttctaattaatgatggaactaactaaaagtaggctctttactgccatgaatcaaaagtatgcttggggtgtttgcttcataataattagtataacatatatttccccttctcttcttccttcattttaattggtagatatttcatatgaaatatatgagaaatagcgccttttctgaaaggtgagaattttttagtcttttgagtgttttactgactaaaggttattaacgctgaagaaagcatgatatgtaaacttacagtttgatgtggacatcatagtcagtaagttattaactgtctccatgagatcatgttgctgcttctgaagaactgaattattcaccgtggcagtcactatttttttttctagttcttcaatgatggaattttgcttggatactaacacctgtagctgatctttctcttcttttattgactgtagttggatgatgtgcttgtcttccatagctagcaccttcttttctaggaaacttgtaaggaaaagaattgttagttagtgaaggctattctaatgaaatattttatatttattgaatttctacttctccaaggtactctgttaagatattgtagtggttataaagtaatatgatgttaccagagccctaaggaatctctgaaacttgctgagaagattagatatataaatgtgtgtatatatgtaaacgtataagcatatatgtatgtacatgcagacttatgcatacacacaagaaaaggtaccccatctggtccaggataggtgggatatgggtgttttttgtattagatgctgcagcgctcagaagaaaggtgctgctctttcaagcttagtgctcatgaagtgcttttttgagaagggagagtttcaactgggctggacccttgggtaggatattagctttctcctaaactatttatattttaatattaatcctaatgataataatagcacttaatgctatgtgagaaatactccttcatggggaggtgaatacttctcccagactcaagtactggcttaccagccctgcgacttggaacagtttacttagtcaccctatgcgttaatgtcctcacctgttaattaggatactatcacctaggtcatggggttggtgtgaggaacaaatgggttttaaaatgtaaatgctggccgggcgcagtggctcacgcttgtaatcccagcactttgggaggccgaggcgggcggatcacgaggtcgggagattgagagtatcctggctaacacggtgaaaccccgtctccactaaaaatacaaaaaattctccaggcgtggtggcgggcgcctgtagtcacagctactctggaggctgaggcaggagaatggcgtgatctcgggaggcggagcttgcagtgagctgagatcatgccactgcactccagcctgggcgacagagcgagactccgtctcaaaaaaaaagaaaaaaaaatgtaaacgcttagactagcgcctgtcatacattaacagtcaatgaatgtttgttaacgttaatatagacattattattcccatttccaatgaggaaattgaaacttagggacattgagggcca

SEQ ID NO: 128682 - DNA, 1198 bp, Homo sapiens
tcgggccccttttagttcgaatgatctggtaaatccacctttttttgacagtaacattttctgactctttaaccctgcaaacaatattaaccagccaaggaactggctacccattacatatctcgcccataagcaataacaatcagtattaataataattattagatattcaattgtagctcttaaatgtattccagccccctgatcgttgtaaattagtatgtaattttggagagatgggggtctgtctttgttgcccaggttggtatcaaactcctaggttcaagcgatccacctgcctcagccatccaaataggagggattacaggtgtgtgccaccacatctggctaatttttgtattttttgtaaaaatgagttctcattatattgccctggctagtctcaaactcctggcctcaagaaatcctatcactctggcctcccaaagtgctgggattataggcatgagccactgtgcctggcttgaatctattctataaagaaagcaattgcacttttggggaattataaaagattatttaaaatgtggtttgtccaatgtgaaacaccatttgcatatttttgtaatgatatacttgcaaataaaatcataggccagtcagaattaaggtagaaaacacagcatgcagaactcatacacctgtaaaatcatcaacactattttctttttttattatttatagctgttgatgaaaaaaacctttttatttcctttcatatctgtgacaaaaaaatacgatttctacagctgatgagaaaaagcttattcttcctacaggcatagttgaaagccaatatgattggaaaaatatttgcaaagatgatatttggggaacataattgacccaaattggtagttttagcattgtagcatgctaaatttgaaacccaagtggggaaacagtattcagtattagggtatgttctacaaactggacatatcctaggtttgtcacggacatcattgtataacaggcaagagaaaagtaatctccagctcccatgtgttccaggaatcactgcagcattttgaagagaacattactaagtaagactattttaagaaaacgacgccaggtacggtggctcatgcctgtaatcccagcactttaggatgctgcggtgggcagaaggcttaaattcaggagtttgagaccagcctgggcaatatggcaa

SEQ ID NO: 128683 - DNA, 1055 bp, Homo sapiens
atgcctgggccagtggttctttcactccacagcactagctgtatttttataatagattagcatgtagaatactgaggcagggtttggaggattactctaagaggatcttttgggccagtggttctttcactccacagcactagctgtatttttataatagattagcatgcagaatactgaggcagggtttggaggattactctaagaggatctttaaggggccagggaatgaaaggtaaaatccaggactgtgttaggagagctgtgcctgtgcaggaattttctccaagccctctcccttctcctccctcatgaggtttctgacccttacactagacatgaagaaactcaccattctgataattcatcatttgagaccgactttcatatctggaaagtgtgcagtcctgaattataaatgttttagtactgttattacctgttcttatcttgcaatttgtttatttcactggtctggtccaaaatctgtttttccaatttgtttgtcgagagggagtgttccaagagctgaagttcaagtctcgtggtctgatttaatacctaaatgtaacaaaatgaagttcctattaattattttttaattagtttaactttctaacttccttttcattaaagtacccaagctacaggaaaacataacaaaaacattatttattaacccaagtatcttattttggcatatttttcattttcagaaaaggctcaatgtcttagatcacatctgagtgtgttaaacctttttactcttttccccacgtctctattttttttttttttgagatggaatctcgctccattgcccggggtggagtgcagtggcatgatctcggctcactgcaacctccgcctcccgggttcaagcaattcttctgcctcattctccccagtagctgggattacaggtgcgtaccaccatacccagctaattttttatatttttggtacagatggggtttcaccatgttggccaggctggtctggaactcctgacctcaagggattcacctgcctcggcctcccatagtgctgggatt

SEQ ID NO: 128684 - DNA, 2808 bp, Homo sapiens
acaaaatgctattctcatatttatttgtcactagacagagagattggaagtcacatgcttccattatataaaaatatagataatttttagcctgggatttcctcatttgtcaccacttgtttagacttttatttcttcttgccatttctccttcctgttttaaaacttgtttgaaccaatcgaagccgtatagcgtgagtgtgaagcggagcctcagccttgccgtgcgggcctttgtgagctactgcgtggcatgagcagtgcggctctcccgcggattctctagcgcctggttgcccttcagcaggaagaatcgactactcacttcctccatgtcatgcttattcaggatgtgatatcacatgcaaatgtcagtcagcattgttgccaaggaaccggagaccttgaaagaatcattgtttgctggtgtctttatgtcatttgcaggagccttggctggtccacagcgtgggtttcagggatggtcttatccttagagctggtttagttcttatcacaaaaagtcttctgtgagaataaagtccttggccaacgtaaggttttgtttgggttttaatattaacacctggaatatacatttggcctacgtcttctttgagtccaaacattctatgttggttatttctaaaaggaactggaaaattgtgtcctgtttaattcataagggttataacatgagtaaaattccgtgtggaggcagggaaggatggcatataagtcatgattggcccagtagtaattgtaaccattttcacatcacttttctggagagcatcaaaccgctggaccagcctgaaggcgtccatctgcaggggactgtaaattacccaggccaggtattgatctctcattccctttaagatatgagacctccagccacccattgttgctcaatttgatcgtctctcattctgacaggcttggagaatcttgcttctaatcagaaattttcagatttgaatttaagtctgtttcacaaaatcagtaactgctcagcaagtaccttcaaacagagtgggtacataattcagtttctttgcggccttccttaagctcagccatttttcttttttttttttttttgagacagagtctcactctgttgcccaggctgcagtgcggtggcaccatatctgttcactacagactctgcctcccaggcttaagcacttcttgtaacctcactaagcctcccaagtaactgggtctataagtgcacacaagcacgcctggctaatttttttttttttttttttttggtagagatggggtttcaccatgttgctcaagctggtctcggactcctgatctcaagcgatccacccacctcggcctctcaaagtgctaggattatagatctgagcaagcgtgctcagctggctcagccattttcatgtgtttaattgggcttcacatggaaaaactgcttactttccatctgttttcttattttcctgttatcctggataacatgatatctagtttcacaataggcgttttttttttaaatcatatgacgcaacacaagtacatcaaatgctatgaagtctctgaccgctataggatgtagcaaggtttgcattgctgctctgtcctaacactttttcattactattattattttttatttttttaaatttttgccaagttcccatgcttggatctaactattattttaaaatataagaaatgttgtagtttaaaaatgcttatgagacattttttggatgagctattcaattacccatcagtgttagtatcaaaaggtggggcatgtgacttaatcattactaatttattttaataggttggtgcaattttgccattgaaagtaatggtggccaggtacggtggctcacgcctgtgatcccagcagtttgggaggccaaggcaggtggatcacctgaggtcaggagttcgagaccagcctggccaacgtggtgaaaccctgtctctactaaaaatacagaaatttagccaggtgtggtagcctgcacctgtaatcccagctacgcgggaggctaaggcacgagaatcgcttgaacccgggaggtggaggttgcagcaagtcgagatcacaccactgcactccaacctgggcaatgcagtgagactctgtctcaaaaaaaaaaaaaaaaaaaaaaagtaatggcaaaatctgcagttacttttggtccaacctaataattcgctttagatatatattgatatattgacttttaaatctttagtttttatgacttcctaagatttaaatttttagtaccttatgatccgttatgtaaaatatttatgtatgtttttcttgaactgttgtgatattgtggaaagacctggtagtcaagtaatttgttattctattctcttatctgtaagtcttttgttaatctatcatttcactactgttttctctgacctcatccaaccatttttaggaagacaatgaaagaacagctgtgtccttctagaatgagtcttacgagagtggcagggcttatggcatctcccctctcatgtcctctcctggctgacgtctagcatttcttgatcctttttgctgaagtagcatttaggaataatatggagtggggattgtttcacttaaatctgctctttttttaaaagtattccttatagcccagagtaggaagccactgacttcagaagcatgtaaagaagccaggatgaggagtcagaaagcgggcttggccgccgagagtcacgaccacggccttgagcttggagcgtctgcatttgtactgctaatagcagcttttccctttccca

SEQ ID NO: 128685 - DNA, 1091 bp, Homo sapiens
cagagtttctagctctttgcctcagtgcttttcatttctcaaatgttcaaagactttaggacttagaaatggaaaatgattcccggagtccagaaagcaccagggagacagagggggtattcatcttgcagtggttgggatgcgtggcatgaaaatgactcacatgtcttcagtagatagaacacatgaaatttaacctcagtattaaaaacaaaaacagatttactgatttttaattcataagcagccatacatccttaatttcttatcaattcattccttttctcctgtggtggtgctttctttagtttctcatgccttcattgaggaagctcctgacgcgactgagtgctagtctctagctgcagggacaccgtgtgctttatgtggcattacttacttgggcttccacatcagttaacttccgcgtttgctccgctgtttggttcaacaggtttgtccctatttctatcatcacagccgtctggttctgtactgcattctgctgtatctctaccatttctttcttcatgttgtcctggatataattctcaagctagaaaagaacagtgttagaaggcagtcattagtcaaatgaccggaaacctgattcctaaatgtttgtcgtctcctccctatctttaaaaaaaaaaaaaaaaaatctatcaaaagacttgtaccttgccttccttttggaatcttactatttttttttatcattaggaaaatacagtgtgattttatttttatgcaaaatctggcaacttagtcacatcatgtaaaggagggagacaagctactggttgcttctgtgttcttctagaagtccatgtcatggcaggccacagagggtggtgagggcagccacagggactgctgggtgcggccactgtggggttgtgtctgtcctacccagctgcaactctgaccatgcagtcaggaaatgataatttgacacaaagaagcatcactatttctctcacattctagacttttggtttctccacatagacttgagaagacactctaagacagcatataaggagaggagcacccttttgattttccttttaacctacggaatcaccact

SEQ ID NO: 128686 - DNA, 2273 bp, Homo sapiens
aaaaaaagaaaaaaattaaaattaaaagtaaaaatacttatgttcttactcttgaagtcattaaattaaggttttaagagaaatatatgatgtgacagtcaggtactctttaaaaacaaggaagaatactgtatatttagccccagaaacactagcgacaggaacagccacagtaatggtaggtactgtttcttggttgccggcactgcctgtgctgtatgggaatcgctgtgtcgggatcccaggcgcctcacatcagcacaggtggatgcagggctgagcactggaatgaccctcagcaaaatgttagctcaacccagaggccgcttcatacttttccagccttttaagagccaaagtgatatatctcaaaattggcttgagtatgccttccaattccaggcttcacaatgccttaagaaaacagacagaccacccacccctcagtggagggccatttttaccaccagaaaagcccagaattaaagatgaccaatgccaattctatcttctgggagcatcctgacaaaagaatctgtgttttcttccaaagattagtagtaatttttagaggtacagaaagactatggatgtccatcatatagtataaaaatgaacatttccaaataaagatgtcccatttaatgtagcctttccataaatcaccacgtatcaaggataatgagaacaaacctagaaacaaagccatctggctcatccacttggatagacagaccttgaaatttccctgtctcttgaccttgatgaattagttattttctagtttattgtcctagaatgtctttctgtttagtgtctctcttatttttactggctgtgactgaaacccagaaatatagaaacctgcccagaaatatgaaattccattctaagtataaggaagtcttagtacaagaaaaaaaaaaaaaaaaaaccaacccagtaaataagccatcctccactggcagcaccaaactccacttgcctttggagaatgtttcccatccctgtcatctgcaccgaactgctctcatcaaaacagttccaagatacttgaacctcccgtgggaggggacccggctctttccaatttcacatgcatagcatgtgaaacatattcatgtttcgcaggaatgtttgccatcgccttcatatctgaagaggattattccatgagcgtgatctgtaggcacacgtgtctgaataggtcctgctgtatatgtgtgcgaggacagtgtgtgtttattttgtcctcttcttgatggttgacacagtcggcaaagtgtggggccttgggctgttcttcctttctcagaactcaagtgagttatgcaagtttaacattgagggccacagtgatccttctagctgcatggtttgctgcttagtgttatttgatttgctaaaagagttgcgccccagacatagtctttaaaacttggcagcgcatcgaaactcaagcaaccaggatgaaatattttaatgcaacatatatatatatatatgtttacattaatatatatatattttagtgcaaaatatgttctgaagttttttattactcccacaacgttttgaatgatcaaatttgacaggaaaaataggtccatttgtgaggcaactatggcagattgattacacatttaaaagtttatctggctatcttccttctcaccaagattgtcatcattattttttataccaaaagaaaagtaatcttgaaactggctcagtaaaggaaaacatagataatatatgaaaactatccccaacttggagattctgatgttgatttctcaccaactgtagatgctggttgagagatcctttctatttaaataaaattcaaggtccttagacctttttactaattagtttttgtccatctgagtgacctaaggtggacaaaaactaattaatcagagggtctaaagaccttgaattttctggtaaattaacaaataatttgagatttccttggaaactttttactgttgcccatttcaatttcgaaataggattttgcaaccatctctcacacacacatacacgtttttctatcccaatgatccatccatcttcccacccagcccttccatttttctagtaaacccttgaatttttctagtaaattcacaaataatttgagatttccttggaaacattttactgttgcccacttctatttagaaataagatattgcaaccatctgtcttacacacacacatacacgttttctaccccccatgatcccatcttcccgcccagggtc

SEQ ID NO: 128687 - DNA, 1059 bp, Homo sapiens
gcaaaagctaaaggccgagggagggaagcctggcctctggtgccaatttcctagtgggtattgtgacttctcttagggagcacacttgccttcacctgccctgaccacatggacgcctgcccacatagggtcttttaagcacttcctgaaatggatctgttctgatctagcctttttgcttttttctagtcatacttttttattgtcttttttttgagatggagtctcgctctgtctctcaggctggagtgcagcggcgtgatcttggctcactgcaacctctgcctccctggttcaaacgattctcccgcctcagcttcccaagtagctggggttacaggcgcacaccaccatgcctgggaaatttttgtatttttaatagagatggggcttcgccatgttggtcaggctggtctgaaactcctgacatcaggccatctgcctgccttggcctcccaaagtgctaggattacaggtgtgagccactgtgcctggccatttaataatttatgagtgactatctgatactgtatctagataaccaacccctttcctactttcgctagtataagagactgaaagttcacttttggccactatataactccaagatgtattaggaaataagtttgtgggcctcagctggtggcattctaacattaatagtccatgcctctcctcctgtggataggtacaccctacagtaatttgagtgtaccagaatgtctgtgctctggcaaatcctatccgctttgctcttctttgagtgcagctgcatattctttgcattaatttttttcacatatatttgaatatatgtttttccacatatattcatatcattttacctctttgtgtgtttcccttaccactactccaaaatttgataaggaaatgtgcttttcccttcaaaatgttccatttattttctactgataaagtggctatttctcatcaatagcaggcattttaaatatatgtaagtttaaggagactgctgtagtaacctcatgtaaatttctttgggcatttcatatgcaaaaggtgtcacattttaca

SEQ ID NO: 128688 - DNA, 1064 bp, Homo sapiens
aggcaggggcgccgcagggtggttcgcacacgtggactcaggcggccaccgccgcgctggctggtaagaagccccacaggatctcccaaggagccctgggacagtgtctcagaacatccacctggggcaagaatggggactgctgtccccagggggcaggtggagcctagtgggcattcatgacccaggttttggagctgtgcttgcgagagtgccgaggaggctctcatgggtgtcccgaggcagcttggagccaacgtccctaggcatggcctgggggtttgtgggaaggcctgaggcaaggcctgtctctgagatgtcctgaagagcaagttgggcccagagggttaattccgagcagcacaagagggtgaattctgagcagcaccagagggtttccctgacacagcaggggatgctttgaggcccctttaatgaaggagaaaaatgaggcttagagaaagtcagtgcccaccccaagtctcatgggccccaggctgtgggcagtggctaaagacaggctagtgggtaactcggggccacgtggaaggggagcttgtatttatagcccccagtcagcagcgctggagaggagaggagaggaaaagcagtgctctgagaaagacaatatttctagtagattggggcagggcaggcctggagacaggaaaccaaagccagggttgtcatgcaggagtgagatgaggttgcagcagcagagcgaatgcggagacgctcggcaggtccttggtggcctctgagttattctgcagacttctgccattcgtctattttttgggatactttgttaaattctcagcttagaagatagtagtgatgttttccctacagagatagaagaaaatataaaactattttctttttaaaactgtactgaatgtagggccgggcatagtggctcactcctgtaatcccaatactttagggggccaaggtaggaggatcacttgaggtcagcagttcaagaccagcctaggcaacatggcgagactccatctctacagaaaatttttttaaaaattagctggacatggtggctcatg

SEQ ID NO: 128689 - DNA, 1884 bp, Homo sapiens
cttggtcacaatgactatcctaaatggctagaaaagggaaaaggctagcgaaacttagatgattttctaaatttagataattttctagaagacattttccaggcaaactagtttttgctgtcctttataaggccggcaggaagcgtgtgttgtttctgttttaaaaagggagaggagcggacttgggaatgctgatgggaatgcttgagaaatctcacagcagggctgtgcgtgccctgccgggtcccactgcctctggacagaaacccccgcaactccacccccagccaagactttctgcttctttatctcctctttctgctagcacccaaaaagttgaaagaattccaatggatagaatttttgagataatattggaagatgctcaaaatacacaggattaatttacacgaagactcagcgggaacacaagccatcttctgtacatgaagatgcactactgacccgccgtccgcaaatgtgtttgtacagttactttctcagtatgggtgatggctctccaacgaactgctcctcgtctcctgcctggacacccttctctctgtgctttcctgggttagagtaaatggatgcaaacacacatttccgtgctctgcagcaacttgagactcctgtgagcaaaacgcactgacgggcaatgtgcgtgggtcgtggggagcatccagctcccatctgcggaataaacccgcccaaaccatagggaaaagcgctgtcgtataaggccaggggattttcagaaaagaaatgtgttctttcctctttgatttttgtgttcataaagctgtaggtgcagctttttttaatgtaatgatttcataaccgctgaagttcgtgcttttctgaactatttaggaagataatctaccccttgtattggatgagatgatctgtcccttcgacctctggttcagttcccattctcccaagtatttaaagctgcgagttttttcatattttcatatttatttacataatttaaaccccctgtgtgcatggactttaaggagctgtacatctgcctgggctttgcagaagctgaaagggcgcaatctttttataactcacattagaaacacagattatttaacggggctatgttttgcaccttaatctttaaagttgcaatatattttaagcattttaaccttgttttagatctgatcagcagtagaatgttttcagataagaaacaatggagcaaaagcaaaacaatattcaatacctagatgatgtggcaagacagagaatagtataactttttgttttccaaacataacttttatcttcatctcttgatctgaaatttggtaggaagtgtaacaagtacgaatcaacatatttaccatttgccatttcaaatgttgatagtgaagctgggacctctgtttattatggaagaccatagaaaaccccataaacacgttctacttctgtctgtggccagcagtccagcaaaaatgttctaaaagcacatgcactgtgttccgtgatgattatagtttgactgtgctggaaagagagactgtgaactgcacatggtgattatgactttgggcaaatcactgaacttgtaattatgtcttccaagacctcctaacccaaaataagagagtattttactacaaaatatatgttacgtcaaactgttttttacaaaataccagctctagggatgtttccaagtcattttcggagagagtttgtcgaagtttttttcagggtgtgtcattcatgtattggagggggagagggttgagtaagaaccgacatgcacaacttggccatgaaatgaagcgcaagcacatattttatttctataggattcctcattctaaagtaatttttacagaaaatggcactcta

SEQ ID NO: 128690 - DNA, 1696 bp, Homo sapiens
ttcccaaactgtgtgccaaggcaccctgggtccttgcagcaaacaaattggagtaagggagacagtctgaatattcaagggcaacccagcagtgttcaatgactgtcagccactggaagaattcatagctcaaagcagttcaccgtttcaacagtatcagcttgtacctctgtaaagctaggtttttggtggttgctgtttgtgaaaagcaagtgctacaggaaaattagcatagagcgtaaaatgcaggtggcagtgtccaatttgattccaaagtttgagaagccaggtgtgcctaactggcaaatatattccattcatacgtcactggggttacttaagaaagaaaataaaggatctttttttaaaactcaatttatatgtatattggtattttcaaatagctactaaattgtcagaacataaatacttaaattatttggagctaaccgcttaatacaagcaactgttggcctagagataaatagagaaaaaatagtgaatcactaagggtcccatgagctgagaaagtttgagaacaactagcctagaagcttgcacttggtaggatataaactcaacgtaccctcttcctccccttcccccaatccaagtattgcctttaattgtaatctctatgatttgatatgtttatcggaaagcgagtaagtcaaaaagaactaataaattgtgtaagaccttcattaagatgtacccttccgtgttttcctaacttctgaaatcactaggaaaaacagccatgttccttgcaagctggctggttagtcctgtcttctttcaggtgaacagcatttataaccacggtgtacctcggaagaagcgttctcagagcaacatgcacgtgttccgtgtgtaccgtggttgccttcgggctaatgcgtttttggaagtgtagataggtgccagttttacaaaactcatgtggcctatttctgcttgtaatttatagtttgcctcctcaccatcctcacttgctctaaggtgaactagttttataccattagattatacagaaaagtcaaatttacttgcatgccacagcaattcgggaagtaaactttcagtgtgattctccaaatgcttgtggtaaaagtacagagacttgaatcattttcccataattagtttcagttctggaggtccgccccctctctttaaccctcttgccttgcatatgtgtctcttgcaatggaagctagtggaaatttcctctcccctttcactccactgccataagttataaaaagcatgccattcagaactgacgttttcttctgcatgcttgaatttttactcaacaactggaaggggaagaagttatttccagagatgtttctctgtttatcaaaggggcgcagagtcacagtagcactttggaccaccgtagaatggctgactcacttgcctcatcagtagaggggcacatgttcctatcaaacagtgagtgcctttgagtgacggtgtgtgacacacagcacagcagcaccatttctcagagctgcagcaacactggttcacacaagtcactagagattcccatctccactgactcactcggtgggaacaaaagctcccatgccggtgggaatgcggggccaggggagcaccggaagaagggagccgtggcagaggttttcctattgttaggtttgtttgtttgtttcagtgagtcatc

SEQ ID NO: 128691 - DNA, 1039 bp, Homo sapiens
tagttcctgccttcttctgccatagaaacaacatgcagaagcagcattgcttacgactcacactgaacctgaagggatgaaattacatatgacgatggaatgtggccatattcacgcagtcacagcagtgtgttgcccaatgacagtactggagcagtttccacagaggcactcatgcaatatgcagaatacagacattttacacacacacttacgatggtccttttcattgtcgaaaaggaattcattatctttcgagtaaacatgtgctttgaggtatataactctgaggtatagaagttagaacatttaacccgattagggtgactggaattataacctttaactaatgtgagatatagtatagatcttgataagtgtctttctggtgttcctattaaaattcattataattaccgttcctgcaattgtgtagcatcttacagtttccaacaccctgtgctagccatcatcttatttgaaacacataataaccctacaagttcactgatgtaggtaagaaaactggtaccgtttctgaagatacacagtgattgtttcggccagttaattaaggcaagagatcactcaacaattgttctacagttattcctgcttttttttttttaactcactcattaagtgaaagaagccagtccgaaaaggctgtatattttatgattccaactgtatgacattctggaaaagggaaaactgaagatagtaaaaggatcagggtttgccaggggttaaggggaagaagggctgtgcaggtagagcacagaggattcttagggcagtgaagctgctctgtgtgatgctacaatggtggatccatggcttcatacattggtccaaacccacagaatgtacagcaccagatgtcaactgcgggctctgggtgataatgatgggtcaatgtagattcatcagttgtaaccagtgcaccactctggtgcaggatgttgatcgtaggggaggtggctgtgtgtgtgccacggaggggggatatgggaactctctgcactttactctcgat

SEQ ID NO: 128692 - DNA, 1120 bp, Homo sapiens
ttttgaacaaataaatcaacttgcatggctcctgccccaaactggaaaccccacctaggaggggtgggcggggtcatatggtgttcactcacttacgctaatgaactgagaaataacgcacttctgcccaaattcatgttcattcacactcctctcagcagttttctgcagtcttcccagccccacggaaaattctgcttttgtcagaggaggggatatgcgtgctttcccgtgtttgctttaccgctgggcaatccatacaaggctactaaactgcagagggtactggtgttagcatgccccgtgtttataagggacttaaaaaaatatacaggcttgcatccaccatacctaccatacttgtgtactagagatattctcggggcaaaatgaggtgaggtgtggaaagtgctttaaggtgactcagagccaccctgttgcgattgctgccttcgtgatgactggtgtggctgcaaagttcagtggctgtctttatatcagaataattctagaataatttaggagaaaattctcattgttaggttccttcaagccaaaggaggatgtagtgaaaagagaataggtgttggctgtctagatgggccctgtttaattagagtcgactgtatcagttgccaaatgaagccaatcttacagggccatcctatagaacaaatatatattttttatatttaatatgatatatatgtgtgtgtacacacacacacacacacacacacacatacatatatacagggagagatagaatggtttgcctgctgacttgccattaagtaccgtaaacatcctggaaattgtgaacagctaattggaaaacagtctgtccgtgttcatgattcattgtatgcatcctctagatctcaactcaggaaatccacaaagctgaccaggccctgctgtcattttgtggccagatatggaaagatataaaccacctcctttcttccctgtcaaaacagttgtgccacgtcctccccctcttcctcatcttgactgactccctcacaggtggtgtctctgtctctcctgcccctgcccccacacgcacctttagttacctcagtctttcaaattttgctctttgttcctaagtacagtc

SEQ ID NO: 128693 - DNA, 2077 bp, Homo sapiens
gagttcagtatttagactatatggattatctagtgtctcaatagaaggtaaggttatggaaatccatttcctagttctaaactctgcaagcaaacaatcatctccccatagtgtgatatctaaatagttaatccagtatgtcagacaaccccatttagtaaacaaagactacttgaccatagaaaacatatgatatatgtataatatataatccatatagagtaaacatgtattatattttatatactgtataggcacatatcatactatacatatacatatcgcataagagatacagtaaactatatttgtattttccaaaattaaatatgttgcagttcccctaccatagtgaaactgtctcttctacattccttactgcattccttactatatagtaatactaacactgagcacaatcatatttcaccactcaggatgtagccagcggatacagtaatggttcttgtcctccgcaggaggaccacgggagaccagtggctgtgaatgggatgggatttttttctttcctctaatgaaccaagccctgggttttattgttgttgttttaatatacagctattgagtgttttgtagccacacacgacaacacacacacacacacacacacacacacacagagtccctagcaagggcagggtggggctagcgggctgggttcccctgggagcccctcaccatccatttctcccagtgacggcagctatgtttgaagagcataactgcatggtttcctatgcattcattcgtgagtagtagctctcatatattattaaaaagatacactattattacttttaaagaaagaaaaggattgcaattcacatttacactttccagcctgttcttgtgttgtttaaaaaacaaacaaacaaaaaacgatggcagaggaaatgtttgcctccgtagtaggcatcaactttatttttcaaatcattctgttttaacgtgttcatagactgcagttgtttataggtatgaggcactcatcagtgtgaaatagttctttcctttccatatttcctcttatcagaaaaaaaaattcctgtggtctcctagcaaaatacaatccattttgctaaattatttgtgagtttttataaagtgtgtttaatatcaccagggcagaggttcacactagttgcaggattagcaagagagacgtagcatgagtagtgtttggtccactgcagtgtgttttgtgtgctagcgatcatgagtttatctgatccttgtttaactactacacagtgagtaagctgtcctgtattgttccattcatattcctctgagttcattcagaagcctgacacttcctttgccggacagattaaaggggcagcgtgggaccttttgatgatgtgaaacctgctttcttagtctaagctccctaggctatgctgaccactcagaggttgaactactatttatttgccctaaaatgaaccagaaacttggtcttagtttccttcctgacacatgttttaatttcctaaaagtgtacggattttgtagtgggttgtttttgaatctttcatttttagtgctgatccaggagagaaaggagatatggaaacatttttttcaaaaaatagctcaaaagaaaatatgtaaaaccatgaaaaacccagaattgtgctgctgctttctgtgctaattaaatcagtgggtgttaggttgtaatgataaccctttaactgtgtggcttatctctcattccattttatattattttcttcctcatgagaaaatcagtgtttattatcacaggtgacaaaacacaggagaaaaacaaacagtgaggttacatttaatcactttaagtgggtttcatctttgcttttttgttttcattcccaagccagaagccgtaaaccgagcgagagtgcaaattgcctttctcaggtgcacgttgctgagataggctgggagaacaggtgtggagcccgtgaaaagataaacattaagtcattcttggggaaacggtatttagctagacagctgaagacggacttttgaaataccattgtgctactgctgttcaaatattgactaa

SEQ ID NO: 128694 - DNA, 1052 bp, Homo sapiens
cggtggatgtgggaaagccattaaccatcagcttgacggtttacaaagaaataggaagttcaagttaagcagatatttaggatatagtttgccttccacatatttcaacctgtgttgctgcatactttttaagcttagcgtaattattcacacagctatgaattttagaagatgtttaaaagcaaaccacagtgacctgggaaaggagggaaacttactggagcgcttagccaggagcttaaaaagacattgctagtgagttttatgtcacatgaaatctacatttgataggtcattttggtaagtttttgttgttttaaatgactcctcttgacacagtaaccagtggtgctgggaacattcattcacattcattcatttaagctcatgactcaaataataacttagtcgtttcctctctgaaggtaggggaggtaatgaggagcaccgattaggctccaagatccgttctgagattcagataaggtgtcctaacaaaaggtttatggtgaaatgaaagagtgagaaaataattgtgctttttctagggtcatgcgtcaaatgaggctcaccaacttttaaaagactttacatagctttagataatcacattccctgccatgtaagcattgtgatgtaatggcatcatcatgctacttaacaattaatttatgcattttgtttaaacttcctttagaatatatatagtccatataaagaaaattccaggttcgttttggattttgtataaatagctcccatgtttacatgtgaaaaaaaattatttatgaaagaaaaacagagctttcaatatcctattttggttacgtctccataaaaactctaggaaacagtgggatcatctgtgaaacagtggaatcaccccaagaacaaactgtcagacagaccgtcctgtcgtggcatgacttgaacataaccgtcccacgtggggacgcattccgcaccggttgctggaactgacgggggctgcagtgctgaatacctctgggacgcttgggaactgtgcccctgtttacagacggcaagccctt

SEQ ID NO: 128695 - DNA, 1090 bp, Homo sapiens
agagcagaatgcctgccctccaaccaggacccatgctgcagaaaccctctgggaaaaaccgatctgttacaggacccctgggcatttcctaggcaccaccccaattaagtatttcctagagagagcagttgatctcttttgtctgaaactgatttttgccgtgctaagctggcaaaatatctgaggtaataactttaatgttgaagtacaatgaaagttcctgttttttcctttaggaataaaaatattacaaataggtcaggacttcggtttatttttgttattacaaataaagaggaagaagtttggctcctgtaaacgtgtgccttttcagagggaaaaatagattcattgattttagttgattcttgaaccactagccaagttacaaaagattttcatttccgaacagttggatagaaagatctgttattaagtcacgttagaaacatcagtttctgagctctgacctttattctttaaaaaaactccacttggatattcactctaaaaatacactgtactgattaagttcattacattacaatagagaaattagaatttaagtgcctgtgtagaaagaggaatacaaactttttttttttttttttttttttgagacggagtctcgctctgtcgaccaggctagagtgcagtggggcaatgttggctcactgcaacctccgccttccgggttcaagtgattctcttgcctcaggctcctgagcagctgggattacaggcaaacgccaccacacccggctaatttttgtatttttagtagagacagggtttcaccatgttaggctggtctcaaactcatgaccttgtgatcgactcgcctttggcctcccaaagtgctgagattacaggtgtgagtcaccatgcctggcccacaaacttctttattgtgtcagaatttgttgacatctcagcattttgtaacacattatcaattacattagtcccccttggtattagactcgggcaagtcacttccctgttttaattaagctctaatgtcctcatctgtgcaattcaaggggtgcactcacaagatttttcaccttcaatcctatggctctgtaag

SEQ ID NO: 128696 - DNA, 1374 bp, Homo sapiens
atatttgttccttttctttacaggcatgctccattaaatggggatcagttcttccaccatcaaatagtataactctgctattctctgaatgcaaagcagtggcagtggcatagggtacaatttttttatttcctgtttgaaaaagcatattgtaaggtattaatatcacatatgtggttttaccttttttcaagattattttttgtagagacggggtctcactcttgttgcccaggctggtcttgaactcctggcatccaatgatcctcttgcttggcctcccaaagtgctgggatcacaggtgtgagccactgtacctggcctgcatatatggttttaaaagtcattcagttgtcttccaggcaaatagagtagtttaaaaggaacaaatagaaagagggcacaccacagtactttttgtctaccagccttgtgtcagacaccatgctatgcactggggatagagattaaggcaactgggtgtctgacctaaagaagctaatagtgtatggagagggagagacccataaacaaattggatgtggtaagagagagcagtcggagcacaaagaaagacagtgatgcttccgggtgcacaatatgccatgtgcagctggcatggactccatccttttcaaattccctcaagttccgaacatggaaggaacagctctttgtagattcctaaatggaaattatcggaaccagagagtcaggggaagctctagtagagccggagttggcaaactctgtccagtgtcagatggtaattattttcggctctgcaggctatacggccaccatcgccaccactcaaaggtaatgcggtgcaaagcagctgtgggacagcattaactgagtgagcgtgctgggctccaataaagctttattcgtgatactgaaatttgaatttcttgtaattttcacatcatgaaagattctattttctgcaatcatttaaaagtttaaaaaccattcttagctcataggctgttagaaaccgggcctggactgtagcttgctggcctctgagagcctaggtggtctgtgggggtaggaggtgctgggcaaggccgtccacagtgcacgcggtgtggtgaccgtgtgtggttggcaaggctgtcagcagtacacacagtgcagcaaccaccgtgtgtggtcagcaaggccatccacagtccacacagtgcaataaccgtgtgtggcgagcaaggctattgacactgtacgccgtgcagcgaccgtgtgtggtcagcaaggccatggagagtgcacacagtacagtgaccacctgtggtcggcatggccattaacagggcacacagcacggtgaccatgtgtgatcagcaaggccgtggatagtgcccgtggtgt

SEQ ID NO: 128697 - DNA, 1014 bp, Homo sapiens
tctgccaggccactgaccaggaagcctcggggagccaatgggaggcccttgaaggcattaggtgcaaagcctggagttgtgggtgtccagtaacaccaccatgcagcctgggggtctgaggccacccatctgggaccccttcactctaaatgaggcttgactagggggatctcagaactccagagaaaatcttgggtgttcctccctgctgtactgacgggaccacaagaggcaagtgagactgtcagatgagaaacattattacaggttcccaaaatccacctgcctacccacccaatttttgtctgtaatagttctgctgaacagctgtgcatagtgcaatttatttccttaatactgtttgttttctcccccatattctgtgtcggcaactgacatttcagaggttcccatgtgttctctgtggaactgtctcaagttcttattaccctggttgacgacaccagaaaaaccatagctacctactcccagaaagaggccagtgttacaaagaatctcgtggccagcccttttggctcagtttgcccagttggaggccctaaggcgcaaacaagaaaagccaaagggcctcctgaggaccgtggaagtgggtggcgcgtggacccatcgctagctgaatgtggaatgtggacccatcgctagctgaatgtggaatgtggacccatcgctagctgaatgtggaaaaggacttatgacagtcagaccatcccaggttcccccagagcaatccgtgcagctctcataagcaaccagaaaccaaaaaaggatgctaagtcagcacaaagtggagcagccccccagctatgggttgccaaacagaatttgcttgtgggccccgtgacccctgctgttgtccagtttaatgctcagcatttatccagatcaagggatggaaatggggccaccagcctgacccaggcccggggtcgttttgcttttccaacctgtaccatcccagcaatgcattgccagcgtgcaatttgaaaaagccct

SEQ ID NO: 128698 - DNA, 1022 bp, Homo sapiens
ggctcagacacacttaaaggcacattgctgccctgcatttatacggcattttgtgctgacatcgttttccatcaggcctgggcagcccctcctgagactgtctcccgcctgccgtcctcagcacggcctgcccggctacagtctgctttcctcccactgcccctgcctgcaggccttggaggcggtgactgctgcagacttatttgggcagcctggccttaatttttggaaagtgccttgttgatgtatgaggaacttccacggctgaaacagtctaaaaaaatgaagctgggacactatgttttgatttgagccatttgcagacagaggggcacactcgggactcttgggcgcctggcacactaagctgggagggacttttgagacatcttggccatccaaatcagtcaacatgtttatatatacaatttaatgttcagtatacagggaaaaccattagaaggttagctgcacataaaactgttgttaaagttatttttattacttccccccacaaatcgtatgcaataattaataagaactagagaaatagccacaactggcacaacacctgcccctctgccaaaagaaaaaaatcttctttctgaaggcaggctccctatatagtgattcctttatatgcctcctggaagatctgtttcgactccattttgatatatgttgaaccagatttgaagacccacaaatgcagtctagagccattttgcaaaagtgttgctgcatcaaccatttccattccccagtgctgctcatcatgttacactagtgttaaatcctgactttggaatgcgaggaaggacagttccagccatgggatttcaaaaaagtaccaaaggaaagccccttcaagttaccgtaaagacagaagaaaaggaagaaaaatataaacacacacgtataaacatgtaaggtagctttggtccctataacagacaaggaaatcaaggctccgtgaagagagagacaagaattcccttagccaagtgcctgtgtgtgtctgt

SEQ ID NO: 128699 - DNA, 1789 bp, Homo sapiens
aatggattgatgtcagtgtttactaacatgacctgtgttaagtcaaataaagtatttcctttgacaaacaccatatttcattagtggctttgaggtgggcttatttgttataagtcacattaaatgttcccaaatccatttcataaatgttgtcgagatctcaaactccgttgcttctaaaaaaatatgtccagtctctttgtcataaccatcctaataaagatctaaatttcttagagtgaattttcatttgaaagtggcttaatgccagctagattaattcttgtttaatctaaatttataaaatttttatcttaattattgagaaacctttttaaaaagagataaaaatgtcatatgtgctatttacattaagatatattatctctcttggttataggttaagataaataaaattgcttatgtcaaagaagtaaaaaaaagtccatgacctccttttggtatccccatccatctggcggacttaatatgaaaaaatcttcctgtgggaaattaggcttgattatagagttacaagtacaaaaagtagtttttgaagaattataataaatagttacacataaaaggaagtgatgtttgcttgaagtatataaaaatattccttgtcactcttgtcccctcatgaatcttagttgtctgatgatggttcaagtctttcctaataatccagaatgtatccctccactttttctcttaaaaacgctatttcaagcattttctttggtaccccattaataataaagcatacttccccaaaatgttccatttcaagtaaggggtctaaaagtcaaagaccgactgatacaaaagagaaaagtaaattgtacaaagactgaagagaggatgcagtattaaacgtaccaagttcttgacatcggtttccctcaagaaaaaaaaaaaatgagtaacgttttttgaaagcctgaaactattctagtaaaatatttacggaaaaaataatatgcgctctcctcccaaatcctgatgcgcatttaaatcacctttttcatttatagatcaaaaatcttgcttgactacaataaaaattaaaaaatggtacctatttaagaatgcaagtatcaaatccacttgtaatactcactagctccctctgctgatctcctatcaagcgacaggcaaatctatccatgattgttattacaattgttaatggaaatgataggtaatttaggacctacatcaattgcaactaaaatacaagctacaatgctttcattttaattttaatgcaaaagcacatcacaccatatacagatgttaaagaccgacgtgcacacacacagtgaaaaaatatttttaggcattcatttagcatacatagacctaggagctgtctctgtatcctcaggtgataaggttactactattacaacagcagaaaaagaggtctgtactgtctgtctccataaggagccaatttagagacccagtcctgttcaccccaagcttacagtctaacgaggtgaacagatgtcccatctggatgcacaagcactgctgcctaaggccctgggtagtgcaggagggagcccccacacgggaagcctcccaaaccacgtaagggctacgtgaacagcaagaatagtttcactgtttatttagatccacactgttacttatttaagaagaacatactctgccctttctccctccctgaagaaagaccaaaactgagggaaattatattccaggctgagaaaattgcctgtgcacttaaaaaataaataaataaaaggcgagaccacgg

SEQ ID NO: 128700 - DNA, 1969 bp, Homo sapiens
ctacaaaacagggaacaccaaagatgagcagccactgccagcagttagcagagaggcctgggacagatcctgcctcgtggctttggcttccagaaggaaccaaccctgccccacaccttcacctcagatttctgctctccagaactgcgagagagtggatttctgtttaagcaagtttgtggtactttgttacaacaaccctagcaaactaatacagccttaaaaaaaaaaaaaaaaaaaagtaataggaaaggaattaaaatataacgctaccttgcagcctccaccaaacactgttgccatttggttcttctccttcttgttcaacctcaggagggggtgaaaaaagtccaggcagctcctggtgatagctatgcaaagcttcattctgcagcagtaaaagtgtttcctagaagtactaaggctcgttaattgcagccaccctataaaagaaggtcctctttcatgaagagcctgtttctctgcaggaagatggggctgacctcagggcctccagcacttaggcacttatccatatgtctgtaaccattgttgtgaggttagttgataatggctcattatcctcgctaaaatgaactcgttgaagtatgaggccaggccttattggaatccttccctttccctttcccttcccgtttccttttccctttcccttccccttccccttccccgtccctttagatgtagtctccctctgtcccccaggctggagtgcaatggtgcgatctcagttcactgcaatctccacctcccgggtcaagcgattcttctgcctcagccttctgagtagctgggattacaggtgcccgccaccacgctctgctaatttttgtatttttttttttttttttttttttttttttttttttttttttttttagtagagatgggttttcaccatattggtcagggtggtctcgaactcctgacctcaggtgatccgtccgcaggtgagccacccgcctcggcctcctaaagtgctgggagaggcacaggcgtcagccacagtgcctggcctactgtcttctctaaaatggcatctgtgcattcatctcagccgcccctgctcagataaaagcaatggcgcctcctttgaaatctgagagacgcagggccctgcccattctgcggaattccttctccctgctgcctgctgtgaggaggccccctttgccacggaacctgaaattcctgccactggaattacgctctggacaagcggcaagatactcctttcagtcccagccactgggttcctgctgcacaggaggccagggtgctgtgaacctgctctcagccccgggcaaagggaatctcgttaatccaggtggccagcgcctcttcctcagagcatctgcagtgctgcagacagggcctccctgcgtggggcttctgtcctccacactgtggtgctgctgggatgttttcatggggcctttcccttcccgtcaccacgtgtgctccagaacccggtgcatttggatgaagccactagatgtataggtcagcagctccacatagaatcaaattatcaaatgcacactacctgatccagaatagatcgtcctggggtaaacacattcacatattctgaatgtacaaatggctgtctagtaaacacactggaacttccataattattgtccttccagataatttttcaagattatatgcacgtattctgccattccttttcaagacaactttagaacttcctttggacagctactgtaagccaaagggcttgcatttgaatatcttgcatgaagctaaatctttgttcatgaaaggcagaataattttatatgccacaaagctgcagtagtgtgttaggtttagtagatggctaagcactacactgtattattctaatcctattttcacaatttaacaaatgtgagacaccgtgctacttgtacaagagatacaaattaaggaatcttcaatg

SEQ ID NO: 128701 - DNA, 1368 bp, Homo sapiens
gcagagttcatgtttttcgttcataaatggcctggaaatcctagcattgggccagccatccagaacagtggagctgcatgatctggtctggggatatttcaaagggaatagaatactgaggccctgtgggatggaggctgcttcccgatattgagaactgcaccagactgagctgtgtccagaggaagggagaacgtctttcattcacttaaaactcacctaacacctgacacctccatcttggcatcatccacctgtagcctctagccctcttcatctgttaagtgagagtaactggcaggttatttggagagtgaagtgacatcggcagagttccaggtatggtgtctgatgcgtgagttcgccccctttcccggtccccttctcctccatttgactaattatcaaagaaagattgctttagtgaatgagacagtttagatccattcccttgggaaattatggtggtcagccctccgctcggtctcacttttagataccagaaactatatgtccttgtgttggcagagctggattgtctgtcgccctctggtgcaatcctgcattagtaagggaagtgtttttctggggcgttctaatgaaaagtgcttaagcatttgttttggtgcccagataatgtgactgtagttagtatgtagtgtttggactttttgctcatgcttttgttgttgttgttgtcattgcagaaataaaattaaccccttaatcttatgcttaatgtacacaccaagtggtttgcatattatactgagaaaataaaaagattgttttagaaaaaccaaaggacaccaacagctctttacagccccaaagcacgtgtcgccagaggtcacaggaggggttcttagttatcagcaagggaaactgaggctttctcgtttatgcagaagtggaatttattgaataatattaagggggctatgtcgccaatgccacagtcacactgcccacacagaactggcctggcgaggtgttactttgaccaccattgctgggccaggacgctgccaccaaggccgtgcccctgccagaaactaaatgtggctgccccatccctggccctttctgtcagtagggtcaggttcaaactcctgggtagtcagcccagctctcattgactcagtctgaacagctgcctgttccctagaatccacatgcgctgggacaatgggaagtatcggtagacgctatggtgggaagatgactctgtgtccaccaaggttcttgggctggggaatggtctgagcatatgacggcctcagaccccagccaaccaaagggaaaggtctcccctgtactcacgaagcctccacgatgtccatcagcactttcttcctccgttgcagt

SEQ ID NO: 128702 - DNA, 1051 bp, Homo sapiens
agtcgcccccaaaacatataccaactgatttaaaaggagacacagcagatggagattattgtgaaaagaactcttactggccaatttttttgttattttaatctctgcttatcccaattcttttagctgcatatactgagacacttcacatctataataaacttggtaccagaacacaattcattccagacctaactcttttagatcattataaccgggggaggaaaaaagttaaaaaggcttatctatcttaagaagtatttctcagtgttcgctacacgtcacttaatcttttccaaaatttgacaatatacaaagcagtttgtagtgacttttcatagtgactctacaataaaatgggcctgtcctccttgcttttccaaatgcagtcatcatctgacaaggtttagctatttggggaagtccttgcttgcaaacgtagttcttttgccaaacaggtttggtcaaactgtgtcccctagttgcacagttaccccatatttgattaacaaatagcaaaacagagataatctcagaaatattcaagagtctcaaaccccaaataaaatataggcatcctcctgttgagtcgaattggcaattttgattagcaaggctcatgaagcagtagatatcccctctgatccccatcccagtgcgagggcacagtgagttgtattttctaagtataaactattctctagcagttcggctggagtattgggagcaaaactgtatttttctaatattttcagactaagacagtgtctctgttttccggacttttccgtggctaatgaaggatttatcagcaatacaaagaaagttctcccagtgggtactccacggggagaggagctggggtctcactagtgcacagccataaaagacaccacaagcatattacacgtgaagcaggatccgtgcccaccacagcagttgtcccaggagtttcctgtttgaatgagacactttgggtggatactgcagggagggagaagctgtgtgtggccaccacagctggaagcgtggcctggtgccctcacagctg

SEQ ID NO: 128703 - DNA, 1910 bp, Homo sapiens
gtcctccagcctccacgcttccctgtgactagcctctgtggtcaaaggtgcttgctgatgcagcctctgtacagcctccatgcagtgcgtgtctttatgtggaggagaccgcccttctttcagcagttattgagcatctacccactctgtgccggtcatagggcttagaactgcatgtctggggggaattctgcaaagagagcctgaaataaaggcaaacagtgagagacggccaggagaaaccatgagcactgcagtgagtatcaagggacaaagctgaaaaaggaagactgaacgctgagcttcaagccattcatttctatgggccgcgggagcccttgaaagtctgtgggcaagttttggtgagattaagctggtagttctgttcaggacaggttgaagggatgagagattaggacacttaccacctgaatcctgtcgctggctttagtttaaaccacccgtaatgtagacatcctgacttagaattccctgtgctgcttcctttctgatggaaacagctctgctaacagagtgcaggctgtgggagccgagccccgttgcaggcagcctgcaggccgcagtttcctcggcttaccacccagcgcttttcattcggctcagcgctagggacctctgcttccacttctcggtgttggaaattgccatttatttttgctgtcgatgatctgtattgacttggcctgagtatgcgtgcacgtctctggtggtctgaattatatagaccagaagggtgtctgatgccgcttttataaaaaataataataatttgaaaggaaaaatgactcactgaagtctggcaaatacagagccctctctctgaatcgacttctcacttggccatgttgaattccaactgggtgtcctcagacatttctatcccaagatctactcctggcttagaatctgttttgttttgtcttatttcagctcatggttcttgttcccccagctttatggggtataatttccatacaatagaattcaacactttcaatgtgtggttggatggcttttggcaattgtatacagttttgcgatcacccctacactgaagatatagaacactgtttctcgtctggtgattgctggacattgaattctttccagttttcactgttatgaatctgactatgatttttggcatggatttgtatgtagctataaatcacttggtaatttttcagaagaatagcagtcttggggcctggatggcttattgtggtctcaaaaagttcctgatgataaggttgcagcctcatgcttctttataagaatgcagtattacttgcaagggagcttgggtagataagaaagcaagaaagtccatgtggagaccctgtccagagagcacagacatggactaagttaaaggatggtaaattagcaatgcccaaaagcacatggaggagatacttcccctcctgactctattggtgatgcagtttatttgtctgagctatctgagcaagtttcctctcacttacgtgctggggacagcagattccaatgcagagtccttagagctcaggctcccctcaacctgacgcatctctcaaccatttgtcttaagctgtctgaagtcagcttcccatcttggggaggtagaagtgaaagggtttccactttgccaagtgagcgtatatggggagactgagggtgtggagttgatgatggttgtggggtggctgacagtgtccacagggctagtcttgaggcaggctgacactggggccagatgggaccactgtgcctcctgtcccctccaccttctcctagtccaggaagggaatagcagcagctgctctcagtggggcattctttttccagagccaggccagcccagcagtgatcccttgataaagcaagtcaccgttatcagagcaaga

SEQ ID NO: 128704 - DNA, 1110 bp, Homo sapiens
cagtggggaagggaagggtgctaagcttcagtgactgcctactgtgtgccaggcattttcatcttccatctcgatagaatgtctaactgtgctctgagatgagaactataaatagctggtcagccaaaagttttctgctttttcttagtgatctcaagtgtttccatgacacgtgctgcaaccaaatacattatgtgtaaattgccaaagacctgttgatttccaaaccattatatagtcatgggaatgcttgtatacctgaattgtcataaaattgatgagatgcgaagatacagcagaatatatcagataattctgcagaactcttattatggaaatgaaaataattcaatagagaagtctcgattcataaaagactagttttactctaaagtatctaaaagacatgcattaaaaagacatggcactgtccccgaaacgatcttgctgtgttgcatttcaaatggtaccttcattttgaaactttgcacattagcacgttctttataatagcaaaaagtgggggagtgaggaacatttggtgccggaagaatgattaggtaaagcacaccaagctgaaaaaagtatttttgcagagcgttttcaagagcatggaagagtgttataatgttaagtgaacaacaaaaaaaaaaaaatacagatccaactatgtaatcattacacatagaaataaaaatgagcaataaagccaggatgtcagtgaggatggagtggagggaatgtcctaaatgtgcgttggcccatcatcacctcatgcatgaagtgaatggaaacatttggtttatgttttctggaatgtctcataagccattgtaaccaaaaactacaccatgaacaaaaagcaaagcaggccctgcaggccctgggtgggaagctgaggaggttggcagtttctcaaactcatgtcagatgcccctcggccactagacagaatctgctgctatctgggttctggttgaccagaggcctaatctggaatctggttctaaaaaccaatttttgttatagggcttgctggatacaaatctgcaatgagacattgtcacaagcaatagcttaagaaaaacataaaggaaaaaataataataa

SEQ ID NO: 128705 - DNA, 1050 bp, Homo sapiens
acgatgagtagttaaaatcactgtcattggctacatgcctactttttatagtcactctacttattgtggttttggctacatcctagttgaactctagggctagtgtttattaaggtcttgatctcatatggcatttgtagacaatcgaatgttgagtgataagccctggtaacgtgatttctcactgctggcccgtgaagccatggaaatgttcccatggaaatcaccccatgtgtggaatgaatggtcagtggaacataggcatctttctctcctgtcctctaggttttaaaatacctgaatgtcctgaaatgcaagagtatcctaagagcactttagaaatatctttgcggtttctttctggtgtgctttgtgggttgggtgaggtaccgtattccaggacacgtggcccttagagaaacaaataatttcctttcctcctgcttcagtgttattggtaaagtgggaaggtagccccaagacactcagctcctgcactgcatttggatagaagggcgttcaaattccaccagggacaacttcgtctaaccccctagaattcctcattttgacccttggcatactctatatttgttgaaatacaaaaaaaggagttgaaagtgagtctatctatatgtagtaggtatatcgtgttcactgtaaaattccttactgtatgtttaaaatttttcagaatacaatgctgggggaaacctatggaacagaagtagggaaaaaattcgacaacgcaaagtgagagtgggaaaccatgtgaagctctgttagagtatcatcactaatctcttttttccttatacctatattcatgaaagcaaatagagaacaatacaatatagtgtaacaccgtgtacccatcactcagcattgctcaatcttagttatcattatggttattattattattattatttgagacaggaccttgttctgtcacccaaactggagtgcaatggggtgatcctggctcactgcagctcaacctctcgggctcaagtgatcctcccacctcagcctcccaagtagctggga

SEQ ID NO: 128706 - DNA, 1025 bp, Homo sapiens
ttgagtcatctgttgttggaaatagtctcctggtagttttccccttgatttactttttatcttcattttgtttttttgaaagtagtgagggtaggaagttacagagagattcaattagagattatgtgtatttttaaaaatcagctatcaagattaaataaagcaagcgggaattctctccttgctcccatataccaatttttgtaattatgtacaagatgagggaaaccaaagaaaaacaataacttgcttcaatgcaattactaattcaaaagtaaccattactctggggaattgtattagagattaacaaagaggaaaagtactgtggttttctttctctatgttctatttgctaggaagcggtcaataaagtaaccttttccccacaggagctggttaatagttcgcttcatgctaaataaaagttacagaaatatctggagctgagttgctggagacacagaaatcttcaggttggaatttcttgtccttttccaaaggattaggccaggacattgctgtcaaatctgcaaaacctactcatcctggcaagagtgcggtatttttaagactcactagtgtgctacttctaatagtgcttagtcagggacccccaggggagtgcaagggagagagggtccccagcagggatgccagaccttctctagctggccgtgggtgctggcctggccacctgtagccctcagcgcacaggtggaggtgtaactggtattcctgtgggagtgacagtgtccatctttgacatttaagagcctgctccttcagatacatttaccattgccaccactggggattggggcggcactggccacccttggcggcacatctccagcttacagcagagtctgagtgtctctagcatacctctgactgaggcacgttaggcttgtgacatcacatcttcctaggtggggcagggactttacaatacatgtgacaagagaaaaaccttacagctttgtattgaaagatttcttaagtttttagtttattgactaaat

SEQ ID NO: 128707 - DNA, 1018 bp, Homo sapiens
gtggcttttggaaaagctaagccgggagcgattatcctgatgcgcttttactttttgcataaaataagaatttgaggaggatgtcccgggagagtgagccacttctcatttcccaggcctcgcctgccatgctctttgacaacatcatagattttatttttgccgggaatctcattatcaaagcaatgccccccgccccccccccacacacagactgccaggtaaaccacagagggtgaggggggtgcaggtcatggttgccttattacacaccctcctctgccatcacctccttttttgtctggataagttctttggcagttctctcaacttttatttctgaaacatcctgaaacatctcagtattaaaagcaaggccgattatataaacgatactcccaggcctgacaacacatggttttgcctgaggcctttactgccaagagccgtaaggaccctctaagtcatgttcgctatttttactggccttgagagtctccttgctttgacatcctcttgtctccattgtcagactgttaaatgctcatgcttctggttctcttaaatagatgcagatgtgtggggctgggttgccactgagccctcttctcttttgcaagagctgggatgcagacagaaggcggtttggaaaacacgagccaccttgattttagacaaactctaagttacaatcaggtgtcttcatttatgacatttaacttttacttaacctaatcaagccatgttgttggctactgattagaatatccttttataacttaccttaaatctcactacttgttccaaccatcccaaagtctggcgtcaactgtcattgcatgctgctcttttcagcctttctagttcgactcttagcaaaagccataatcttcctccagtctgtttcctttctgcagtgacaaaattgcccagggaaaggaaaaagaacagcatctatcttctttctttttagctccctggtttaaggctttcttttcccccatgatgaaaaactata

SEQ ID NO: 128708 - DNA, 1046 bp, Homo sapiens
ctatactaagaaccactgagttgcacccagagcttgcattactgagcgctttaccagttaggaaggtttcgcgtattccgtactttaaatctaaggtgacttgactgtaaggcctgcgagtatttcctggaccactcagaggaagaatgctgtgaatgagaactacagccctgtaagacacgtcctgtatcattgttgagatgggaaagtgcatcttaagacagttagcaggccaaggagcgactttaaagggtgagctctgcctagagggaaaagcgaatgcactaattgaaatccaacaccctgggctggagtaaatgaaccgtcagccacccatggggcttcatttcttggtgatggataaatagctgggattccttgaagctagaagccatggggaaattctgttctgcttagctttgtcaacagtacagtctgccttaactgacttggaggtaaatagattcggagagtgtgagctaaaacccattaaatcaggtgaagacacaaaggcaagcacagccaatgtggtttaaggcaaagctaatgtcccttcggccttaactgacggactttcctagcagtcctcaccctctgcaacccagggctcctaggaggagctcatggcagagaaagccttctggcttctgccactgcctcctcaactacatgtatacatcagtgtatatgcatgggtatgaaatgaacattttatgtcaccattagcagaggaaagctggaactctttcaaaccccacccaaaattcactctgactactgagcagtcctgttgtttattttggaggccacttaaccctggagcagtccataagctccacttaatcccctcttctttcatgatttcttttaaagagacatcttgggttctgtaggggaacatttgtgcttcactgtaaaactccatttgaggcctgctcacggcctgccaccttatctgcttgcagccttcattgcttgggagctgttttacagcttcataagttgtaaatagctgctggcaatgcaaacgcgcttgtctgtgggca

SEQ ID NO: 128709 - DNA, 1050 bp, Homo sapiens
tctatctatctaatctatctatctatctatctatctatctatctatctatctatctttctatctatctagatggggtctgcctatgttgcccaggctggtctcaaactcctgggcttaagcaatccaactacctcagcctcccaaagtgctgggattacaggtgttagccactttgcccagctgaagttagagtttagagcacattgctgtaaattgcgattaccaagggtattgaaaaatccatgaaaataataaacagcaagttgacttcagaatttgtgcgtttgaggcttttcgccttgatctccaggtaacacacaggctccttggcgagagccagtggtgatacaatgagaacaccgcctgctgcatctaatatttgcagcttagaattcacagctaactttttaaaatgtaccagtgtgggggaaatggtgctttatttgctggataggaaaattggccaagatcagaattctgaaggcagtgtcacagcacaaagaaactagctactgaagtcacatcctaaacattcgagaggttgatttccttttctactgcattacaaaaaggtttatttactgcttatccatatagtgagatagagattagatctcagtttttggttaagaacaagcattatcataaatgtgtgtgtgtgttgtgtgtgcattttacaggatttttaaaaatacacagagaatttttcacagttgttaactctggtaaatggtggggaaggcaggggtgagaactgatctattattcataatctcaatgatgaacaagctatttccaaaaataggtggattatttaaaattattattattaggatattttgggcttctagaaacaaaaacttaacaaaaaagtcacttaaagaatttaggggtctttttttctgacatgaaaagaacaaaataaaggatgatttcagtttggtccgtcagtgacttagaagtgtttttcaggacccaaggctttccgccttcccactgggccattttcagcgtgtcccgtggcctctgggggcttcagtgatccaggc

SEQ ID NO: 128710 - DNA, 1120 bp, Homo sapiens
atggtcctggatggttatctttgaaacttcctaacctgttgggtccccgtcgttaaacttatgccaacagaactaaactcactggatgtgaattgcatcagagatgtaaacatttaaaagcgtattaaggctgggcgcagtggctcactcccgtcatcccagcactttgggaggccgaagcgggcggatcatgaggtcaggagatcgagaccatcctggctaacacagtgaaaccccgtctctattaaaaatacagaaaaattagccggtcgtggtggcaggtgcctgtagtcccagctactcaggaggctgaggcaggagaatgcatgaacccgggaggcagagcttgcagtgagccgagatcacgccactgcactccagcctgggcaacagagtaagactctgtctcaaaaaaaaaaaaaaaaaaaaaaaaacattaaaagcagaccaaaaaaatcctagaatacaggagtcagctgtctattcaattcagaataagaaatattgtagacaaggcaacattttatgtgtattagaaatgtggtggttggtttgagaagtgaaaccagccatgtatatgctgctccaagcattttggttgtggcaggaaactttgaagactattttgctgtacaaattcacaaagccccctgcaaacactcccgtgcttggggtgaatgcccaagtgtgtcacagctgccttgcagctctgaggatcagaaaggttaatggacataaaagaaacttcaaagctcaacctcctaatgggaagctgcccttggttttaggctgtctttgcttactgaccgacttaattcatgctttgggttatgactgtaggagagattttcctgtgtctttggagtatgctgaacttgtgtttctttttgttgttgcatattagacagtcagtgttgaaactaaagtgacctaaagtgacagagctcatgttatgggctgaattttgtctccccagaattcataggttgaagccttcccagtccttagaacatgattgtatctggagctagggcctttaaagacataaataaggtaacatgaggtcataagggcaaggccctaatccaatatgactggtgtccttatacgaagaggaaga

SEQ ID NO: 128711 - DNA, 1132 bp, Homo sapiens
aattttatgttatgtctatcaaacttttaaaggcaccctccacagatagttttagtagtaagttttaccaaacattataaagttttacaggaaaaaaaaagaaatctattcacctcattttacaaggctacattgatcttgacctaatactggtttaaaaaactcatttgtaaacaagtacataaaaatctgaggctgagcgcagtgactcatgcctgtaatcccaacactttggaaggccgaggggggcggatcacaaggtcaggagatcgagaccatcctggctaacacagtgaaaccccatctctactaaaaatacaaaaaattagccggccgtggtggcacgtgcctgtagtcccagctactcgggaggctgaggcaggagaatcacttaaacctgggagaaagaggttgcagtgagccaagagtgcgccattgcactccagcctaggcaacagagtgagactctgtctaagaagaagaaaagaaaaaaaaactcagaaataagatatttcatcaagtcaaatttggtagtgtgtttttaaaacacacacacacataaccaagtgtggtttaacctaagaatgaaaggataaatgaatagcattaagtcttcttttttctaatccattaattttcttagtagtgttaaaaagcagtagggaagattcaatgccgagtaatgatttaaaaaaaaaaaaaactcttcagaaaccaggaatagataactttcttaactatggaggttatctataaaaaacgtacaacaaatattgaatggtgaaaaccttagtttaaggcttaaatcatgtacaagacacacatgaatgctattactcttcaacagtgttctatgattcctagtcaagggaataaaataaaaaaaaattacaagaattatacaggaagggacacattttgtttgcatgtcatacagttgtctacatagaaacatcaaagagagtcaataaactgttacaactcattcagcaaaattcctctttgtaagatccactcactgaaatctttagcatttgtatacccaatgataaacaattataaaatgtaacagaaaacatagtaaataatagtggattcaaggctagccatgtaatacaggttgaacattcct

SEQ ID NO: 128712 - DNA, 1006 bp, Homo sapiens
aggaactggcgtatacaagatgacttctgatatcatgtttgccatgtgttgtggttcttaagaactcataggtgactttctgatgactgaatgtctgtttcagagacgcttcgggcctttttatttttattttattttttattttttgagacggagtcctgccctgtttcccaggctggagtgcaatggcacaatctcggctcactgcaacctccacctcccaggttcaagcgattctgctgcctcagcctcctgagtagctgggattacagatgtgtgccaccatgcctggctaatttttgtagttttagtagagacagggtttcgccatgttggccaggctggtctcaaacgcctgagctcaggtgatctgtcaggcctcttctatagaattccagtctttgtgtcttagtcatgatcataattgaaaggtcacagaacctttgtcattagagcacagtactgccaaataaagaatggaaattcaatgacattgttttattactgagaacaactagagaactctgcaagtttcttggcttagactcgatctttattaatacattatctattaggtaggaaagacatttgtcagctattaaggtgacttttatctagcggagattcctctcttaaagtaatgaaaggagataggtatggggggtgttatacaggataattggtgacatctgagtgtcttacttctgcaagcctgctttatggtgagcaaagcatcaccagcaagtgatcacaatgtccactggccgctttttgcctgccgtcctcgagatgaaattggcagttggggctgattcacagaaacaccgatttgtggctgagcacggtggctcacacctgtcatcccagccctttgggaggctgaggtggacagatcacttgaggtcaggagttcgagaccagcctgaccaacgcagcaaaacccatctctactaaaaatacaaaaatcagctgggtgtggtggcacacacctgtggtcccagctcct

SEQ ID NO: 128713 - DNA, 1034 bp, Homo sapiens
tctcttctgggatctaaaggtaccgccttccttggctcatggccccttcctccatcttcaaagccagcaacggcaggggagtcgttctcatcttacttcactctgacactcactcttctgccctctcttccccaattaggaacccttgtgattacattgattaccttgggctccccaaaataacccaggtggacttgttttaaagtcagctgattagtaccttttccacctaccacctgaatccccccggccatggaaggaaacatattgacagattttcagattagaacatctttgaggagaccttactctgctgccaacactggcccctgattgcctcacactaaatccaggacggatgcactgaccatgggttctcactggcacccagcctgaaacctcagataaggcatttgtcttctcagagccagggtttcttcaactggcaattttcacaataatccctgtctggtgcctgagagcacaggatgatggccagggagtcgacgcccttctgaaagggggaagaagcaaaggcatctcggtttgcagtattcagtgagttatgctgactcaaagacacgaatcagacactgactggtaggaacccccagcacagattaagaagtgcatagccaacaggcctgactccaaacaattcaaacaacaaggaaagaatagagaacttatcattattgtgtctgtttgacaaatacttaattgaccataatgtaaggctggaatttgcctattttaaagttacctgtggttgtaattaaactgttttgttcagtgttctcaattctaattctactactttatttaaaactataaatttttgtgtcaggaagacaatatctacttttatccctctaatatttaaccccttaatggagacagtaattagaattattgacctgaaactacacaagatcatacaaacattcttcaggctaaactattattttgtttggtatgagttcccagtctaagcgttaatattttcccaaagcctcaggaccttgcagggacca

SEQ ID NO: 128714 - DNA, 1050 bp, Homo sapiens
atttactgaaaaagctaattcagtattgtctcccgtgagccagccaatgaaacctcagccaacgctgaggagggagcactcgaggggaggaacgccatcctgggctctctagggctgttgtctgtcaacagcgagatgagaacaacgggcaacagcagcagctccgtcggcccacggccgccccaggggccctgggagggcgggaagggagacactgccagacctcagagcttggcaccaagagccagttatcagccagataatgtactcaaccaatggcgagaaacccgaccatgaacttattgggaactggtcacagaaaagagaaggactctttgtcctgagtgtgtgaggctgtgatggtaggagccgcagggctgtgactcacacgatgccacaaggttccttccaaaaacaactggggatgctgtgtggggaaagggctgatggcacagtaggaggtaacgggctcaaaactgacctcctttttaggggtgaggaaaagactgtcacctcatcttgtggcttcagagcccagaagagattgtggagcagcggttagagacttacggaggaattctgatatttttaactcttcggcactttgcttttcttgagcaattcccacaccacccctttttaaagatttattagattcaggggctactttataatatccttggagcccaaattagactttaagcacataacatatctgagcttgaggagtttaacttcttcaacaaaggagcaaagagatttggtgaaatgacccccatggtccctaatgctgatggacccaccgaagttagcctgtcaccagaagcaaagggatactatttttaagatatgaggatcttttccacatttctgttcaaagcagtaactttgcagcttcatctattgaaggcctcatctccacctgcttttcctaccctggattcacagggcttgtggtgccctctccctgcctccactcaccttccaacaagtgctggagtttgattcacaccaaacagaaatagccaaaatttgtaagaactctattgg

SEQ ID NO: 128715 - DNA, 1451 bp, Homo sapiens
aatgctaatgtaatataacaataaaatgcacagttcttaagtttatataaaataaacaggttttcagttgacctgctttaagtgtaaaatagtgtgaaaaacacaagaaagaagataaagaatttaagattttgacatttctctaatatgcccttaacttctccaaggattcatacttttttttgtaagacagaatctcacactgttgcccaaaccagaggtgcagtggtgcagtctccactcactgcaacctctgcccccgggctcaagcggtcctcccacctcagcctcctgagtagctgggactacaggtacacagcaccatgcccagctaattttttttttggtattttttagtgggggtagagacgagattttgccatattgcccagtctggttttgagctcctgggctcaagtgatccgtccttgatccaccatgcttagctgattcatactcttaactgaaacattgttccaagtttctcagaaacagtcaaggctttttatctagagaacatttataactggatctttctttgtgtagcactgattcatcaaactaatcctaaactcctaatgagttaaatttatattctgaatcttgctgtaaaagcagccattcattagaatgaaacatgtttacttagaattggagaagggagcttataagtcatctagtctactcccttttatgacacttctacattctttctgcacttctgccaaaatgttgcccagcgtcgtctctgatacctatagtcctaacaagaatatgaatcataccttgtatccttaattttactcttctctgcttatttgccattcatgtgaagaccttaaatagatcttaaattgcttccttcactttagctgagagtgacaggactgtgtaggtgtgggtgtgtttctgcatttgcttatttaagcaggataataaaaacttttactataggaaattaaacatttcccaatcaaatacaattccagtctaacacaattaaattctggttagggaactgcttaacttactagacttataggaaaatactaaaaaaatgtaactagaactctatttttacactttataaatataaacctctgtgaacaaaccagttatttcaggttgcatttgtgtatagttttttaatgcctgatttttctattttaaaatcacagatgcaattatacattcaaacactgccacaatactttgagaaagttaaagtttcccctactcctacactgcgtacacctttcctaggtacatcccagtttggtgtgtaactttagatttcttccaagagcttttgagtaagtgtttgaattgtgggaaggttctttagttaaatgaacttcttacagatcagttttttagtacagtagcacgaaatatacctgcatacctatggggatacctctgtgccattacgatggaaggcacgggaaaac

SEQ ID NO: 128716 - DNA, 1038 bp, Homo sapiens
cagcagaaatcttataatgattaactggtaatatatttcgttggcataaaaatacatttaaaagttcaagtaattataaacattgtaaattgtatatgtaatcatattgaaattgaaattctttatagctgtacttctgtgtaatcaaagactggggagagatagactagctagctctttctcttatccattaatcacttaacagagttttgaataaaaagttccatttcatgggataagaataatgacaggttaacctattttagttggttactatgttctaggtgttgtatgaagtagtttacatagtttcactgatttcactacaatcccaggaggagtagttactattattacactcattttacaggcaaagaaataggtttggaggggttgggtgttttgcccaagttctcatcgtaaaatgacagatgaggattcaaattcaagtcttaattgaagtccattactttagaacctacctcttagtggctcttatgttacagtataagggagagcagactgttcctttacccttgtagggtagctagggcttgtgaattaagagactgattaacaggagaagaggcatacacatttttttgacgttagtatttttacatgcacagggaaggagggttttatttttatttttatttttatctttattttaaagagacaggggtcttgctgtgttgccagggctggactcaaactcctgaagccaagcgattcttctgcttgagattcctgagtagcagggactataggtgtgctcctctgtgcttggctaaagaaggggtttgtatgtgatttttaacaaaggctgataaattgtgaaaaagtgactagtcaaaggagaagaggatttcagctcccaggggtggtaaattgtgggaagatgactaggaaatgtatagtaataaggtttgctatgcaggtttattttgccagtttctggtctcctaataagggacagggaaacacctttacagatggaaattcatatcacctttccacagggaaatttatgtcctg

SEQ ID NO: 128717 - DNA, 1035 bp, Homo sapiens
tcttccccttatccttcaactatctacttttgacaacactttgcctttttttttttgagatggagtttcactcttgttgcccaggctgggtgtaatggtgcaatctcagctcactgcaacctttgcctcccgggttcaagccattttcctgcctcagcctcccgagtagctgggattacagacatgcaccaccacgcctggctaattttgtattttcagtagagatggggtttcaccatgttggtcaggctggtcttgaactcctgacctcaggtgatctgcctgcctcggcctcccaaagtgcagggattacaggcgtgagccactgtgccctgcctgctatttgcctttttaatctcatgaaatgttctcttttcttggctgaagtgtcacttttcttgttgaacagcatgcgtggtgagtagaatgttataaaaagggatggactttggagttagagagacccaggttcctgttcggcattgcagaaatgctgttctgcaataggctgtgtgtcagtgggcaaattacttatctctcagagccttattggtaaggtgtgagtgatagctcctttcaggcaccttacagaggctgtctcctaatcctggtagcgtacctggctcatagatggcatttaaaagtggttgtgatgacagtcatagctcaccattagcatagcgctggatccatggcagggaagcgctgcacatgcagtatctcttggactacacagggccctcatgaattaggaactgctgtttcatgaggatagggatgaggaaattagacttgctgcccctcactgccttccactcctctcctccaagttaatgggaactatgactctgctttggcttgattgccatggaagattctcacacagccaaatttattgctatcttagttaaattatgccagaacacaaaatatgaagttattgtcaaagtaatataatctcagctgtaactgagatagtcagaaactgtctgtaatctgatgtcctatctgaaaggtagctgagaataaacaaga

SEQ ID NO: 128718 - DNA, 1051 bp, Homo sapiens
ttgaaataaaaagcctttcaagaaatgcaaaaaaaaaaagctcaaaaaacagaaaatgtatattttttaaatatctcagatagatttaaagaaattttaaacatcctaatcataggacttttttttttttttttttttttttttttttggagacggagtctcgctgtcgcccaggctggagtgcagtggcgcaatctcggttcactgcaggctccgccccctggggttcacgccattctcctgcctcagcctcccgagtagctgggactacaggcgcccgccacctcgcccggctaattttttgtatttttagtagagacggggtttcaccgtgttagccaggatggtctcgatctcctgacctcgtgatccgcccgcctcggcctcccaaagtgctgggattacaggcgtgagccaccgcgcccggccatcatagtacttttgaagcccattcatagtacaacctgtgaagagcctcatgtacgcgctaactgggtcctgtctctgcagttgactggattgttgctgacatcttggccatcaggcagaatgcgctaggacatgtgcgctacgtgctgaaagaagggttaaaatggctgccattgtatgggtgttactttgctcaggtaacttgtttccatgcttttctctctatatatgtagtttataaatttttttttttttttttggagacagtctcactttattgctcaggctgagtgcagtggtgtgaacacagctcactgcagccttgacctctggggctcaagtgaacctcctgcctctgcctcccaagtagttgggaccgtaggtgcccaccatcatgcccggctaaattttctattttttgtagagatgggggtctcgctgtgttgcccaggctggtcttggactcaagcaatctgcctgtctcagcctaccaaaatgctggattataggtgtgaactgccatacccaaccctataaaaatgttatattttaaaatttaacaatatacttcatgtgaatgtatggtttttaaaatgggtttaatagtttattctcagttgaa

SEQ ID NO: 128719 - DNA, 1050 bp, Homo sapiens
gatttgggggaacacacttctgtccgtaacagtgccacataaatatctttagcaggattgattttttaaaatccctaaagatcgtgagacatgttaaggacgctttttagtgactctgtaataagtgggtggaagaattgggagttaaatccatctgatggatcaggttttttatttttaaaaatgtgtatttaagaaagaaagcattttcattttaactgccaacaaaactaaacttcatgtgttttccaatacagtgtcacatgcagtttttttgaattatgttgagacaaggcaattttcagctaaatgttctttagaagctaatgtttgaagatattaaatatagattaaattctgaaatgtagttttcattctgtactttttgcaagagaagttgcctttttgatgactctggccaattgttattttaaaagtaaatgctctttctcccgatttgattgtggcagcatggaggaatctatgtaaagcgcagtgccaaatttaacgagaaagagatgcgaaacaagttgcagagctacgtggacgcaggaactccagtaagagcctacccgtttttatttttcttaccagctctcagtttctaaatttaagaattaaattaaaatctaagaattgttttgacaatgtattttcccatgtgtaattactaattcagggttatgctgaggtaacagaaaccctctatgtacaggtaggcaggtttttcagccatcagaaagattgctgtaaacaactaggtcctttgctggtcagtggaccttaaagaggaataaaaagagcatttggtgtcgttcagagtctataaatagaactaactgcattttaacctgacatttaagctagtttacaagctcatcttacttcttgtcttctttagtatcagatttggttttagaagcagcaactgttttctgttagtgcaaattttgaatgtcttacatgtacagaaaaaccaaaaaaggatgaatctctacaaatgttaaatcattcagtgtaaataatattttataaaactttattccacaa

SEQ ID NO: 128720 - DNA, 1074 bp, Homo sapiens
aggactacagacatacacgtgccaccgcgcccggctccgtgttctctttgtttccctgcctcctgctcttccacttatctttgcatggcaggtgggtgcacgcaggcatgctctgcatgtcttcctcttggccattccccttctagttatggtgtggctttatctacgcgttctggagcagaagcctagtcacaaagctatttttttaaaacattcatgataattcatttccttttatgttttaaaaatactagctttctgtctttatttccttactaacttacttggatgccagtaattagttgttttagtgaacaccacagagtgatattttgaaactttggacttcataaagttggatgagctccagtagcaaagaaggaagtgttaactagtttaactgacaaataaatgcttcccagcttggtgtgcgattgagatttttgttgcaagtttgtgaatcaatttaactgcccctgccctggggactaaagtcagatacgtgcttgtgggaatctttgtctttcccacaccaccctgcattttaaaacctcttgtgtgggacagtcccaccatgtaatagctgttcttccttactcagctactttccctccagagaggccagtagaaaatctagactagttttttatagtctattttcatgtcacttattgagagctactgttttctgttaaattgtcagtaaatattttaatcaaggaaaagggaggtaataggaaggagagaagaacaaatccttaaccctagtaggaacctaatgaatgggatttgttctggataattgcagtagtcccccagctaaagaaccttttaaaaatatgtcagatatacccaagaggattgaaatcgtatgttcatacaaaagcttgttcacctgcagccttcatatgcaattcctatgaatgttcatagcagcattattcataatagccaaagtatggatgcaacccaaatgtccatgaagcaattaataggtaaacaaaatgtgatctgttcacacagtggaatactaactattcagccataaaaaggaatgaagcactgagtcctgca

SEQ ID NO: 128721 - DNA, 1991 bp, Homo sapiens
ctggcggaataggagctccatgtaaaaaggaggagaagctgcagcgggttattagccatttgtgagtcaggtcactgtaaaactttatcaaaagtttaaaagacaaaaagcatcctcataaaatgccttaaaaccacctgttgaaatattacatatacaattcatgtatactaatcatagagcatattaaagatattttagaagactagaaacttctattaaaccaagtttctggatgtttccgtattcatccttattttccagggacctgcataacttttccagcgtgtaatagctacctgattgatattttttgaattgaaatactgaagtgactaaaatctaaactttttccattctggccataggatgcttatagaattttatgagtcaccagatccagaaagaagaaaaagatttcctgggaaaagtgttaattccaaattaagtatcaagaagactttaccatcaatgttgatcttaagtggtttgactgcaggcatgcttatgaccgatgctggaaggaagctgtatgtgaacacctggatatatggaaccctacttggctgcctgtgggttactattaaagcatagacaagtagctgtctccagacagtgggatgtgctacattgtctatttttggcggctgcacatgacatcaaattgtttcctgaatttattaaggagtgtaaataaagccttgttgattgaagattggataatagaatttgtgacgaaagctgatatgcaatggtcttgggcaaacatacctggttgtacaactttagcatcggggctgctggaagggtaaaagctaaatggagtttctcctgctctgtccatttcctatgaactaatgacaacttgagaaggctgggaggattgtgtattttgcaagtcagatggctgcatttttgagcattaatttgcagcgtatttcactttttctgttattttcaatttattacaacttgacagctccaagctcttattactaaagtatttagtatcttgcagctagttaatatttcatcttttgcttatttctacaagtcagtgaaataaattgtatttaggaagtgtcaggatgttcaaaggaaagggtaaaaagtgttcatggggaaaaagctctgtttagcacatgattttattgtattgcgttattagctgattttactcattttatatttgcaaaataaatttctaatatttattgaaattgcttaatttgcacaccctgtacacacagaaaatggtataaaatatgagaacgaagtttaaaattgtgactctgattcattatagcagaactttaaatttcccagctttttgaagatttaagctacactattagtacttccctttgtctgtgccataagtgcttgaaaacgttaaggttttctgttttgttttgtttttttaatatcaaaagagtcggtgtgaaccttggttggaccccaagttcacaagatttttaaggtgatgagagcctgcagacattctgcctagatttactagcgtgtgccttttgcctgcttctctttgatttcacagaatattcattcagaagtcgcgtttctgtagtgtggtggattcccactgggctctggtccttcccttggatcccgtcagtggtgctgctcagcggcttgcacgcagacttgctaggaagaaatgcagagccagcctgtgctgcccactttcagagttgaactctttaagcccttgtgagtgggcttcaccagctactgcagaggcattttgcatttgtctgtgtcaagaagttcaccttctcaagccagtgaaatacagacttaatttgtcatgactgaacgaatttgtttatttcccattaggtttagtggagctacacattaatatgtatcgccttagagcaagagctgtgttccaggaaccagatcacgatttttagccatggaacaatatatcccatgggagaagacctttcagtgtgaactgttctattttt

SEQ ID NO: 128722 - DNA, 1036 bp, Homo sapiens
cctgacctgcataagatcacttgaatgttaggtttcatagaactatactaatcttctcacaaaaggtctataaaatacagtcgttgaaaaaaattttgtatcaaaatgtttggaaaattagaagcttctccttaacctgtattgatactgacttgaattattttctaaaattaagagccgtatacctacctgtaagtcttttcacatatcatttaaacttttgtttgtattattactgatttacagcttagttattaatttttctttataagaatgccgtcgatgtgcatgcttttatgtttttcagaaaagggtgtgtttggatgaaagtaaaaaaaaaaataaaatctttcactgtctctaatggctgtgctgtttaacattttttgaccctaaaattcaccaacagtctcccagtacataaaataggcttaatgactggccctgcattcttcacaatatttttccctaagctttgagcaaagttttaaaaaaatacactaaaataatcaaaactgttaagcagtatattagtttggttatataaattcatctgcaatttataagatgcatggccgatgttaatttgcttggcaattctgtaatcattaagtgatctcagtgaaacatgtcaaatgccttaaattaactaagttggtgaataaaagtgccgatctggctaactcttacaccatacatactgatagtttttcatatgtttcatttccatgtgatttttaaaatttagagtggcaacaattttgcttaatatgggttacataagctttattttttcctttgttcataattatattctttgaataggtctgtgtcaatcaagtgatctaactagactgatcatagatagaaggaaataaggccaagttcaagaccagcctgggcaacatatcgagaacctgtctacaaaaaaattaaaaaaaattagccaggcatggtggcgtacactgagtagtttgtcccagctactcgggagggtgaggtgggaggatcgcttcagcccaggaggttgagattg

SEQ ID NO: 128723 - DNA, 1051 bp, Homo sapiens
ttgtcattgggtttaacaagtgattgttctaaggatgggctgatcagctcagcttgtggagacagcgtagccttcagaaagacaaaccctcgggttgggttttgagaagtgagtaggagtttgccaggggaagtgcattacagagcaaggaaaaggggatcctgcccaagagtttaggtgtcatcaatctttctttatagttcatagagtaaaataataacaaatgcatccaatacatcactcattcaaaaagcatttaattcagctgttactaacgtccgtgtgagaacgtgcctgcggaatcgctggtgatcgttctgctcttatgccttttaagagctctctagacagatggacacgcaccgagttgctttgagaatgtcagacgttagaggcgtatagatcacagtaactgtaggagggaggggagatttaaagcatccaggttgtcttaatttacttctgtctggcacaggctttgtgtgtacttgactctcctgggaagcttcctgagctggggcctgaatacaggtgtggagggagctctgtgggcagagacaccagaggggcctcaccaaaagccaaaggccccacccgcatccagagtggggagtggagtggtcagaggagaggtgtgtgactttcccgacggaacacatcacgtcttatgtgttggcatctcctgctacacagtgattctcagagcttaggggtgattttgtatcaatctctttattagtttgcttgggctgcgataacaaatatcacagagtgcatgactcaaacaatagaaattgattttcccacagttctggagagtagaaggtattggcagggctggtttgtcctgaagcctctctccttggcccctagacgtgtgttctccctgtgtccttacaggattttcccccaggtgtatcctcgtcctaaatctcctccatgtgtaaggacccagtcagattggattagggccatgtaatgacctcgttttaccttaattacctctttaaagtcatatctccttctgagtattaggggttaggacttcaac

SEQ ID NO: 128724 - DNA, 1106 bp, Homo sapiens
aacttagaaaaggttagttaacggtgacaatgattattcaatttgcttttggagggatgaccaaattctattagtccagagaagagctgactttgggcaggacagcccataccagtctttggtaccaagaaacgtgaagcctggcaactagggtgccttcttgccttgttgtactacgattttttttccaaagtagatggctaggagcttttggatgatgggtagaaaaggttaaaaccaaccaactggcccatggtggcagccaagcagccttaaaccccaaagccagaattcagctggaaaaatacacagttccaatgtaagaattaaatttagagatgaagacaaattacctaattttgggactttacccaggaatccagctcaaatagcggcaatggggtcagctggttaatagaaggctggttcctgtgtggctctctcactttctccatgctagccaaggccagcctggcctggcgtctttcctcacaccattaacacagacaactaatgagatgttggaacaagcccagagaaaaaacttgtttagagcacttcctctccacttcaccggtacaaacatctattctgggtttgggctattttccaagttgggttatatgatgataaacaacaggttattttggcgagtaaaattttagctgggtacttcgcaaaacaatttttaaataaatttgaagaaactattaagtggaaaagttaaaggcataaagaattgtcggtggttctaaaagtgtttttccctaagcttcttgtttatttcttgatgttgtggaaagaccttcttggccacgtttttcatgagttatctgtgtttcccatagatttggggtctagactctcaattatttatcttatttgaaggataaaagtggaaagttcaagaaatcgatagttagctggcttgaatttgctgagaattcagaacaatgttcacaactaaaatttgcaaagtaaatcaacagaatacaaagaagtaatttaacccagaatgacaaaatgaaaggatggttcccatgtaacctcataaatttcctgcttgatgcatctcaagtctctgatttctaataaaattctcatga

SEQ ID NO: 128725 - DNA, 1659 bp, Homo sapiens
acctacttaaattcccccgaaatatccagttctgaggctccaacaagagtcctattttggatcccaaattatcttcctctacacaaaagggccagaacctgaaactgcacaccagagggaggatgcagacttcaaagaacataaccttgtggtctttttgttctttttcaggcagtgtctcactggtaatttattacagcctgctgcatccaaaatccacagacatctggcagggctgcctaaggaagtcctgtggcattgcaggaggtgataaaacagagagaagagattctccccgggccacagatctagctgggaagagaaccgagagctcaggctcatgccaaggggcaagttatgaaccaaccattttagggaagccccctacccctgagcaggtccccccagaggctgggctggggacccaggttgctgtggaggactctttcctcagtcatcaccactggctgtgggtgaaacttgccctaaaaacaggaaatgtgtctaagatcaatgccgcctttggagataacagtcctgcctattgtccacctgcatgggggttgagtcaacaggactacctgcagagaaaggccttgtctgcccagcaagagctcccatcctcatcccgtgacccctcaaccttagagaacagctctgcgtttgaaggtgtccctaaagcagaggccgacccattggaaacctcaagttacgtatcttttgccagcgatcagcaggatgaagcacctacccagaacccagcagccacgcagggggagggcaccccaaaggaaggagctgacgctgtttctgggacacaggggaaggggacaggtgggcagcagagaggaggggaaggacagcagagttccacgttgtacttcagcgccactgcagaagtggccacatcctcacaacaagaaggcagcccagctactctgcaaacggcccactctggaaggaggctgggaaagagcagccctgcccagcctgcatcgccccacccagtgggcttggcgcccttccccgacaccatggccgacattagccccatcctaggcacaggcccatgtagaggcttctgccccagtgcaggcttccctggaagaaccctcagtatctcagagctagaggagccgctggagcccaaaagggagctaagtcaccatgcagctgttggtgtgtgggtgtcattgccacagctgaggactgcccatgagccctgcctcacgtccacccctaagtctgagtctatccaaacggactgcagctgcagggaacagatgaagcaagagccgagttttttcatctgaccacagtcatggtgggataagacaacaggctgacaaaccaagctggccatttggtaccgtgagaaaggaaatcccacttctgacacctgtgtccttgggcacatcactgtcacctctgaatctccatctgcatccctgaaaaatgaagaaacagggctggatgattttgcaggtccaatgcaaacatcacagaccccacccatgcataggagagactctaacatactttagaggaggagaaagagattccagtcaaaattgtctgctaccttttatgagctgtaggttcccttattttatctttttgctgtggcttctaggaaacacaaaggtaaaacccagattc

SEQ ID NO: 128726 - DNA, 1047 bp, Homo sapiens
ttgtcagcctgcgagctcccgtctccggctgccacctggtggccgcaaagcaattattttaaggaaacaaaatcctaaagttgttagaaagtttgtgaccctagctccctggaattcagtggcatcatgagctctgcagctatctttcattttaacactaatgagtgcctgcagttagtgtgaggatggagaaatatgcaaagtagaaaataaaagtcccctctcagcccataatgactctctaaaggcagccccacagccatttgagggatgcccttacatttcctgggcctttatgattctgcagacactttaatgagccaccctgagaacagggtggctctctctttgccagagaaggtctcagtgggacatagccctgctcctgggtactcctcagcagcctggagtctccagtgggcactcaggatggaggggagggggagccgctgcagactcacgggacgggggtccctaggcagtgtgcacctgacgaggtgtggtgcctctgtcctgggtcccgcaggtcatgctgttggagaacatcatcctgttgctgttggccaccgactttctccagggggcatctgtggaccagcctgcagaccatagctggggtcctgtctggatttctgattggtaagtcccaatgtcaccttcttctctgcatcccctccccaacgtattttttttttttacaatgggctcaaagggtaggaaactgagttcagatgtggttaactggagaccaaggaaccaggctcactgcgatgtggggggcagagccatgcccatcagagcatgagatactgagctcagcctcatctgccttgcttgactgtgctcggaacctcaagcaaagctggggctatccctctctaccccaaagcccccgtcctccccggagcttcctgcagggttgaggacgtgacttctctctcccctcccacctaggggagctcctcacatcttcctgacatggcaccccctgcagcccatagacaagcaccccgggaagtgggtgccctagcagaggaggagaggaag

SEQ ID NO: 128727 - DNA, 1001 bp, Homo sapiens
ctgtaaaagttaggataaagaaaagtgccacttgccatgtagaacgtgaccatcctatttctagaagggctgtcccagaagctgaggtagcagaggatgtacacggcccccacgagcaggttgaacagcctccagtggcaggtgctgtcgatgatgtcactctgctgggcgacaagccagaatgtcatcaccagccagtgggcacctgcagagaagccgggtgcagacgtcagggtccatgcaaggagatggggggacaggcaaggacacagagaccaggggctggaaggctctccgaccacatttgactcagcatccaagaagagatatcaaaacccagaagagatttgagggggacagaaaaccaacacagtttatctttgcatgtattatcccattttatccttataaagggtatctgacctaatttgaatatgacacaagaaagagtagcttcaataacacttgccaaatattgtatacctatgacctttttattccagaaagtgtttaaaggggcagttataaaactgactgccaattattttaaaattgttacaagagcaaaaaacctccacatgcaaaggaaagaactctatgtggtgcagctttaatttttatgcccatattttaagacgaataaatcattttggatttcaagctgattttttttaaaaaaagaataacaaaatagctaatctctctttagaagcacagttctttttttcaaaaaaattatctttttggccaataactgtattcaatgtttgctctaggcccaaggggcaaatatttcttaatgtctccaattctcttaaaacaagagtaaactgttccttcttgcagagtatattcactgatgaccagagatgacagctctcctcggcagggacacacaggccctattcagggaatctccagagccagatagactctctgtcattgccattcatattgcgtgtgcctagactgagggaggagggagggcttggatttagtgg

SEQ ID NO: 128728 - DNA, 1034 bp, Homo sapiens
ccctccccttcacccccttctctccctccccacctctccccttccatcttcatctctcccttcctctttgctgagtgtccacaattgcatatgcacaaattaaatgcttcacatatatgcctgcactgtccttccatccatctttatcaaagagcctgacaccatttgatgttttcgttcttttattaaacctccttcatatggataaaacagcaaagtacatttggggtggaaccatgttcagagccttgtagaatcagctttgttatatacagaggacttagaggatcaggagctgggacgtttttcttaaagggcgtagaaaggaagagtccagcccatttgctgggaagagcatttagtacattgagcagtggaaatatttcctgcatatccccatttcttcctgaatatagacaggtgtatttggacatagagttgttatgttacctactggtcaaagtggtgggttagtaatactctctgtgcagccaggctttaacaagaggttacacatcccattaaagaaatgccatgagtgaatcttcacaaggtactgttacttcggaatcttcagagcataccacatctttctgcttccctttcaggggtgagcaccctgttttcctggtcctcactctcctgggcactggtgtcctacactcgcttcatgggcttcatgaagccaggccacctggccatgccatgggccgccctcttctgccagcagctctggaggatgggcatgttgggaacccgcgtgctgagtctggttctgttctacaaagcctaccacttttgggtttttgtggttgcaggtgagctgagctaatgatctggtcatctgttgctgcataaccaatcaacccagaaatgaaggtctcaagaataaccacatatgatcctcaatcccaggcctgaaggctgactgggctctctgctgaatggatcttgcttgggtggcctcagagatggcaatggggtagcagatgttcagattcataaagagccttgacaggaattagcagctgaga

SEQ ID NO: 128729 - DNA, 1039 bp, Homo sapiens
ggaaagcaaagtttgctgtactcacaggtcctaggacaggagacatggcacaccatgccgggccacaggggaatgtcaccagggtggtcaggaggcaggagacaggaaccaggggaagttgaggccagacgctttgctagggcagagcaccagcttcagattagccctttgaataatttctgtggctttggggtataagggtggtccctagtttcctggcactgggccctgggatgattaaggcaaaagaagattgccttctgcgggggtatgggccaggtaggggaggtctggctctggctagatttagttcgcatgtcaaaggcaagctcctggctgggccctttgctagctgaaataattgctagccttgggagggacagtcactccccagccagaaagattttaagaggtcagaacatcataacatccagaaaatgttcagttgtttaaaatgcaggtacccagtctcactccagccttccaacaacctgcttgcctttccccttctcacccaggcctttacaccgtggcttactacttcaccacaggacggcttctgtgggggtggctggcccttgctgtcctcctgcccgggttcttggtccaggccctgagctacctgtggttccgagcagacgggcatccagggcattgctccttgatgatgctgcacctcctacagcttggtgtttggaagcggtaagaacagctgcctctttcacctctggagcacaattgcacaagtgcagtgagaggaatcttctctccatgtggattctgtcctcaagctcataaaagttcagcattgggaagaggttcaaagcggccacagcaaacccctgctctgatattggcatgcccgggtccagcctgcacttttttgagcatctccaacctcaggggctctttctctgtgaagctgtgaccttacgaaaggctttttcttgtcttcagatgaagccctgtcttgctgttttgatttgttggttgagccgttagttccatataaagcaacttacttaaggcagttccatct

SEQ ID NO: 128730 - DNA, 1115 bp, Homo sapiens
ttcctcaccctgaaatgctgttcctcatttctctacatagtgaactcatcccaccccctaggcctctccttaagtgtcatctcttcaaggaagattttacttttttaatattactattataattcaggtaccgtatgctttgccaatttaaagtgaacaaatcaatagtttcagtgcattcacagagctcggcgaccaccatcattatcaattttaaaacattttcatcactccaaaagaaaccctgtatccatgagcaggttcctgccatttcctcctcccactaagtcctgacaatctactttgagatagagtctctatcacaggctggagtgcagtggcacaatctcggctcactgcaacctctgcctcccaggttcaagcaattctcctgcctccagagtagctgggattacagggatatgccaccacgcccatctaattttgtatttttagtagagacagggtttctgtcttcatagatttgcgtgttctggacatttcatataaatgaaatcttctaatatgtgaccttttgtgactggtttcttctacttagcataatattctcatagttcatccgtgttgtagcacgtgtcagtacttcattccttttgatgactgaataatattccattgcatggtcaaaccatgttctatttctccactcatcagtagacaagcatttgtgttgttttcactttggcgctattatgaataatgttgctatgagcatttgtgtacaagtttctgcacggacatatactttcatttctttcataaactggagtggaagtgctgggtcatagaactctgtgtttaagcttttgaagaagtgccagactgtgtaagaaagaaagcctttcctcactccctctctccatttatacgttctctttatgccctttgcttctctttcagagcaattcatgttgacctgggtcaccctcaacttaaggctcataactcccctagatcctcagggtccacactaaatgtaatgaaatatgatggaagccacatatttacttttgcattttgtagtaaccacattttaaaaagtaaaacaaaagaagtgaaggtaattggaataatatcacagatttaaacaaatc

SEQ ID NO: 128731 - DNA, 1093 bp, Homo sapiens
accgggcacagtagctcacacctggaatcccagcactttaggagtccgaggtgggtggatcacctgaaggtcagaagttcaagaccagcctggccaacatggtgaaaccccgtctctactaaaaatacaaaaaattagctgggcgtgatggtgggtgcttgtaatcccagctacttgggaggctgatgcaggagaatcacttgaacccaggaggcagagtttgcagtgagccgagatcccaccattacactccagcctgggcaacaagagcaaaacttcatcaaaaaaaaaaaaaaaaatcgtaatatgtgtagataatgcccaggtatccctgtgaagtccacatttcaggggagctgtatttcacctgatgaggtttgtgtagctacaggactttacttctgctgggcaagggcgtggatagggaatgtttgggtatgcagtgctagcctctaatgagtgtgtgtataatgcggcgagtactgagtttggtgccccaaactcatagcatctaagaaacaaagaaaaattaatcagtgcatgtgctaattcttgaagttaagcttctctgctaatacctagtaccccttgtcagatttacccaagtagtgatacggtgtagatctgatcaaagtcactgactaacagctcctacaggaaagcaagagaaaacagagggaaggacaaaatcacttccttccagctgcctgaatacacgaagggttttttgtgctgggacctaccatacagtctaaagcagaacctcttggttctctttggtcatctagggaattagaagtgttaccgattatgttgctaaaagatccctggtctcctcacagattggaaaatgtaccagtggtaatttgtgtgaactagacatagaaggaagaacaattgaaccgagataacaatctgcctagagctatttgatttcaggggcagctttgagacaaaatgcatgttcagagaggttgaaaatggagagagtagctgaaattatagactattagtgctgcaaggggccttcacaatgatgtcatcggtcattttctaaaggaggaaactcaggcagggcaggctgacagctggt

SEQ ID NO: 128732 - DNA, 1026 bp, Homo sapiens
catgtcactggaagtctggttcacatttaaagttttccttaattccaagaaacaatctagaccctttgaagctttggcaaaagagtaccaggtaaaaaaagaaatcccacttgtaaaggcctagtttgcaattcatttgtcctgggatcttgcaaaaacaacccaatatctgtatgtctctatacattggtgtgtatgataatatctttatttttctttgtagagattttacacaggatataataagtgacacaactgttttggcagatggggtcagaatatgaaggcaattccttccatgtaagaattttggtgcttgtttaaatttaatagactcgcttctcctaaccacactctggaagtctcctgtcattcatgcacataagaactcagaagagaacctctactgtctccccaaaatcttttttttttcttttaataaacttgctgacattggccaggtttcaagagcatggtaagttcatgatccatcagcctggtttctgaatggaaatccaatgagttatttgtattgtttgttcctaccttttccaggcaccttctaaaaatgaacaagagcagctctgatttggaaaaagtgagccagggctctgcagaaagcctcagcccatccttcaggggtgtccacgtcagcttcaccaccggctccacggacagcctggcctcagactctaggacctgcagcgatggaggtaacaaacttgacattgacggagaggcttagattctcctggaccttcaagaccagtcctgcgttgcttgcgggattggaagggctgagcaaggactactgtcttggtcctgctttctcaatgaagtagactcttccagggagctgttgaagtcaattatctactgaatatatggcaagccagcccatccatattgccctctccaaattataagagtgtggacgtggcaacatggtgggaggaagatgaggttgaaaggctcctatttccttgggtaatgagccatctgtgtacaggcctgctttttacttct

SEQ ID NO: 128733 - DNA, 1023 bp, Homo sapiens
gtcccagtcacatgggaggctgaagcatgagaatctcttgaaccggggaggcagaggttgtagtgagccaagatcacgccactgcactccagcctgggtgacagaggttgtagtgagctgagatcatgccgctgcactccagcctgggtgacagaggttgtagtgagctgagatcatgccgctgcactccagcctgggtgacagagtgagactttgcctcaaaaaataaaaaaaaaagatgtgaattgatctctcactagaggagcttgataaatatttctctcctaggtctgcaggtttgttcaagcacagggatcttgtcagctctgttaaccattgtatccccaacacctaacagcgcttggcacagagtcggcttaatgctgaaaagcctgggaaaggtattcaggatagacaaggaggaagatccactgcaggtaacacaggcatatgataagttaaaaacagagtgttcttatccaccaagaaaactcgaattgcttaatgattttgactttagtaagtggctaaatagtagagaataaatgaagagaaacttagtgtattttagagcatatttgaattgctttgaatcatggagccaaataagacaattggagattgaaagctgcaggtcagagaggcagagccgtctctgttttcctgtgcttttgcaggaagtgcattttatagaaaagtcagagaggaactgaggggaaacagagagctctgagctggtgaattcacagcagcctggagaagcattccggctgcctctgaagctggctcttcacacccaagggctgccccttgggaacctgaagtcactgtcccagctagtcacaaggccggggaggcctcactgatgaggacagcactacgggcctgagtctagaatggtaagaggttctcagtctttgagacaattattggttgtttgagtttaaaaccagtcttttcctttcttctttgtaattgaaaaaacatgtatagactgtttaaaaacttgttcttgctttcaga

SEQ ID NO: 128734 - DNA, 1048 bp, Homo sapiens
cttcagcttatgtatgcccttaaagctaaaatggattttttgtaagcaagtacaaaatctttattcaaagaaaaactcaagatataaaacaaacatacaggtataccaaatatagtgtgtatacctagaagtgagatattgggaaagtggcaaattagagtagaggtagagatgaagggaaaaactaaaataatgcagaccaatgtaaaaatgtgtcattaattaggcatatggtcatctcacttctctgcacttaagaactaacaggaagagaaactgtgagtcatggagaaatagaggacttacttgagagagatgagtatggtgactaagaagatgaataaaagtgatgaatgcttggaacagctgatttgggtcaagtacaagcattaccagggagccctgagaggtagtatgaattaactgtggccccaacctgcatagttgtggactttttcctggagaagcactgggctgcctggtacaggaatgaggatggaaaatgcttggggatatccagaatggggaggtcaactgagtctgaagacagagagctggacctgttgagatgcagataagagagtgaagaattgatcagggagtgtggagagaacctgtgatggtgtctgctccttattgggcaaaaggctgccccagcgtgaagaatggggaagtagctcatcctaagagctttggtccaaataacctctcaagctagaagggtagaaatgaagtctagtataaaatacactgaagctggttcaacaaagtgaatttgaaatattcaccaaatcaagaaaattagggtctgagaattctgaaagcaaggtcaccaaaaccattagtctagaaacacaaagattctggtcaggcacaggtgatcttggtgggatttcaataggattcgatcaagcccagaactgcagtgactcccaagtgggtaacaactcactagtgtttttgtttaaccaaacaccagaggtagatgtgtgctgggggatgaggagatggtgtgaagggagaaaggaaagttctaggaggctaaggg

SEQ ID NO: 128735 - DNA, 1048 bp, Homo sapiens
tcccaaaataaatgggatcctaatctttacctttttctcctccttctccctgatcaaatagtgagactctaattgataatgcacccattgtctggcatggcaaatctctaatcaggaaactgtcctgcctttctaggaagccgctctgtgacccacctctgaatcccacaaaactgcaccagagagccgggcgcaagatgaaccagcaccctgtcggctcaagatgcaccagaccctctgcctgaaccccgagagcctgaaaatgtctgcgtgcagtgactttgtggagcacatctggaaacccgggtcctgcaagaactgcttctgcctgcggagcgaccaccagctggtggccggccctccccagcccagagcgggcagcctgccccctccaccgcgcctgcctcccaggcctgagaactgccgcctggaagatgaaggtgtgaacagctcaccttactccaagcccacaattgccgtgaagcccaccatgatgagctccgaggcctctgatgtgtggacagaggccaacctgagtgccgaagtctcgcaggtgaggctgactaacactcgtggtatttttacaggggctgctcctgtttgaacacttggtgactggctggcagccagggagggctgttccagcaagaaacctgcaggatagcttcctgtcagtttgccctgagatggctcctgcctgggattcgctgtagctgctctcctttctctctgtccctttaggctaagaatcattaatccagtcccccagaatttcctcctgtgatttgcagactgtgtagggcagacaaaaaatgaagcttttttaaaaaaaagttttaaattttcttagttgatcattttaaatatatatacaagtagcaataattgcaaagtgaattgcatgcacccaatacccttcaatatgaacttcagcaaccatcaactcctgaccaatcttatttcacctccctcacactgacccccttccctatgattttaaagcaaacccagatatcacatcatttcaataaatacctttcaaagataa

SEQ ID NO: 128736 - DNA, 1082 bp, Homo sapiens
taattggaatctttcaacagtaacagaaaattcttggtttttttttttttttttttttttttttttgagacagggtctcaactcactgcaacctccaattcccagggtcaagtgattctccctcctcagcctcctgagtagctgggactacaggcatgtactacctcacctggctaatttttgtatttgtattttttgtagagatgggattttgccatattgccctggcaggtctcaaacacctgagctcaaactaatccatgcacttcagcctcccaaagtgctgggattaaagatatgagccaccatgcccggctgaaaatccttagccattttcaaattgaatattgctacttccccattctttctattatgttctgtaattctgattgtgattctgtgattcttaaactcactccatactataaaattcttaatatcttctgaaaatttttaatttaattttctctttgtgctgcattttggttaattcctgaagagctattttccatttcactaacctagtcttaagctttatttgttatgtaatttgaatattgagttttaaattgaatttactgtatttttgttttcaaacattattttgagatcttttatattgattttataatctttcactcatgatgccttgcgtttatatatttgttataattttgattgtagttacatgttccttggtgctttacatttagtaatttttgaaaccatgtttgaaggtaagttccttcagagagaatgtgcatttacttctacctggcaccagaagggcactcccttcaaagggaaactttaaaatcaattctaggtttgaagtatttctgctaaaaaaattcctatggaaattggattatggttgcgagttctcggtaagagagactagctccaagattgaaaaaagatgtacttcttaacagttccttctgtgggttcttagctttgtcacatgttcatagattgctcgtgggtttttccttacagactctcctctttggttggactcaaggatttttcttacgtctctcacactttgcacagttgtcaaaaccagaactcaaataaat

SEQ ID NO: 128737 - DNA, 1048 bp, Homo sapiens
accccaatttcaaatccccagggagctgtctgatctgcctgcttcagctcctctcagcctgcctggtgctgccgcacagaggaattggctgcccgtggccgggtggagagtcctcgtcttgtgtgtggccagggtctcaaggcctcatgctacacacttgcgtatagcatctcgtgcaggcttcaccacagtcttacgaggcatgcggtgaccttgcccttagacgtgtgcactcaggcctagagctgtcagagccatttgtcgagcgacccgctgctaggagatggcagagctggagccagaccccaaagccagcgctgcgctgttctccttttgacgcgggcttatccacagttaatcagtgatttcctcagatgtccacatgctcctacggtgactaaacccagctgtcttttgcacatagttggaaaagttactattaggcacctagactaggtttgatagcaataggattttattaaaaccttgatggaaaacctgcgtagtatctgctaacatctttgcatgcttggaggcagaggaggatttaatatacatcaagtctgtgtagcaacatcaaaggaagatttaaacactgctggcttttttgtgcgatatttaaaaagcaccccccaccttttaagaaaatgtgaagttctggcataaatcaaagtgtgattaatcagtgatgattgactggtattttcataacctgtggcattaataacaactttgtatggacataagagttgtaagcaaatttgggagggaggttactgcttcatgctattctccatgccgatcttcgatctttgtacatacttacttgcattctgtaaaattcggcgtgatgaaatccaagaaccaaaaatgcagggtggaaataggcttagtagtaagtgaccttctatttccacttcccacctccttgttaagattctttgacctcctgccacaggggccttagaggcatcctgtaagctttgcacagaagctgctaatcccccggcaggcagttcaggcaggcagttcattccgtttccacctg

SEQ ID NO: 128738 - DNA, 1051 bp, Homo sapiens
atatattatagattggagttcagcacactttttctttgaagggctagatagtaattatttctcgcttcgcaggctatagcctgtgtggcaaccacctacctgtgccactgtagtagcatcggttagcagaattgcactaccttggaaagcagtcgtagataatatgtaaatgactggctgtggttaagttccaataaaactttatttacaagaacaggcagcgggccatgttttgccaacttttgttctaaataatcacaagaggccatgaaaagtttaatttccatacatgagaactgggtctgaatattgactcttctacgtagtataatgggtgtcccaaatactcttacccagtaaaggatcttttaaaattttaagttgaaaccatattcagtggcaggaatcctgaggaagtgagagagaaaagctttataaatattaataagtgctgaaaattaagttgttgaaaaaattgttcacataaaagatcattatatagcaagtttggaatttagtttcaattttcatttccttgtagaaacatcttcatcgtgaggaaaatgagggaattaatgaacatttgtttcctgagtgtgagctgtgataccttgtagtcactgagatggcggctgcatgatgggtatctcgtaactctgctccgggatgcccaccatctagaaagatgctcaagacccgtgggacaggatagtgtttaggaatgtgtgttttaaacttttcttgcagtatttaatttctaaataaactttattaaggtataatttatatacagtaaaaatgcacctatttttttaagtgtgtgatagattctatgggttttgacatgcattcactcccaatcaagatagagagcattcactcccattaccccaaatgtaccctcactcccctaatgctcaccctcgaacaaccactcatctgctttctgtccatgggaattaggttgccctattagagagcttcctatacattcagtcatttagtatgtactttttttgtgtctggtttagaggtttgcaaacttccttgg

SEQ ID NO: 128739 - DNA, 1063 bp, Homo sapiens
gttgaaaatcaagttggggaagaggaatggtcagtaatccaatatgccaattataatttaagctttgagaagatgtaagagaggttcaggggatagagtgtgatgggtggtgcatgagagatggtctgagaaggaggcatctgaagcagagagctgaccttgcggagcttcccgtttatgcccgagaaggtggacagaagccagccctgcctctgcagaattagagcacgccagttgtgtcatttttagatcttttcagataagaagctggtgcaagagtcatgctaactttaaacaatgacaggtgtgctgtgtatatgcctaggcttatttgtattttggtaaacaagactggctaagtgtgaatagagtcatgttttgaagaagtctggactatttcctaaaatgagcaaatgacacatttgaagcctgcatctggtgagactacctgtgagtcatttttcccattttaaagagaaatagtaatattgagacaatgattaactgacttagaatcatacagtttttagggctcctatggaaggacctttggagacaacgttggttgatttttcctgtttctttggatgacaaagctgagcctgagaaactgcccacagttctcttgctaggttagtagtagaagggctgacactgcattctgggcttgctgacttcagagttctttcttctccatctgtcattcttttcaaaaggattagaatttgcgtttctgtgcctttcagcatgacacccatgtaggtagagtcccagagaacagtggattgttaattacttaaattgatcccacaatcccttataaaataagattctgctattttttaatattttgtcctctttaggcaggtaatactgctttggttaatgataaaacagaggtaattaattcttcaatttctacctttccatttttggaccttagcgtaaaagttaaatttaagagaaatgtgactccttttccagcctgtaagatagggatgagttcgctgatgtttatgggagcaggtgcagggtgacgtgtggggagaaatgagcctctgcc

SEQ ID NO: 128740 - DNA, 1035 bp, Homo sapiens
ccttgtacgtgccaggcactagcaatctaagttgtgtgtggttttttttttttttttttttttttaagaatgagcagacaccttgtgcgattgtccaggttaactaacaaaaatagttgtctgggtttatggaactgtaattacgagtcagatcctggttcccttccgctttctctgctatttctggttgctcctttttattcccaaaaggtagaaaggggcaggtaggacaggagcttgccgcctgttgaactagagggagtagcttccgagcaaactgtgacaaaatggggtattttaagcctccattttttttggggggtatgtgagtgtgtgtgtgagtcggtgtatatgtacacagtgcaagtaaataagcctgagtgggtggcaagagccttgtttgtgtagtaggagaaatggagcctgcaggggcatagtcggggtcttgagagcagacacacggactgagccaggcagttgctgctgagaacagaatcaggacctcctgcttcctttgggtgatattgggttttttaggccaccttcccagccacaaagtaggactctgaaatacatccgggtataaatgttcttatggaaatgcaatcacttctgactttaagtatgtagaagtgagggctcatacccttctcccagaatgtaaatttgactcatcggggctaacaacaatgatagcctaatataagaaactgtttaccggactctgttctgatgtcagccaagctagagctttgcatggtgggatgctttctcttggctgtgccctattagggaaggcaaaaatagaaagctttttctctggacttcagaacggaattaatgcatggttattaaaagcatcaatggcaaatggccatggaagtcagaatctcagccttaatgaagggcgatggtgtccacagaaccaattattttgcaaagaaataaaataataaaatcctcccattggttttagagtggctgaaaccagcaggcaccaggtctaaaccctcttgtgggtgtgtgtgtttgtgt

SEQ ID NO: 128741 - DNA, 1039 bp, Homo sapiens
gtgatttgataagattaatttcaacaggactgatgtggaacggctgctagcttaattggtttattagggtcgtgtagccaccctcttatgatggataccaggtgaattccaggagatatatagtcttaggtttgtaagcagtgccatttgcagaggaataaggttctttatttcttaaatttggaagggtctcatagaaataagagactttataaatatctagtaacctgtcaccgctttaaaataccgcaaagataaatgatgctgattgtcgcgtgcttggcatgatgaattatgtatgtagcgtgccccggagttctttatggttgtgcataacgaatcagcttttgttctagcttattttcagtggtagtgcttgtaaaagcagaggtcaaagcagatgcactgaagagatgtggttggtgcaggatgatcgggttttgctatcctgttctgtgcattgcttttgtttgtgctttgatttttcattatcaactttggggagggtgggagagcagccttgtggcattaacagctgcatgatggcacagagcaggcagcgactcttcttggttcatgcacctcaaaagcggccctctttttgccttcctcctcctcctctctgcacctgctttgcatagctgttaactacttttccacctaataataaaggaaattgaaataaatggttaggaacatgcccataatcttttttctcactgactttctctaaactctagacgaaactagagaggattaagaaatgtaaaacacagcagagaatgtcttttttttcctctccctttttctcttcccctagcaaagatttctttagaatctgagtgagatatcagaggtgctgtttgcatatgaagtagcgatgactatgggtggaagccagttgtaaggttgcatagtcatttataacttctttctatgttaaggttactaccgactttatgagaggagcctcccagactcaggtgtcatgcctgactcatgagtaattcattagagagggcccaagccatgtatttca

SEQ ID NO: 128742 - DNA, 1006 bp, Homo sapiens
caccaagttggcgagggtggtctcaaactcccgacctcaagtgatccagccccctcggcctcccagagtgctgggattacaggtgtgagccatcacgcccagctgcaagtagtttttaccatataataagggctcagtaaacattagctctgattaccatcatcctggtttacagatgaggagtggagacagaggagggctaagtcatatggccaggggcacacagcatgtagcagagcccaggttgtcctcaggaacctatggtctttgctgtcaccctgtgctgcttctcaggaaggcaatagcttgtcacccattaaaaatgggtagttatttgaatgaaaagcagaataacccccggaggcagaggttgcaatgagctgagattgcaccattgcactccagcctgggcaacagagtgacgctcctgtcaccaaaaaaagaaaaaaagtaaggactccttgtgtgaaatgcacatggttgcttttaacattgcagtactggactataaacatttgctggggattggcagtgaccagccatggggcagagcatggggcatgggaggggagcaaggccttgaccccgggaagctgcagtccagggaagcagtgtggacagtaagcagagatttgcagggctgtgtaataaattccaggagaaaaagatctccaggggctcggagaggcctgcgggatggaatctgtcttgatccacgtgtgtgtgtgtggggtggttagatggatgggaggtctccaggggaggtgagtcgtagggactttctgtaaaaccagggcccctgacgtgtgatgggctgtacaaattactggcagcccaactattcatttatcaatgcacgtctgtaaatatttttgttttctttttaaaccttttttgttttcctgggagacagagtcttgctctgtcatttaggctggagtgaggtggcgcgatttcagcttaccacagcctcaacttcctgggctcaagctatccttccactgca

SEQ ID NO: 128743 - DNA, 1079 bp, Homo sapiens
cccagttttttttgtgagtgattctctgatgactgtatttctttataaaaactcttttttatttgggcagtaatccccgaagtagagtcattgagtcaaaggcaaaaaatgtcattaaatctcaatgcacgtttacgttgcttcccatgaggatgggcacgtcagatgcaagatctttttcactgtacctcctcaacattgggtatcatctataaaatgcactaccgtttaatggaaacaatatgtcactggtgactgaagattttaactagtggatgtgaacgttttcttgtataaatgttgcctaattgtgttgcttcttttctgaatcctctaataacatcttctggcatcatcttggtggtttttctttttttttttttaatcacagtgttttatcagtttatattaactcttcatatataaaagataaccttttgtctatcatacttaaggcatttttttctagcttgttcccctctttgctttaaaaacctttaacgttttgaagtttcaaatttcattcagtatattaatagcttcctctgtgatttcttctagagcttaaaaaaacctcataacatttttctaaatacagaggtgacagcgggaatcacatagtgattcttcacccttataactttaactgaaaataaaaaaagtgctatccatatgtggatggtagattcattagcaaagccccctttttcataacccctccccaaactgtctcctctgtaaaatgtttcttgctgatttcttccagggaaaataaagcatgtatttgcatatattttaacaggaatgagatcatgctgtactccttgttctgcacctcgcatttgatcacttcaaaatatatttttgagatgcctccatatgaacagttagaaccctgttatagaagattattatgtgtgtgtgtgtgtgtgtgtgtgtgtgtgtgtgtgtgtgtgtagaatgttatagtatatcctacaaatatagcatagtagtctaccaatggatgtattgttcagtcacacctataccggcagacctttgatcctttccagattgttaaactaagtacgttctcc

SEQ ID NO: 128744 - DNA, 1031 bp, Homo sapiens
acctgaggcagtctgcctgcctcatcctcccaaagtgctgggattataggcatgtgccaccacgcccggccgacaacagtggtttcttgcatcttatcatcatttgagtttgtcttcccttgcctgccaacttatcaaagtttcctcaattacatttaatcaaatcctaggaagtacaaggtatttttaagtcttaggttatattttgtttgtatttgctttatagattgacttgaaacagttgggattttgtgtagttttcaaattgaagcattataatatggtggttagttgcaagagctcttggagtagactgctgggctctaatccctgtgccactgcttcttagttatgtgactttaggcatcataatagtttgtgttggttctgaagattgagttatatgtgttaaatgcttagaacaatgcttgacacctggcaagagctcagtaggagtttgctgctgtttccaccattccagaaggtacaagagtctaaacatacttttagaagagtgataagtttgtggatcaaaactcttttcttcatagaagaggtggaatacagtatgatctctgttcatatgaacaccttatgctcttttaaaaatgctttttcccctttataaaaacttataggccgggcatggtggctcacacctgtaatgccagcactttgggaggccgaggcgggcggatcacgaggtcacgagttcgagagcagtctgacatggtgaaaccccgtctctagtaaaaaattgcaaaaattagctgagcgtggtggcacgcacctgtaatcccagctactcaggaggctgaggcaggagaatcgcttgaacccaggaggcagaggttacggtgagctgagatcgtgccactgtactccagcctgggtgacagagcgagactgactcaaaaaaacataaaaaatttggagagtagaagaaaaaaaagtttctcatggtgggtatctaaagtaatcactacacattttgctctgtgtcttttagctttgtttcctccttaagctta

SEQ ID NO: 128745 - DNA, 2060 bp, Homo sapiens
accagatcgcggtgctgcccgaccactttggccagctctcccgggtgggtttgtggaagatcaaagacaacccactgatccagcccccctacgaggtctgcatgaaggggatcccctacatcgcagcctaccagaaggaactggctcattcccagccggcggtgcagccccggctcaagctgctcctgatggggcataaggctgcaggaaagactttgctgcgccactgcctcaccgaggagagagtggagggatgcccaggaggaggggacaaggagaagtgctacccaccgtcacctccccctgtgagcaagggcatcgaggtgaccagctggacggccgatgcctcccggggcctgcggttcatcgtgtatgacttagctggggatgaaagttatgaggtgatccagcccttcttcctgtccccaggggccctatacgtgctggtggtcaacttggccacctatgagcctcgccactttcctaccaccgtgggctccttcttgcatcgggtcggggcgagagtgccccacgcggtggtgtgcatcgtgggcacccacgcagacctgtgcggagagcgtgagctggaggagaaatgtctggacattcaccgccagatcgccctgcaggagaagcacgacgcggagggactgagccgcttggccaaggtggtggacgaggcactggcccgggacttcgagctgcgctctgccagcccccacgcagcctactatggcgtttcggacaagaaccttcgacggcgcaaggcccattttcaatacctgctcaaccaccggctgcagatcctctcccccgtgttgcctgttagctgcagggacccgcgccacttacgacgccttcgggacaagttgctgtcagttgctgagcaccgagagatcttccccaacttacacagagtactgcctcgatcctggcaggtgctggaggaactgcatttccagccacctcaggcccagcgactgtggctaagctggtgggactcggcgcgcttgggcctgcaggcgggtctgaccgaggaccgactgcagagtgccctctcctacctgcatgagagcggcaagctactctactttgaggacagtccggctctcaaggagcacgtcttccacaacctcacccgcctcatcgacatcctcaatgtcttcttccagagggatccctctttgctgctgcataagctgctcctagggaccagtggagagggcaaggcggagggggaaagctccccgcccatggcgcggtccacccccagccaggaactgctccgggccacccagctccatcagtatgtggagggctttctgttgcatgggctcttgccagctcatgtcattcggttgctgcttaagcctcatgtccaggcccagcaggacttgcagctgttgctggagctgctggagaagatgggactctgttactgcctcaataaacccaagggcaagcctttgaatgggtccacagcttggtacaagttcccatgctatgtgcagaacgaggtgccccatgcagaagcctggattaatgggaccaacctagctgggcagtcttttgtggctgagcagttgcagattgaatatagctttccttttacttttccacttgggttgtttgcacgctacagtgtccagatcaacagccatgtggtgcacaggtcggatggtaaatttcagatctttgcctatagagggaaagttcctgtggttgtgagttacagacctgccaggggagtcctgcagccagacaccctgtccattgctagccatgcatcattaccaaatatatggaccgcatggcaagccataacccccttggtggaggaactgaatgtcctacttcaggaatggcctggactgcactacaccgtgcacattctctgttctaagtgccttaagagaggatcgcccaatccacatgcttttccaggtaagtggagagagggagaagttcttctgtggtatgctgtaagatatgtttttggagatacttggttgtcatttggcagaatgtttgtttaacttcacgggttctccaggaaagct

SEQ ID NO: 128746 - DNA, 1044 bp, Homo sapiens
tttaccattaccaaattaccattttatagataaggaaattgaggatcagaggctaatacgtagctatccaaagtcatgctgctatttctagtaaatagtcagctggggttctctattgaggtggtgttgactcccaccaccagtcttctttttacttagctttgtttcctttgaggaacctcatgactcataatagagtggggtaaattgtattggagacgcatcttccttcttatcctttcctccgtttaggagctgcagtgaacacttttcattgaacatgtagcatgaagaggcttcagaagtttgaaagtttgaatctttaaatctgtgatgtttgtactaattataaactacatcctttttttttttttttttttttttttttttggtaggaaactcaacagtgtaaatttgatggccaggagacaaaaggatccaagttcattacctccagtgcgagtgacttcagtgacccggtttacaaagagattgccattacgaatggctgtattaatagaatgagtaaggaagaactcagagctaagctttcagaattcaagcttgaaactaggtaattaaaaataacttataaaattataaaagtagtacatgctcattttagaaaatcttgaaaacattgaaatattaaaaatcatctgtaatcctaccgtaatgacatgatcctattaacagttcacaaaaactaattaacattttttatgtgcaactctgattatttttgtctgtcttctagatgataggactgctgaatcaaagtcaaatattttaatgacctaccggcaatgtataggagtctctgtcttattatgacaagagtgttttaaatttttttagttgctcatttaaatgatggatagttatattagtgagatagagtattttttattttctttttgccatttgtatcttttataaaaagagtttgtttgaaatcaggtacaataaattaaaaacattcacttaacaggaatattttttgttttaatttctaaaaaataatctacaatgatcgtttgcatt

SEQ ID NO: 128747 - DNA, 1101 bp, Homo sapiens
agtggaataattttatattaatttcaatgtttgtatcatatatgttatcttagtatataaggcagtatgacgactgtgttggtagtatatgctgacagtgtttatggtttgaagtaccagtatatgttggagaaaatactgttatatactactaaaataaaaaaagacttgtgaaggaaaatgttaatgttgtaataaacatattattttaattagttctttgctaacttagctttgagtcttgcttttcttacatttattttagctagcatttgctaaatttcgctgtgattgtcagtgttcagcccagtgccagcaggtgagagttttgattcttgactgtagaatttacctaagtgtaactagtcttcttcttctacttagaggagtaaaggatgttctaaagaagagactgaaaaactattataagaagcagaagctgatgctgaaagagagcaattttgctgacagttattatgactacatttgtattattgactttgaagccacttgtgaagaaggaaacccacctgagtttgtacatgaaataattgaatttccggttgttttactgaatacgcatactttagaaatagtaagtgaatttttgtattttaattgtatttctagcagcaactattctggtgtttactggttatgtggaggacctcatttgctttttagccagaattagacttctaaagtaagttttttctttgccatgaactttatatcagcttgattaatagaaaagctgtaacaaagcaattttagagactactgctttctttttgcagtagcggaagttaaaatgttgttttccatttgcttagaacatctgggtgtggacatcagaatctcctggtaagtaaaaaaataaagaaaacactaatgatactgatgcctggccctagtcccagagattctaatttagttctctgatagggcctctgacatcagcatttttttgaagcttttcagttggttttaatatgcggtcaggcttgataaccaccactgtggcctagtgtgaactctgatctctaagaatgataatttacaaaaatgacttttgaacctctctctctggtggaaagttta

SEQ ID NO: 128748 - DNA, 1337 bp, Homo sapiens
ttaagtatgagagtgatagggcggacccgatttacgttttaggaagatcagtctggcagcagtatgtagtatgcgtggaaaattgtgagacctgagatgggaagacacttagggagctgtggctttcagcttagaagagatttctcttttccctcctctagaaatccagtaagccgctaggttcaggcctataaaaagagaaccactggggatgatcttaaatcttaattttgggaggattatacttttcagttgaaagtagtcccagtacttggttatgaaatttttagaatttcttaaaaatgaaactttaggtggagctaagccaaggaaaccatgaatttaaagtatcagcctttctcatactgtttcttcccctccaacttaggtctgggtattttgtaggtctacgtgaagctgcagccctgatttttgtatattttacttttatatcctcaggatcaggtagacagagctgataccttccctcaggtactaaaaaaagtaattgactggatgaaattgaaggaattaggaacaaagtataaatactcacttttaacagatgggtaagtatttaggaagattatttttttatatctactttttaaagattaaagatacccttatttatctgatttttagaataaccacaaactattattagagaccctagagtctcaccccacagggaatagtatttttcctttcacctaaggatgaaagagaggaagaaaacagtggtcacagtccaatacaggactagaacactacagaaagttaaaaatatgtaaagctaaaaagactttgctaaaactctgttttttcatgacacttccttactcaaaaaagttcagactcttgagcttggccttgaagcctctttcctctcatcccacgctacctgtttaatctaattcacctgccattaatcctctttagtcagactggcccaggaattcacatggtttaccctttctctgtgtagttacttatgcctccctctgtactgagagtgtcttctcgacaactttatcatttttcaaagcccatcttgtgttttaccctgacaacgccattgatcttttttttccttgaaaccttataatttctatggtatataccattcatgttgacatctgaccatatattctgatatataatctttgtgtacatacataagacttacttttgcaaggaaatctaaaattctttcagagaaggacttttgctgcctaataatcttccataatgcttaccttagtgctgagcttaaagtgtatgcccaaaaagcatttgttaaatgaaaagctaaatgggaagatcagaaagattaa

SEQ ID NO: 128749 - DNA, 1783 bp, Homo sapiens
actagattttaattttacttcacatttatcaaagttaatatgcgtgtgccgtgtaaatgtttaaaatattattgcaagacttacaatgaatggcagtcttctgccatagccttcaccagaactggttcctgttctgaggcaaacactttcaacttatgtaaagctctgtttttgtttttgtttttgttttttttcaaatatttacctttgtatttctaagtttcatgcttatactacttcttgacttttcagtttgcgatctattgaattcctgccctgaaagatcaagattgagttcaattaagttaccactcctgcttgtccttcccttcctgcatcttcctactatagctctattacctttcagtcagagcactcagtgttcatactcccgtgactatggagagtgtccacaactttcccctggatgtaataatttacttccgcggttgtttacttatccccttactctccattcaaactgtaagtcacttcttatgactgagaacactcaggtagtctgtcaggttttcttttttcatctgtttttcccttgcagactatcttcctggagcctttaatcctgttctaatctgaactgttagttcttcaggcttcttttaaaatcatcttaggggatttcctttaattctcatgcattagatactatgtcatttttctccctttacagtttcattttggagaagcatgttctaaagtagtttcatgagaaaaggtgcttttccttacagactcttctgttttaacagtcttttaaaactgagaagtatgcatgcagaaaagtagagttttgccgattgctataaagcaaatacccttgtaacttccacccacttaactcccttccttcctcctggagttaaccctaattcttcctttcatggtaatcattttcttattattccttatagctttagtatttaaatgtatatccttatattatatagttttgtctggctttgagcacgatataattagtattatactggctatattatttgttttttttgtttttttttttttttcaatattatgcttgagatccatccacgtcttgtatgtcactgcagttcattcactttattgctattaattccattgtgtgactataccagatttgtttatctgttctactttggctggccatttggattgtttttatttggggcttccatgaagagtacttttataagcattgttgtgcatgtcccctggtgtctgtgcactcgtttttctaagaaaaacctaagagtgcagttgctgggtcatgggatatgtacatcattgacattactagataatacaaaaatagttttccaatggaattgtaccagtttgcactcttatcagtgctatgtgagtttatagttactgtaagtttttgctagcatctgatattgtcatacattttaaatgttttgtaaatctgacgggtgtgtgataccatctcattgaggtatcagctatctggattgcttttttgcgaaccccttatttaaatttctgactgttttaaaaaaaattgggtagtctgttttttcattacctgtgtattttactggtctatagatttttactttgggtgctagtcctttgattatatttgataatctttttgtgtgaatttattttgttttttggtttatttgtctttgagatgaagtctcattctgttgcccaggttggagtgcggtagtgcgatcttggctcactgcaaccctgtctcttgggttcaagcagttctcctgtctcagcatcccga

SEQ ID NO: 128750 - DNA, 1045 bp, Homo sapiens
tgttcaggctggagtgcattggcatgatctcagctcgctgcagcctccacctcccaggttcaggcagttctcctgcctcagcctcccaggtagctggcattacagatgtgcaccaccacgcctggctaatttttttgtattttaagaagagatggggtgtcaccatgttcgccaggctggtctcatactcctgacctcaagtgatctgcccaccttggcctcccaaagtgctgagattacaggcgtgagccaccttgcctggcctgaattttttatttgccttatttgagtgggggtattgccctttgcctagctttatttagctgttagtgctaattttcagtttcttatttttcatcttaactgtggcttatattacagtttagaacaccaaagaattatttactaagctgtttatttttcaggttcctagaagccaaaccaaactgacaataatgcttgaaaaattaggaatggattatgatgggcggcctcactgtggtcttgatgactctaagaatatcgcccgaatagcagttcgaatgcttcaggatgggtgtgaactccgaatcaacgagaaaatgcatgcaggacagctaatgagtgtgtcctcttccttaccaatagagggcactccaccaccacaaatgccacattttagaaagtaacaacagttttgtgtgtggatcattccaattgaagttgctatgaagaggtagcagatgaatctcattgaattagtcctgtagtgcaaactttaagcaccttaaaacatttaaaatcttattacaggtgatagagatagatacatgtatgtgaacagattttgtaggaaggcatactgaattctttgtcaccagcacttttgatatgaacagtattcgttacatagtaacagttcctgcttacaactgaattttataatttaaggtgttcaagatatattctttttggttttaaaatgcaaaatcttattggctgttctgttgaatgtcatatcttactggtgtttaaatatgtaatgtgtttctttattaacatcact

SEQ ID NO: 128751 - DNA, 1031 bp, Homo sapiens
caagactatcaaataattattcattatacctgttactctttaacctagaaaacctttatttcagtatattcataaagggttgggaaaatccaacctgttactttcaaaacaccttttaggatataatactcttggcacagttagtgctttaaatatatttttattatatgtttcgtcaaaaccttggagctacagatttagtcattcatttcatgatacatgttcatcatataatgaaatcaagcaaaatatccatgtcatgaatcaaatcagactgactttgtcagaaaaaggtctggcttgaaaattcaggttgtgttactgaattttgaacatacaaaaatcattaaaaaccatcacagaacaccttttgtaaatgattagtgaaaacagtcaagatttaaaatttcccttatttaacttataacaagtcgcagtcatctgtggcaaaaacaagttatttaggaagcaagttaggttgatgaaaggcaagatattctttcaatataggtgtgtacgtatattgaactaaggtatttggcttttggcagaattaagaatcaaataaaattctttagtgttaataatattaacttttactaggattacgcttttcctatagaatgttatcctgctaaaaactaactggcagatatctagaacctaatttattttctgttaagaggtagtaaatatttcccatttcataagatgaagtagattcatatttgactgtatttggagtaaatatttcacaaaatgattgtggtcagtttttttcattttttgtgagcagttttgtctataggttttattcagtgcctcatgaaaattctgatagtcctgaaaattattccaagtacaattaaaatattcagcatcactaaactctttttgttttgactgtccaagggtatttttccttccagtcaatgattgttctgtggatgagtttttaaatagttgaaaaagtaacttagaagaacagctgtttgtagcagtcagtatttctcaccgatgcttgctgcttt

SEQ ID NO: 128752 - DNA, 1029 bp, Homo sapiens
ctgacttcaacctctgcctcccgggttcaggcgattctcttgcctcagcctctcgagtagctgggaatacaggcatgcaccaccacgcccagctgattttgtatttttagtagagacgtggtttcaccatgttggccaggctaatcttgaactcctgaccttgggtgatcctcccaccttggcctcccaaagtgctgggattataggcatgagccaccgcacccagccaagagatttttaaatgaacaacctaacagagtacctcaaggaactggaaaagcaagaacaaaccaaacccacctgggggaaagaaattagatgtagtagaataagataagcattaggaattcctcaaggccaagagaaatgtctgcacagaaaagagaaggaacttggaggctgcattgccagaatgcctcacccagcgtatgttttgtacgctgtgtccttggtcctccctttgcgataatttctctctgtggcacacaagatttcaactatcccttctctgcaaaaggttcctaaaatctattgccctgatctctcttttgagatccaatttcttgagtatttcataggtgtcaccagcgttttaaattttatacattaagaaacaaacagatgcttatttcctcaactgctacgccctctcccgcctccaacacacacacagcctactcttgtgtcactcaagtcagggaacaccctcccattatactcaaatctgccagttccctgttctttgaggaggtagcgtcatttgtcacaccgcaggccttctggggctttgtggccctggaggaagcctagatgcgatgggtccttgtgtccagaatgaaagttagctaacaaaactggagggaagtgttatgctttgaggaggtaacacaggttgagcatccctagtgcgagaatcagaaacgatccaaaatctgaagctttttgagtgttgtcatgatttcggattagtgatgctcaacgaataaatatcaatataatacggatattccaagatctgagaagattcaa

SEQ ID NO: 128753 - DNA, 1369 bp, Homo sapiens
aagtaaatagatgagtttatttggggttagtaagtaaatacaataaggtcaggaacataattagtattacgagtggcatttattttcatctaatctggggttacagattataattcttaacattatccagctgtgtgatgaaatgtgccattgttcgcagtagacaccggacaaaaagtgtagctggataggaaaactcacatcagtgcaactaaaatcagtccacaacattcttcttcatgcttctgttttttaatcttaacttcttgatgtacagcagagaaccattgagaagtgggagtgatccaacatgatatgttagatatccataacacaccatgtgtcccctaaataatggcctcctggaatgggaggcataagaaatatctcatctggtctcccagtggtcagttactcatagaaagtagtgatgttcagacttattcaaaatgcatctgttgtgtctatcagtacaaaaaataataataacaataaaataaggaagtctctgctggacagagatttttaaaaactaaattgccggccaggcccagtagctcacacctgtaatcccagcactttgggaggccaaggtgggcagatcacgaggtcaggagttccagaccagcctggccaacatgaggaaaccccatctctactaaaaatacaaaaattagttgggcgtggtggtgcgcgcctgtaatcccagctactgcggaggctgaggcaggaggatggcttgaacccaggaggcagaggttgcagtgagccgaaatcgtgccactgcactccagcctgggtggcagagcaacattgtctcagcaaaacaaacaaacaaacaaaaaacaaaaaactaaattgcctgaaactggactggaaaaccatgtctggaaatgcattcaatcaactggaaattgctttcttcccctcgagcagaaagtaggaaaagtacttaacattaagtatttatgaagtttgggtttataccgactaatgttgagctccaaacatgaaaggacacatgctattacctaatcttctgtggctaaacacaattccaggaggaatgcactatatcatagtggaaagagcaaagcttggggtcaaacaaacctgggcttgaaagtcacatctctgatgattactagttggctaatcttgataggtatgcttcagctctctcagcctaaaatgttgaccttagtttagcactgtcatgaggattaaaagcctaggtgttttttaagcactctttgaatgttagatccgttctcttacatggcatgcataaagtgttaacatgaactcacagccactattgatagctttcccctcgcaacttcctttgtgacaaagataggggctggga

SEQ ID NO: 128754 - DNA, 1029 bp, Homo sapiens
atatatttacactttagtttttggtgtgcaggaatacagttagatttggacagctttagagtagttttgtcgtttgtgtgctagtttattttgtttttacaagggtatgtcctttgaggacagtccagaccaaaagaggtttaatacaacccaacacatgtttgaggatctattgtagccttaataacccaatgaaagacataaatgaagtgtttgaaagtttcccttcttctaaagaagtttgcagtctagacggggagaccaaaatatgccaatgtgaaacaactggagaagaatatttggatgcattatatgatgatggaagaaatataggctttgatgttgtggccactattatttgttgtctagcagaccatttacctcgtgtcagttgcctcagttttctcatgggcaaaaatcataaaatgatgttgtgcgagcatttggtgagaagtatctggcacaaagttctccctcaaaaagtgtgaatttcttaagctctggaccccacacttgtctttttttttttttttgcaagtagttgatgattttctctcaaagacacctaataatatgtttataaaataaagagaactgtaaaataaaaacaaaggaccataatctcactgcctggatacctattgttgatattttaaaaatgtaggtaataatgttttatacattagaaacattatattggaaatacatatattgtacgttatacaattcaaataggacagaaaaatacaaaatgaaaggcatcacacagaaacatcagagataacacaccagagataacttctgttaagtttctcctatatttctaatatatatatatatcacttcttcagtttgttctgttaacagtaaaacatgtgttgacccactgtagtatttatttttaccacacttgggagatatgattaaccattttacagatgacaaaagtgaagcatatatcgatcgcttaaataagtccaaattcagtcaggaaatagtggaaattgagtttgaattcaggcagtttga

SEQ ID NO: 128755 - DNA, 1003 bp, Homo sapiens
aaattttattgtaatgttaggtttggttttggaaaggaataaacatgagctctgtgatgacatgagggagaaaacactatagtagtttagtctttaatatttttaacagcctccttttgtgtcatagacaaagaatctttgggtagcttactataaaatattgcagtagataaaattgaaggcagttgcttcttacctttttatttttccccatgtcattgtccttgaagctactttggcttatgtttattcttctgatagctaagttttggtgtagccctgctcttgaggcacctaataccatgcatcattaatagatacttatagtaagaattgaataggattagttaagataagatgggttggagtctgagggctaggtgcagcctccccttacggggcttaataaaaccaatgaaacatacacgagaaagaaacattcagaaatggactttcagtttcttggtgaataaaaagcattatatcttcaagaaaaaatgagtagggtgggtttcctagggatttctactaaagcctaggagctcaggataaccccggggctcattaaaaaaaaaaaatcactttgatttcaagtaattgaggaaagttttaggtgttttgtttttgtgtgcccgttgtttttcttttaaggcttcatcagatgtctaagtttgctttcaccagagcgagttactgagttctcttctcgaatcttgttttgccagtttgttcaggtatctgtttatagaattaaagcagcgtgagggtaaacttttttttaagctgttttttggagtgtgtcagctccccattcaatttagacaagttatttatttatttatttattttggttttggaagagggaaaataacgtgatgtaaaattttttctctatcccttttgccttttcagtagaacaaactaaactgctggtaggtggcagatgtttggacttgtttattttttcttctttggtatattttcttttaaagtgaggaagcat

SEQ ID NO: 128756 - DNA, 1913 bp, Homo sapiens
agtgagccgagatcacgccactgcactccagcctgggtgacagagcaagactccgtctcaaaaaaaataaaaataaataaaaataaaaataaactaaactccctgatgccttgttaaagtgtgtgtatacacacttttttgtgtctacatgtatataacttattatatatgtcaaattatatgttgacatatatattatatacatagtaagtagacattgaaaagttctgatgccctcattctgataatactcatcaaccgtagaaaccattttgacattctcatcagtcatgttaataagatgtgcaggtctcctcttccaaatgcttgggttattctcatgttgactgtggaaatttggtattttcaaaagaaatgacatagaattacacttagttaatacatcttagctatttttttctaatgtcttgaggtaccaacttatgtttttcttctttgcaggaaaatattcttatttggaaaaagaaaactttttggataaatttttgaaactttgagcaagctatcaaaagttgtctgcctcctccttctccccagccccaaaatacacagacttaacaacagaaaaatataactgttatcctatgttaatttatgaaagcagataaatatggggtatataataagataatttcattatttaattcaatgaattgcttgttttagtgctctgtaagtatttgaacaagtaaactttttgagttaacacttctgatttctgatcttctgacattcttaagtacataaatattaatcctcgtatattagcccagtcttttttttttttttttttttttttttgagacggagtctcgctctgtcgcccaggccggactgcggactgcagtggcgcaatctcggctcactgcaagctccgcctcccgggttcacgccattctcctgcctcagcctcccgagtagctgggactacaggcgcccgccaccgcgcccggctaattttttgtatttttagtagagacggggtttcaccttgttagccaggatggtctcgatctcctgccctcatgatccacccgcctcggcctcccaaagtgctgggattacaggcgtgagccaccgcgcccggcctagcccagtcttttgtcatcagagtccaaggtcacatagctagcttttaagtaatggtgccagatttaaacccaatctggttgtcgtaaaatcatttggtctgtgctactcaaatggaaagttgatagcaatgagaaataaaatctgtattttgtgtcattttgtaatctgacgattcttactgctttctcaagttggttttctggtaataaacgtaactttacaaattttggaaagtacagtaaaaagtagggcatcatcttcccaccccaagggagctactagtgattttgacatattccctccagtccttctcttaggcatttaaagtaaaacttttttgtaagtatggtattggaacatttgcagttactagaatgttgggactatctggtcttttgttcagttgattgtttttataaacataaaaagtgtgattggaagtaatctttgaagaacctcataactaaatggaagaaggaaggatattttagcaactgctttcttatttatttattttttttttgagacggagtctcgctctgtcgcccaggctggagcgcagtggcgcgatcttggctcactgcaagctctgcctcccgggttcacgccattctcctgcctcagcctcccgagtagctgggactacaggcgcccgccaccacgcccggctaattttttttgtatttttagtagagacggggtttcaccgtgttagcgaggatggtctcgttctcctgatcttgtgatctgcccgccttggcctcccaaagtggtgggattacaggcctgagccaccgcac

SEQ ID NO: 128757 - DNA, 1199 bp, Homo sapiens
ggtatcaccatgttggccaggctggtcttgaactcctgacctcaggtgacccgcccacctcggcctcacacagtgctgtgagggtgtgagccactgcgcccggcttatcagcagtatttaaataacccttgtttctatgaatgtagtgatgagtttctatatacagttttgtgttgtgaagcctgaggggaaagtgagttcctggataagtcttgtcatatttattttgtgtttctagcactgttgcacagcacatattaagtgtttagaaaatgttttttgaatgaacagcccaaagactaaaggaagagcttccttagttctaaattctgtgaaatgagtcagtttgaatgaagctaatgtttcttttgttttacaccatttactatagagtgcagtacttcagttgttcatacttgttgatattgttacagatattctaatggttctttttacaaaatcaaatatatatacaagacattttttcgtttctttttaggttttggaaggaaggatgttgtagaacacttactacagatgggtgctaatgtccacgctcgtgatgatggaggtctcatcccgcttcataatgcctgttcttttggccatgctgaggttgtgagtctgttattgtgccaaggagctgatccaaatgccagggataactggaactatacacctctgcatgaagctgctattaaagggaagatcgatgtgtgcattggtaagtatcatttgatgatatctaaattttaaataaaggtttattcttactttttttgtggtacaaatagtgtttcctgagaataggtaaggaagggtttattgcttcttgtagaagcagttcttttccatcaaaaggtaaacagagagatggtaatctaaagttacttaggggaagactcacaacattaactttccaaatgcagtcaaatgcctattgatgtggaactcaattttaatggattactattgtcaaatttagttaatttatagtctcttttaaagactggacattttctatcctaccatcaatgagagccattataaagtacaaattctactgagttggatgacatttgaacacttgaggttgattcaaggaaactcatctagtatagtagtccccccgcttatatggggttttgagtgttttgaatacagtagttcagaacttaatcgtttcaatatgtgccata

SEQ ID NO: 128758 - DNA, 1061 bp, Homo sapiens
ttcacattttgctttgctgtatacaattttttattttgaaatctaaaaagcttctagagggcaagtataatttctcttgagtgtatcatctgttttttgatacttgagatgatggatgtttgtttagccatggcaggttgatttacgtaattgtcttcccagatgtcatccacttcagcataatcagttttttaatgatgcaactaaaatatacatgacattttaaaagatatagtggtggtgcttagtaatggttaagattattcctccttatagccatctattgcagcttctaatatatttttcaatattcctcaaattattgcaatgcctgatataaaactattttttaaaaaaatcacattttctgtcattatcctttgctacttgagcatccactaacatgacctttggatatcctgtcctttcagttttttgacatcttccagtttcaactgactctcccatttcctcctaagtctctcactaacatagccacatcctggaccaagtcattacataaaactaccttgagaagcttcaacttataacatcctctctctgactacaaagcctcttatgttacttgcttttgtaaatgataactattattgagcttggaatgtgtttcctacgtagtcttctaggctttcatcttctctgctgtaactgcttcttgcttcaccttgttgtcacagccactggatttttctcagtcattagtcagaattttatactgttctcactttcttaaaatattatcctttccaggcttcagtcttctgttttcctgcctctacatctgaagttttcattttatcagtcctttgaatatcttattgaaattagtatttctcgcctcctcctcttaatccctctttcaaaagtccataatgtaaatgctctttttatctaggttctattgaaataaaagactagatatggggcttgaatttttaatgaatggatccctgcagcactctacttcctcagttcacagtaggctttggcacatattgtcttcattctgtttaagttcttgtgccttataaaagttgagg

SEQ ID NO: 128759 - DNA, 1039 bp, Homo sapiens
actgtctatttatatatcatttataaatgagctaggttaagaaaagtcatttctcacaccttctttactgtttgcaaaaattagttgaaaattcagtgaagccttgaaaatctgattcacttggttttgtttcattaatgtctttccttttcctgccagaatacttcccttctgcatttttaccattagttgtccatataaaacctgaattggtatttttttttttttgagacggagtcttgctgtgttgtccaggctggagtgcaatgtgtgatctcggctcactgcaacctctgcctcccaggttcaagcaattctcctggctcagcctcctgagtagctaggattacaggcacccttgaattgggatcttttaaacaagtctcagtgtagcattttcataaaaaacaaagatgacaaaattccatacttgtatccttaaaacagagaagagaggcccagaatgagagtcattgtgcctttggaaataatctccgctgacactgagtactcttaacgttgatgacttgtctgcttgtgttccaactgctttcaggaaggttagagtagtgtgcatttacctgataaaattgggactgttttaacagttattctgtacaatagtggtagatatacacataacatatatatatgttatgtacttattaattgtgttttattagaattccaggaaaagcacccgtatggaagctttcactcttccaaggccttaagaaatacattgaagatgcttaaattaggtggaaaaagcaaaaaactagaaaaaaaattttcatatacttttttacagtgatgcaaggctttacttaatgcccaggtctgtctgtctaataaaagcattacacatttgcatttacttttagactcacttcaattgttcaaaacaatctatgggttaggttaggtgcagtgactcatacctctaatcttggcactttgggaggccaaagtgggaggattgcttgagttcagagtttgagaccagcctgagcaataaagtgagatcctgtctctacaa

SEQ ID NO: 128760 - DNA, 1143 bp, Homo sapiens
aaatgcagtttttattttttcccactgacgtacttggaaaaaaaagttacatgtaatgagacacatagttcactggggtgaaattaatttgttccaagtatgctagtcccagatgttgacagaattctgaattttgggtcacttttatatgaaagacaaagactttcatatatgaaagtatgactaaaaccctggaatttttgaaataatcccttcactattttactcaatttgtttctacagtcagcattattacagaatctaaattaatagatttatttcacatttgtcttatccattgctgttaccatatttaatgttagtcatttgataggaagaatgatccaatttttctttattcgttacaaagtaatttctgtaagcaagagcttttaaaaagcattgttttgcacacatattaaacagcatgcataaagatcatttttgtctgaggatcaatatcccattataaaaataacacatatatgtaataaatactaaaacagtgtagaaatgtataaaatagaaagtggaaatcccgtttatttcactttcagatataacactaaatattcctgttgttaaggtagctgaagtagtttttttatctctgttatgaacccatttgcacatataaatctatttacatatttttaaaacatgaactttaaatttaacacgtgttaaaactttgaatttaacatgtattattgcagtagctactcattgagatatctgcacaagtactctttgctgagaaccaatgcctctttccccatcatcattgtttgtattgcctcttctagttccttggccaaactttttaagtccagaaccagatgctgagccaagctggaccaaattctctttcatgataatttggaactaagattgagataatacaggcgtatgtgtttgtatctcaggggaatgtctgggagacagagaaagacagcaacacctgaattttgaggcacatttttgcctttgcgttcaatggaatacctctattctttaataaattttcctgttattaaggtagctgaagtagttttttatcctttgtgataaaaaagctctatttgataaagtcagtactcaaagatatatttatagaccacagcaccttaaatttagaaggat

SEQ ID NO: 128761 - DNA, 2603 bp, Homo sapiens
gcttgcacagtattataactattctgaggagaggaggcatttggaaattcagcagtaaagcagcgacagcaacaagcagccacagtggtagtaaagagagggcaggttcacagttagcatatttcacagtgtgagccagcgagcacatagcttcccatactgctgcttgaaggaggcaaaccaaaactctacattgcaagatttttctagtttcatgtttatgatgttaagtcatgtgataatattgtaccataagttgccaacttcatttcactctagagaggctcctttgctgcagtgcttttttgctttttttctttttttttcttgaaagagaaaaaatttgtgcaatgtatgtttatgcctacaccatgccgagacgacacttaccagtaaataatctctgtatccccgaggtaagatactgtttctgctttccctgcacagtgctgctgcagcacggagctgacccaaacattcggaacactgatgggaaatcagccctggacctggcagatccttcagcaaaagctgtccttacaggtaagaagacagagagctaccgaatgattatatctgtgtaactccttacttgattttataaaatcttgttatgctgaatttttcttttcactgatgaagctaagcaaatatatctgccattatctactactttattattgatttgatatctgtctcattaattgctatgctgtcgtaagcataagcagtaagattgttggtctacttagaatgatagcattaaatcataacatctttcactcgtattttagtcatttttatggtttatatcataatttttctgtatctcatcctctcagttgtttaagacctttactgttgagcaagcaagggcatttatattactataaaagtagttttgattggaaagacaacctgctgcctgctgccttatttcttggatcgatagtcaaataaaatatgccgctgcctctcccttgccaccccgtttatactttaatcatatgttttcacttttaccatgatagctaagttatttttaactgaggcgtttattatctttttacttcagataatgcaaatttgtggcttaaatattagttttattaaagcaaatgccaagaaccagcaaagaggaaatgctagaatggaaaaggtctctcataacaatatagaaaatagtgctctaagtgttttcattgatctgcattctcaaaatgctgcattggatctatttttgtttttattcttagcatctgagtcctgctgcctttgccctcttttacttaactgaccttcgtaatgagcctctgtcactgcagtgctaacagtattgttttaggttatgtgaaagtaaatgacttttaactaccttttaaatttgcccatggtcgaagaaaataaatattttgttcttgtttaagtttagagtccatggtgtgaaaatttagcaaaaatactgaggcgaagggaaaacgtttatgtacagaaagctttgaaaatctatggaattttgcttaattactctgcatagaaaaacaactttgcactgtgctaaaatcaatataattattgctcagagtaatatgacttttctcaatcaaagattagtgtatttagttgctggataacagtaacatacactagagtaataaacctacttaaattagtgtagataagaaatttaagtataaatatataattttaagtagtgaaattaaaatacatagcctcgggcctgctcagattctacagcctttcagtctcttaacaaagccctgggcaacaatagcagctttagagtggtctctgaccaaaggagaaatacagtgcatagtaacaggggtaggttataaatgctgagcaagactctttgtatatctaaatgtcctccctctgacgtttccttctctccaactctcaacacccgctttgtccatttgttagatacatttaatgcaacaacgcttttagatctactttcacttttttaaaaggcaaaatttaatataagttattaacaagaaactatatcctaatttgtaatgaatttcaggggagattatattggatgttgttagtttgggaaagagctttggaacaatcacttgtggagacacaagattcctggaggacagatatcacatctactaaaattgactttaaagccatctaacactgtactttgcttagataggaatatacgaaattcttggtcataatactgatttagagtcatttgttcttttcaagaatatctctagagtcatttagagttaattgttcttttcaagaatatctacttttttggaaatgatctacagcttttcagatgtgatttaaaaggaaaagtctagtaatatggttaattttgttggaatataaaccagttctgtttctacattcatgctatataatgcagtgaaataacacttaggtgaaatgtattccaaaatgtttttctgcccatacaggttctctaataagtaattctttccagtggaattatggtgaaagaattatttccagagctaaatttaaaagattaaacattaatttttttaaaagggtttcttttgaaaggaatgccttagagttat

SEQ ID NO: 128762 - DNA, 1069 bp, Homo sapiens
actgtgtacaagtatttatgtgttttccttaaaggcaattaataaagtgacaatctcttttttggttttttttttttttttttttgagatggagttttgctctgttgcccaggctagagttcagtggaacgatctcagctcactgcaacctccgtctcccgggttcaagcgattcttctgcctcagcctcccgagtagctgggactacaggcatgtgccgccacgcctggctaatttttgtatttttagtagagacggggtttcaccatgctggccaggctgatctcgaactcctgacctcaggtgacctgtctgcctgacagtctctttttatagaacatttacaaatatgtgactaataccatcttatacataagaatgcatgttttttaataaagctatacaaagcaacagtgtacccttaattttgcaattaagggaccctagcacatggccattggttttggatagcacacttggatatttaaatgagaagacttactcagagagactcatcatcctctttgctgaattattgtgtaagtgaatggtagacttagaagaaatcttgagggctttcttttgtttttctgctaatgactgaagttctggtcaataaactgaaggacttggaggtatttagatttttcgtttgttcattttttgttttaaataggggtatgaaaagtcaaaaacagcctatgtaaatgttattgaagagcagtttttgtgtgttttgattataaattttttaaagtaacatacttttggccttttctttctgattgtaaaagaaatacattcatttggaaattgagagaaacaggaaaaggatgaaaaagaaaaatcatttgtaattttgctacttagagataacattttggtgtactttatttataaccttttcttctgtgagcatcccactgtcttatttctctttaatcaaatcagcctaatgtgttataaactgcttaatagtacatatttttgtaatttagttacataaatgttcccaaagacattaagtacttttctacaacctgagtttataacaacttcacagtaccct

SEQ ID NO: 128763 - DNA, 2215 bp, Homo sapiens
tgaaagcttaatgatattaaaagctgaaacttataattagacctttgataagtagaaagatgccagacttcatgtattaaaatacaaagaagtttttacttctgtttaattcaaattcaactgcagtttttgcctcaaagttgtactttaaaccactaagtcagttgagctatttgaattttatgagtcatatgtcattgctaatgtcaagcttccctacgactgtttctccaaatttttattatttgtattttgaaaaatttccaacttacaggaaagttttaaaaaatactaagatgaatacctgtatactctcgcatagattcaccaattattaacgtatttcagggtgtatttcttattcttttccctctatatattttttcttctcagcaattaagcattaatacaatactactatttattggacaattcatcttcttaccgtttcatgaaaaatttcttcgcttttgacctttcccatcaatactaggtaactctttctttcagctgcttttgagctgcttgaaccctatcagagacacttagaaattggtatagcatttcacctctacttagctgtcacctcttttctacaggtgcatttcaatatctactgaaacatttgcttgttttcttttacttcttttacttttggtttaatgatgttactactctatattgttctttccttttttgagatggagtctcactctgtcgcccaggctggagtgcagtggcgtgatctcagctcgctgcaagctccgcctcccgggttcataccattctcctgcctcagcctcccgagtagctgggactacaggcgcctgccaccacgcccggctaattttttgtatttttagtagagatggggtttcaccatgttagccaggatggtctcaatctcctgacctcgtgatctgcccgcctcggccacccaaagtgctggaattacaggcatgagccaccgcacccggccctctatgttgttctttgcagagatagttgaatacaagttttggcattatggaaaatggtacattactgcttacattaggcactgaagaaatgcatggtgaaagtgttttaaaagttaaattaagattttttactcttccttccaaaaatgtactactaaccttctcagaggagtttaattcataggtgatccggaactggattttctaagtttacgattttcaacaataaaaatatataagtaataggttattcattgtttgtaattgcaaaatattggagcctgcctaagtgcccaaatataggagactggttgaataatctgtacaaatacacaatagagtattttacatctgtacaatagtgaagttctctagaactactgatggattactttctaagatacattgtttagtgaaacaaagtacaaaagattgtttacaatatgccatcctttttgtcagaaacaataagtgataaccagcctccaagaaggtgcccaatcaacctgtctcctagtattcacgtttgtatagtcccctcccacattgtagaagagtttttctgtgtgaccactagcatatggcagagctgatgataagccattttcaagatggtcataaaaactatggcttttatgttgggctgtttttctcattcacttggatcacttgctccggaagcagcaaactgccatattgtaaactgccttatagacaagcccatttggggaggtactgaagtctctggccagtagccagtgagaaactgaggcttgtcaataaccacatgaagattcttggaagcagattttccagccgcatttaagccttgagatgagatatgatagtccccatgtatagcttggcagcaaccttgttggaaatgctgagtcagaatcatccagctaaccattcccagattcctgaccctcagaaactatgtgaaataacattcattcttttaagttgtcatttccagatgtaatttgctaggcagaaatagattactaatacactataggaattaaggaaaaaaaactcatttaactgcatatatatatatatatatatatgtatatatattttttttccaaaaataagcacaagaaggataaaccagaaaacattgaaattgattacctataagaacgtgagaacagagggtagataagacattaagtagaccatgccattttggtataattttaatttctggaggcatgttaatgtgctac

SEQ ID NO: 128764 - DNA, 1020 bp, Homo sapiens
ggttagaaatataatcttagaacaggcttgacaagataaactagtttgatatccttatgattaagactcagaataagcaaataacttgcctaaaattttaaaactgtagtgtcaaagctaggactggaatctgtgccctttgacagtgtttttaactgaaatggtgtggagtgatttcatgaaggaagttatgtgtaagtttggccatatgtttgtggcaagattttaacaagtgcaaatgattggagcttagatcattgtcaacatgagcaaagacattcaggaaaatgcaaggtgtatttgggtaaaagtgagtgatgtagagttgatagtgtgtgttgagaaggtaaggtggaatagggaacagtgaataataaattgaataaatttagtctatatttttaaaggattttgactattcagctgtagggttgaacaccattttgtaagacaggtatggggactcatacatttatactattttgattattattattattattgaataggagaataaactaattaaagcagaaattaatgtaactgaattaagggctagagacaagggattaaggagtaatttagggattagctacaggactgttataggaggtgggtgaaagaaaaagtacataaataaattgtagcaataagaatggaaaaaagggccgggcgcggtggctcacgcctgtaatcccagcactttgggaggccgaggcgggtggatcatgaggtcaggagatcgagaccatcctggctaacaaggtgaaaccccgtctctactaaaaatacaaaaaattagccgggcgcggtggcgggcgcctgtagtcccagctactcgggaggctgaggcaggagaatggcgtgaacccgggaagcggagcttgcagtgagccgagattgcgccactgcagtccgcagtccggcctgcgcgacagagcgagactccgcctcaaaaaaaaaaaaaaaaaaaagaatggaaaaaagaaagtagggacaaggcattgtatggattataat

SEQ ID NO: 128765 - DNA, 1091 bp, Homo sapiens
atatatttttgaaagatcctggagcaaaataatacaggtgtgtctggagcccatgtttaagtatagcagagtatcagtctgtctgaatattgctttgagaggaagacctaactctaattcttgagattagattacttcctggtgctttagctgaattccttccacagccacatagctggtttttaattttcaaatctactagtgaaaacatgatggaatatataacctaaattaatattttattcttcatataggttgtcagtttagctacaagaatcaattcatctcttaatttgctggtaccttgatgagaaaacatctatatcagtgttatcaattcatggtactacttagcactctggaatataagagtccccacattaacctgagaattgagattctagactgaagtctttacatacttcttcccttgagatgcttgataagttcagaaattaaggtatgctatggaaaatgcaaaatggattcatcattggaatagacctcagtgaattttctttattcctgaaattcccttggcccaatagcctttgcttgcaagctcatctgtaaatttaaatgctttaaagtagttttgatgaacattttttgcttgttatattgatgtgattaacctagttaaagctaataattgtcattattttttaagttgtttgattgttattactatttgttactctctccttttgcttacatgtctttttccagaactcagatttgttagtttgtgctcacattttagcctagtgcagggcctgacagataatggataatacttagtgaaacctaagacaatctgtttaactgccttgacaccaatttcagatgatcccttaggagagtggttctgaaattggggttgaggtgacacggagaaagggtgactttcaaatgacattcctctacttttatataatgcaaagtgttactgataggtttggataccatgcataatggttgaaagagaaaagtcagaatttttttttttttttttttttttgagatagagtttctctcttgttgcccaggctggagtgcaatggcacaatctcagctcactgcaacctctg

SEQ ID NO: 128766 - DNA, 1136 bp, Homo sapiens
gaaggggcaaaagcacttacaatgttaaaattgagataagtcagtaatcatgacttctccttagtgatttaagttttcttcatttttactcaaaaagtaattttgcctttacactaagtgaaagagaagctgtttctgactactccagaaaaataaaaagagctttatttttcagctttgttttaataacatagctctttaacacataagcctcgtatttctccctctctctctctctgtgtgtgtgtgtgtgtgtgtgtgtttgtgtgtgtgtatgtatctttgcttctttcatatcattactattttaccagtaaaaacaatttagattttggaaagtaaactttttggcttactttcaaaaattccatttacttttattttaatagaaaatgttttaagccatctattttcttcattcctggttgctattatcttgactataattgcctagtttcctttctggctgatctattactagtctttatctggatgttattaaagaatataaatgctccatagagcaccatagtctcagccagaatattttcagattctcagctaagatgaaagagaactggtgctttggctgttaagtaagtagctcagatttgttatcagagtgtgaggggctctaaattcattatgttagctgttcctgggagctagcgtttgaaaaatcgcttcagctgtttatggattgtggtccttgggcaccagatagtggatgctagaatgtattgcagaaaagctgattaaagtactaggatctctagcaggaagagtagaaagtcatttgtaatacctgtgtctgactctgttggatgcacttaatatatttccttttgaaagctttggtttattatcagcttatccgggaaggaatagcatttttgcaaaaatgtgccttttggtgaaaacatcaataaactatgcttgatgagaagttcaggtagggagagactgatttgaactttgaggttcctaaatactttgcggttttattaccactcttattggagtcatgtttcactacgacttaaatttcaatagtagctacttttaagttcacagttttaatgtgtttttactgtctatcagggaatttatactttaaaatgtagactgtcagaatt

SEQ ID NO: 128767 - DNA, 1015 bp, Homo sapiens
gagagacattcatgatgtttccatttcttctctgtctcgtccatacccattcccctgtgagtgtcctttgcttcagatacacagagctacttacaaccattccccttctcctttctttcactgtggtagcttccttctccctgaccctgcttcacctgaggattacttgtccttccttcaaaactgctcaagtttcccctcttccaggaaggcttccttgacccccaactacccttccaatcattaatcccatttacactggctggtaagctctctaacatttcatacaatttctttactgtaatcatttatttatttgtctgtctcctttaatagaataatattccttgaggtcagagatgatagtgtctttcgcgttaaaatctggcatacaggcctattgaagaaatgtgactctacgaaattaatacattttatagatacattgcgtaatttgatttactttgatcctggttctgtagacatttgggggcatgggttatgccattttcctcacaaggagcttttaaagttgactctctaacttccatattgctacctaaaatgtttaacaaaggtaggtcttgggctttgggaaggcaggaacttaaatagatggaggatataatgaaatgacctttactctgtcagttggctaaaaaatctgaaatacaatttatgggaaattagaaagaccaactctatgaccatgaaatcatatattctagcttatattcttaaacttataactttattggtatacaaagttcttttaagagaaaataggtatttaacaactttttactttgaaaatacctggttatagttttcagattttaacctaatcttaatccaggaggcaagacaaaattaaagctaaagaatatttgctaataatgggttatagcatttaagtatgtatttggtagccttgagatgtctttgtaatatttgcatcaatattctgcattctttagcaaaacaaaatgcgaagtccatatttacacataagatt

SEQ ID NO: 128768 - DNA, 1377 bp, Homo sapiens
ttagtctaatgttttattatatgagcacttagtatttgctttcatgtaattatttgttgagatactttgtataattatttctttagtgatgtagcaaactaagtcagtgtattacagctgaatcatagtcctggctgttctttttatttactgaaggaacaaacactgtattattaacattccttgtccttcaattgagcttgcaaaagaaatttgtttgttagatcttgaataccctaagaaatgtattatggatggtttttaattatatttctattttcatcatttgatatatttttaaaatcttgtgataaaatagaatgggggaaaattacccatgtcgcagtagttagatatctgctcattctcaaagaccccaacctccttttaaaaaatattttaagatttattatatgttaaaattggtattgaatttatatgaagtattaagattacagcatgtcagaatattattgccatttaagaatgtattcactgttttggtttttggagcaccgcctccaagaggttcatggcatttggtacgtagttcacgtatttctagtctacagaccttgcctatcgagtcaaagccttcgtggttctgatatttgcattttctactgctataaagctcaacaatagtaattaatgttttttttttaactttccatgtcattaccaataaaacttcagtttttagaagactagtaatttgtacctttaaagagccacattattttgcttttgtctcagaatgtattatgcttcccaagtatactgtgacagcctgaatagagaaaaggggggaggggacattgtcttcagctggcatgctgttatcagagggaatgtgtttctggacacgagatttagcattcattggttgtctgaagaaagctatttcatctgaggattggacaagaagctgcgtcaatttgctgcccgtctccaaggcactggtgatgctgccttcacaagctggctaacgtcacggctccatcacccagcggggtgtggactctctttttctgttcttctctatttaattctctatttgctgcctactgcatttcttaatctgtcttctgccaaatgctaacagcatgatattttgcaatcatctaggtgaatacaagaaagacgaactcctagaagctgctaggtaagtgattccattcattttaagtgtatataatgcattaaggaagagaaggaggagggcaggtggaggactataaaaaatataacgttattgtcttgcttggattttatgcaattatgcagatactaaatctttatgtactttatatcattattgtatataataaaatcttttcatgtggtgatgattataaggttaattttatttggaac

SEQ ID NO: 128769 - DNA, 1291 bp, Homo sapiens
tctcgtgtgaaaaaattatgcataaatattcataagaagctttgtaattttagaggaattgacttactacctttttataggagtggtaatgaagaaaaactaatggctttactgactcctctaaatgtgaattgccatgcaagtgatgggcgaaaggtaagttattttaaatacaatcctctttaattgcaatgcttcaaaattttgtgaatgtggcatatatatatataagcacgtatacctacatggctttattttaactggcatcttttcactgtaaatgaaatgctactatatctgttattggcagttgtgacacattcatagaactggtgaagcatggatcttaagtaagccttttctcttaaatgtcagacacagcaagttatttgttacatgaaactgcagttttgtcggtgattaaaattacagcatatgctcttttctgggtatgataatggaaactggaaatatgagtgtcctatttacccatctttgttaagacatttgtgtttttgatttcttatttggcagaagaagatttgtttgctagataccaacactttttccattaaagctgagaaattgctgttaatgatttttttacatctatgtaacagctctgctcttttattattatttgtactggctaagttttagttgtggaatattgaaagaaaatagattaaaacagagaggaatattctatattaatatgcagttgccataaatgtaaggtaatatataaaatatacagctggcagcttcattatctactttgtattcttgctgaagatagactgaaatgtaatcctttatggctttggtaattgcagagttttgtagtgatttacgtaatagacattgaaaaccaatgcactctgtaccataaagttggtttttttttaaatgagagttaattttttaatgttaactaaaaacctaaaacatttttaaagacacattacaaaaattgaggaaaattgtatgtctgatatttagaaatgaattcttttgaaattatttacagtgaaaatgttacggcaaatatcaggatggatggtaccccttagaaataataaattattttgcttttaaaaaattacttttctgtgagtgataattttgcagatcagatttttgcaagcttccccactttttctctattttaatgaaatccaaaaatagtggcaaggaattgagtccctcggaatataatttacgttcatttgtttttgtagatagcttatatatcgttacatggcccagtgagtattttgtttctctgggt

SEQ ID NO: 128770 - DNA, 1528 bp, Homo sapiens
ctgtcacagcctcgttttcccttccttacccttctactttgacagccacattcctagtgcaataaatcataataattaaggaacatgatccctgatatttaacaaattctctcttctccctgcttcatctcctacacaaatgtatagaactcatttatttttccttttccttaaaggagaatatacttcctttaactagaaccaatgtattcctcatccaaattcttgtggctccttttctatattactctgtggcacttagagttccttaaagttcataaatatctttttcttttactcctctactagctcttcttgtattttgcaccaggaccaaggctggcactttgcatatagcagaagcttagaatagaactttgttgttccttgataaacataattttatcctctgagtgagaaaaacatctaccctttgccatttagaaaattaaatcagaagtatgtgaatgcgatattttatgttttttgttattattactaatattattatattaatttattttggggtactgttaacatgagggagaaccgtataatttataatgtatagaacatttttaagaacgtacctcaagcattattattgtaccaaaagattcctaaaatataaataatgcaataatgttccaaaatgtactcatacttttttagattatcagggtttttttcaaattaaattagatagaaaaaattaaacttaagcatttattaggttttagtgctatgcatataagaaataattaacaattgctcatctgtgtggtttgaattgaataattcctatttagatattattctcatttacggcacagagtaattcttattaaatgtaccagttgcagtaaagccacagggtgttaaatgttctgggtgctaatggagattgggacaagatcccttggttatgtcagtttgtttttattttcttcctgttgttatcaagaaaacaaatctagctgctaaaattacaagtatctgtcctagtagatatgtagtccttttttagaacatttctatgtgtttatttagaattagaaagtcagattgtgtattaatgagatgataaaggtactttttcatatgtagtaaatcaggcatataaagtttatttcctgaatttcattttagaacacagcgtagaagcgaatccttttttggaagtttcctaaattactgtattattgcttaactgagcccttttcttagtttttactacagttcctggtttgtaaatttaaaaagcccatgaaaatgttaattttgaaatgtttttggaaaagaaatgtctcttatacagtggttagtaggtggggaatttgcctagagatatgtgggggtttgagactttaggtttttttttaatgtaatatgtgggattatacaatgagagtgtaaattttaagtactcttaattctatactgtgacttgatgattatctaattaggtaatatgtgagaagttaatattttgtttcccaaagacaattgttttcctaacctttagaat

SEQ ID NO: 128771 - DNA, 1053 bp, Homo sapiens
ggatagaacactgatggcatctgcagtgaagtttatgtagagcccttttcccctttaagaaaggaagtgttagcattacctgggggtacatatctggctctctatggcctatagtgacctttatcaccctccattcttgccaaatcttggtagataaaaggtcataccagttttaaatttccaacttttatggatcctagctcagatgctacttgggattacaagaaggtcaaaatgcagtaagtctgcattagggaactcttcaaatacttcaggttcaattatatatctaatcaagtcacttcttcggagtacgtcttgctgagcaatgcatatcttactgtagtgccaaaatcccttagagcaagttttcttgcctccttatgttgggatatattgtataaaatctttatgcttatgtatattcattttgtaccaatgaggacttgaaaatgtcttttttatttttcattagggaattgcttctacgaaaacaatctctattttgtcaagcatgacatttctactggtaagggtaattagtaccaatgccaagtgcgctgttttctctgctggagaaatgaatttttagtagaaggggaccgaccacagtgctaaaaagcagcaagatgataaaacttagttgtccatttacctctatttagccactctcctagctttgaattgtcctgccttcctatccagaagcacaagtttcctgctgttttccactttagactgctcaagggaccggaagggagttggtactaaatcctttggccgtgagtgtgagtcattattaaaaatttagaagccaaattacaaatatgatacttcagcatctgtttttaaaattgttagaatcgaagtttaaagtgttctttctgcctttacaagtaaaccgaactttacattagtagagtggattacaactacagcagtagctggaaaaacacccatgtcacagaggggcaaaggaaaaagagcaggaagaaacacacaagacagcttctgtggtattgccgatgtcccatttctccaactgaatggatg

SEQ ID NO: 128772 - DNA, 1512 bp, Homo sapiens
gacgttaaaattgaattaagttggcattcagagctttattctcacagagattaccctatggatttcttgttcaatcttatctgctcttctcccttcccttctctttctcttcttaatacatacatttaaaataaagatagtcctttatattctcactttaaaaataaatttttggccaagcatggtggctcacgcctgtaatcccagcactttgggagaccgaggcgggtggatcatttgagttcaggagtttgagaccagcctggccaacatggtaaaaccctgcttctactaaaaatgtaaaaattagctgggtggcaggcacctataatcctagctacacgggaggctgaggcaggagaatcatttgaacctgggaataaatgtaagtaagtaaataaataaataaataaataatgtttactatttgtggcaacttgaattacagaaaccttgttttatatttcataaattctttagctgttaaaatgccttcctaaagatgagtacttccattactttggaagaacatcctttctgaggctatgaaatatcaattgctattttatctctgttcatgtaatctatctaggattcatagaatcttacttggatggggacttaatggcaactagttcaacctcccaatgcagtgttagaaccttcgctatgacagctctgacaggttctgcttaagagagagagagctcgcttgtttagatcagaccatatttggatttagtgctcaatttagggtgtcacattttaagaagggatattgaccaaccagagtgtaaccaagaaggtagtcagaaaattcttctctaataagcagttgaagtaactgcaggggagtttagttcaagaagagaccaagtgactgtctgttagagatatctagaaaaatcctgcactgggaaggaggcagaatcaattattctttccaatttcaatattgttattctttttttgtcctgctatattaaactatttttaggcagcttctgttatgaaggagttccacatttctggggcgcttatccaatggaacagtcacactgtcattattgatagagtttaatgtctactgacctatggatcagaatgctaaagttgtcagaaccaaggagatccctgcctgccaagagtaattcttgcccctcagctatattagtccatttctgaacatcctatctagaacctgagcccccacacaaaggaaaattagaaatgcagaatgagagtttctaagtcagactgcctggatttgactcctgactctgcttttaacttgccgtgttaatcaccctgttccttagttccctcatttgttgtgtggaagtaatagtgtttctagctaaggtagttgctgtataaacaagttaatacatataatgcacttagaaaagtgcttagtacatagaaaatgcccaaattttagctgttatttttaataaaatattggtatttaaaattttttgtatatgctatgtcattttattttatttagtc

SEQ ID NO: 128773 - DNA, 1042 bp, Homo sapiens
agctctaagaacagtgcttgaaagaaccgctgaccaagaggtccaggaccagagagaaagactcgtaatgggagagaaaacatacggctattagagaatctagtcatgtcatctgcagaagagacaaattggaggagtcatactttttgataaagaagtgaataaaacagcttttttcctttcatctcacctcgttaatcaatatttattttccacaaggtttctcttttaaattatcattctagtgttccaaaagttaagtaacttcaatgagagtgcctgatcttcattatggtactacttaaaaatccctttgaaagacagcattagcaatgaaatatatttatttccatggactcatgcctatatcgattctctagctgttaatttgtttagggttctcatctaaatatcactctctcaaagagctactaagctcgttgcttcttagtttcttagcagattaatcatgtctctgtgcctgatagaaatttaataaagctaattatgtgtttattgtattttcctaagaattccattttaatggctaatgtaatattttatttttagaagggaaacttattgatcttaaccaaatgatagatcaaatgaaatatgttttgataagacagagcaaaagtagaacattactaaataattatggtacagccacacaatggaaatactgtacagctcttacaaagaataagacagacagatatgtactaatattaagaggaaagaagctaatcatagaagaatataataacattcctatttgtgtgggaaaaaacagcaacaaaaagaactcagagagaaaacaaatacatgttcatatacatggaaaaatatctgaaatgatcattgtgcaactgtaaatagtgattacatttgggaagagggcttgtttggctggagggaaaaaataataaacgtttatattatagtattttctctactgtttgaatttttagagggaatgtggtaattttataatttaaaaaggagttattggggagaggatggtgaataaatgtaaagt

SEQ ID NO: 128774 - DNA, 1010 bp, Homo sapiens
attttcatttcagaaaccttaaagtaactttagtatctgaaatgccaggaatttgcatgttaattttggttgcattgatttttaaacttagtttggggggtgattcttttcatgggtgagagaattgacatttgctcaacctcaatttggaaattattttacctttgtcttccccacctcattataacaaatccacttttgtggccagtgctttcataaactacaagatatgatttttcaatagaatttttttttcttatgtttgctagataaatactagatttccttctgtagaagattaaagtatatttttagatatttgcattatctttttgagcaattgtattcaaagaactgattatattcatggtagaaaaatggcaagatcatgaattttttgtttgatactatacaaattattcttaaaactatccacgtttttttcttcaaatgcactttcggaaagatttatttattttctttgtcattgacacattaaggctcagctagagagtggttagtgatcgctcctaaattcagaatttaagcatatgtgatgcctgcatcacagaccttaaatatacctaattaatattcttacgtatatttgacacaaaagatcaaacgtttgtcagtatctgcataaaacaacattaaaggattgaccaaactgaaataggctaactatatgtacacttaaatacatgtctctcaaactagggttgagatagattcaagctacacggtgttatgctaggagatattcatagccacagaataaacctgacccacttttttggagttttcattttatttagttgaaagtagttttttatttttaaattttaatacgaatattaaaatgaagcagaataaaaaagttgtataaatattatgttaaaacctaaaatttctgagaatatttttctctaaactgcttcagttctatcattttcttgcttatccttgggcatataaacgtctcctgtagtgctgggagtacctctgta

SEQ ID NO: 128775 - DNA, 1022 bp, Homo sapiens
tgtagataccctttaaaaaggaaacataatcagatccttaaaggtaaaagttacacactttaggtaaatgataaaataactgcttttttaaaagaaactttaaaaaatgaagagaacgttttgaacatagatttttagaaaatgttcacttttctgtgattttgctgaaaaatgatataaatgaatcacccagccgtcatatctacataatttaaacacataaaaacagaattttctcacctgttcaaaagccttccttaatttggttttagggtagattttgaatctattcaaaacattgtaatgcagcacttcctaataacttcgcaagaacatcagtaaagatggaattttactacagaatttcaatgaaagccttagcataattagtaaattacattaaaattaggcattctgattgagtaggcatagttaacaatgcatttatttcattggctccatgaatctgtatgaaatctttgcaactaatatagccattcaaactaattatcaaaaatgaacttagagccacgtgtagtggcccgtaatcactcctgtaatcccagagctttaggaggcaaaggcagaaggattgcttgaggccaggagttcgacaccagcctgggcaacacagcaagacactatctctacaaaaaatttaaaaattagccagtcgtggtggtgtgcacctatagtcctagcgactcgggaggctgaggcaggaagatcacttgatcccaggagtttgaggctgcagtgaggtatgatcataccactgtactgcagcctgggcaacagagcaagactctgtctctaaagaaaaatgaaatgaacctaaaattaaaccctcaaattcctaatatcacaatttttataagtttttttaaatgtttaaactacagtcaatggatattttctagcataagtaattaaaatatgttttggacaggtaccatagcctatgccttaatcccagcactttgggagactgaggtgggaggatcgcttgagcccaggatttt

SEQ ID NO: 128776 - DNA, 2657 bp, Homo sapiens
aataaacaaaaattaccccagtattatattttataagacagtaaagtgctaaattgacatagatgttcagaaaaggagtaatcaaagtcttcaagaaatcaaggaagacttcttggagatgaggagacttatctacactggatctcaggagccataaaggcagaaagaagggtttctctgaaaagagcagcaagcacaatgaacgtggacttgggtctgactggagtagagggtgctgattgggatctgctggaagataagatgagtcaggtttgaccagattaagaacatgatgccagtgtttcacattgtcttaagcagtctcacaactagctaaatgattcttcttcctgtgtataataactcttcaaagctttaaaaaggaatgtttgaatcctcaaatcttttttttgcttaaatatgcttgtaattcaattaagatattataattagctatattacctaaattagaaaagaaatataatcaactactttgacagtctttgcttacatatgctgttgtctttatattctggggaaaagtttggtaaaaatccattcattcagaagaatttggtgagcatcctcattgtggcaagcagtaaataccagaccagagttgctgcctccatagaccagtctagtcgtcgaagggagtagcagaaatgggaaatggtcaggaaaatggtcattccgggaagaaagggtatgttgtaattttcagtaaggtgatcagagaagggtaactaaaaagaagatagttcttcagaatcagtgagcaaaagtttataatcaatatctatgagactttttaaaagctttgaaagttgatttttttttcataagaatgtattttctaaggtataaaaggaaactaaacaagatgctcaattccatgtgcccacgcaatgatttttcagatgaatgcactggacacccttggtcagactgctttgcatagagccgccctagcaggtcacctgcagacctgccgcctcctgctgagttacggctctgacccctccatcatctccttacaaggcttcacagcagcacagatgggcaatgaagcagtgcagcagattctgagtggtgagttaaaatagaccaacagggcattttatgttttctcttccatccctgctgaaatacacagacaaactttgcagtgtttactttgcctgaagtttttctcatgtcttttcttgcaatttagcctgtggacttccccatctcccttttttggtagggtaaggtaggtgtcatgggaaggaagcagatacagcttttagtttttttaggtttaaattgaaaacctgactcatgagtgttctgatcaaaggtgacttaaaactcatataaacagtgtggaattatggtagctataaaatctatcaaatagagaaaattataaatcattcatatggtaatgacatttaattaattgttcctacctgtgtaaaattctgacatacttttaaaattcttaacttcattgcattattataaaattatcttgtctttttctggcttaaatataattataggccgggcacagtggctcactcctgtaatcccaatactttgggatgccgaggcaggcagatcacgaggacaggagatcgagaccatcttggccaacatggtgaaaccctgtctctattaaaaatacaaaaattagctgggcggagtggcgcatgccttgtagccccagctacttgggaggctgaggcaaggagaattgcttgaacgcgggaggcggaggttgcagtgagccgagatcacgccactgcactccagcctggagacagagtgaaactctgtctcaaaaataaataaataaattatatatatatataaaattataaaattttgctgaatgtttcattgtctgcctggtatagtgttagatattttaaatataaattgataagaaaatagatactggcttcctaagtcccaaaactagaggaagtaatgcagtctacctactgacaaaatgaactagaatcaaaagtttagtataattaacctctttcctaaccttttaattttgtctgtggattatatctgctatggaatgaaatgacaaaccagaagagtaaaatgtagaaggctatagactaggagtcagaagtcctggttacttttttctacctacagtctggtagttcttaactctatcaggtacagtgcccgctttttataaagaatgtcttatgacatatccttatgacatttcagaagtgaaattcatagataatatgacctaactgtataggtacctttccaaaaatctatataaaacgccctaactagatcgggcatggtggctgacgcctgtaatcccagcactttgggaggccgaggtgggcggatcacgaggtcaggagttccagaccaccttggccaacatggtgaaacccccatctctactaaatgttaaaaaattagccgggtgtggtggtgcgtgcctgtaattccagctactcgggagcctgaggcaggagaatcactggaacctaggagacggaggttgcagtgagccaagatcgcgccactgcactccatccagcctgggtgacagagcgagactccatctcaacaaaaaaaaaagaaaagaaaagaaaaaaatgccctaactataatataaaggg

SEQ ID NO: 128777 - DNA, 1119 bp, Homo sapiens
ttactctaaatagcaggctataataacctggaagtagctgaatatcttctagagcatggagctgatgttaatgcccaggacaagggtggtttaattcctcttcataatgcggcatcttatggggtaagcatactaacattaaaatctagaaaactgaccgcacgcggtggctcacgcctgtaatcccagcactttaggaggccgaggaaggtagatcacgaggtcaggaggtcgagacaatcctggctaacacggtgaaaccccgtctctactaaaaatacaaaaaattagacgggcatagtggcgggcacctgtagtcccagctactcgggaggctgaggcaggagaatggcatgaacccgggaggcggagcttgcagtgagcccagatcgcgccactgcactccagcctgggtgacagagcgagactctgactcaaaataaataaataaataaataaaataaaatctagaaaacttccctggcatttacgactttattaaatgcatactatgcattaagtaagtagatatctaactaatagcatgatttagcataattttaatcttttgttcagagttttggtgtatcttcccggctaagcttaactaccttttggccaacagtcatgctttttattgctttttggtctcagcacgttatcaagcacaataataggcatgtaatgggtgctcagtttatatttatcaatattgtaatataatatatataatgtaaaataatataataaataccaatttcttaattctacctcaagtatattttaaaaactagaaaagctgtgcagctgttatacaggcatggaaagtatgttggcttacatttatcatcagcaccttaaaaatattcgagtagcaggcacagtggcatgcgcctgtaatcccagccattcgggaggctgaggtgggaagatcgcttgagcccaggagttcaaggccaccctgatcaacatagtgagacctcatctaaaaaaaaaaaaaaaaaaaaaaaattaaatggttgagcagttgatatatatggtttcagagagtaggaattactagctaaaacctccaggtgaaagtccagagttttggacatgaagtccttgcccacgcct

SEQ ID NO: 128778 - DNA, 1004 bp, Homo sapiens
ataaagcctctgtacaattaaatggctttaactgaagccaagcatgtttctctttcccctacttcccacctttttaaaattaaaagcttcccagtctttttaggttgtatttgtcatttaaagcattttgtattgcagctggattctgaaactaggttaaattgtctgtttctcctggaaacattccaacagagatcagtttcttttctggaccttctagttcaatactttgctcttatatactgtgttgaatagaactgaactgctatttattggatttgtcagccttaaattccagttactatttttgcctcaatggtgtagctatttaaaagaattaaacagcttaagaactgtatttttagtctatttgggtagtaatatactccttcctgttcattgttctttcagacatttgtcagaaaatttcacaagcatgtagttggtttgtccaagcataaactataacttcaatataaagaaagcttaataatacataccagatatacaattcattttatacacacatacagaaacaggtaattttccttggactttttgtaattttggaagcctgtgtaaattagtctaccagattatattattcggcctgtaaacatgggagttcaataaaattaatcatcagaaacacagtttaagtagcttgtaacctcactggggagaagcttgaaattattccgtgcttttgggttaacttaacaaaaattgctgccttttttcaacatatagcctttgaataagggagataaattactaggtttggttttgttttaggtgattttgataataccacgagtggtacctctgttttcatcttttgtgttagaaaatttaaaaataattaagctatagaattaattttatagtgatattataatcccagaagaatcacaaaacatcctgttctgagaagacttagtctgattatgctgcttatttattttattttttgtttatggggttttttgttttgttttgttttg

SEQ ID NO: 128779 - DNA, 1066 bp, Homo sapiens
gtttatgaataaatgagctaaattaaagtgtcatccctttgaaatttcaccagatgttaattgtacatgaaattattaagtgtgaagtaaataaccagattatagctgtttaaacgtaaacaaaatatagtaaacacagaaattttttctaaagaagggtgacagttaacactgaaagtgcttttttttaaatgaaagaagaaatatctttaaaaattacatagtttctccaattctgtctactgaaactattgaaactctttggagctgtggataggagaaggaatgatcaaaaaccagtaggtgataatgaggcattcattaaggaaaaaatccacaaagtatttggttatcagtgaaaaacttaccattttaatatatagtattttcatggtttttgtttttaatcatttttttaggctgacgatatcagagctttgctgatagatgccatgcccccagaggccttacctacctgttttaaacctcaggctactgtagtgagtgcctctctgatctcaccagcatccaccccctcctgcctctcggctgccagcagcatagacaacctcactggccctttagcagagttggccgtaggaggagcctccaatgcaggggatggcgccgcgggaacagaaaggaaggaaggagaaggtgagtagaccccatgaatgcttatttatttataccttttgttagtggagcagaatgacttttttctattgataactattgaatgcctcaattagagacgtcctgtctgtaaattttcatacacacaacatcttacaagaaatatttcttcatagaaggctgccacgtttcttggcattgtcgttgttcttatttctgtatattctagagcatctgtttacaaccatagcatcttattgaaccacttatactgaaattgtgtcagaacacaactgagaggtcatttcaggaatgaaaactaaaatgatagctgatacatttagattttttaattcattaaaagctttagatgtttctatataagtagcattctgtagtataagaattatactataatgttaaaattagt

SEQ ID NO: 128780 - DNA, 1061 bp, Homo sapiens
gtcagtaactgacttcctgtggcgtatttatcacattttattgatttgaatagtttaatagtttagtctcctagtcactccttctgacagcttgtcctggtttcatcagtttcattgttctttttttactgcagtttcattctgagtaaatggttccattggttttcttttagccagaataatttctatagccttttattgatcaatacatagacgattgcatttaatgtatattaccaagcacagttctttccctccagacaggtgatactacctttctttgtattgaactgtgtctggcccaatcatcaagcaatcaaatttatttttattttaattgcaaatgttatttatctagccttccattataaataaatttgataaccttttccataactttaacccttagcattttctcccattaacattctatatcagtaatatgtgatgatggtcaatgtatttgtatagtcggggaggagtgagggtgcatgcattgaacgcatttaattcatatctgtttggcttaagccaggggagccgttgttttctgatgctctttgacatgcttctatgtctcattgcctgtgttcctactcatggatgccagtggggtgtggaatgtagttattttatttctggtcccagaagaaaaccttcggcacatcatagcctcacctcctatcttcacagttactctcttggaagtctctaaactaaattgtcctgtttcccatagatactttgccaagttctatgttgaataatatagtatcctttctagttaatgaaatatagtacccatgtgactttggcccttcctttataacatagctttgtacctatgaacataggtaggaacactttttatatgggaaagacagattttatttacactgcaattcctagaacataaatgctatcacttggaagactgcttgtggacatttttatggttaacctatgtattttcatggaaagtgaccagataaattttgatttcaaattcttgaagacaaaagcatggcctcccataattcattgtgaacttgattataaag

SEQ ID NO: 128781 - DNA, 1329 bp, Homo sapiens
ctccctttcccccaccgttcatttctactccctgctggatactaggatctggtgttttcccattttcaagctactgattcctcctctatcttgaggcaagcagtagatgatagaacaaaataatctaaaggaaatatagtgatgatcattttgtatttctatagtattgtttctccctttttaattctcatggacaaaaagcaaatcaaagagtacttcaagtaagcagaaaagctgatgagactatcaagacaactttaaaaaaattgtaagctcatgtttataaagggaacaaaagaattttcttaatttgaatggtactcgtagcattgaaggcaattggaaaagcttttgtcctcttaagaactgttaaagatatcctagctaattttgtttcatttttcagattacactagatgtgttggctgatatgggtcatgaagagttgaaagaaataggcatcaatgcatatgggcaccgccacaaattaatcaaaggagtagaaagactcttaggtggacaacaaggtaagctattcagaaaaaaaaaaaaatttcagaaatcagtggtacaaggtaagtattggggctgataattgaactcaggcagtccagtcccagaaccatacactgaactattgtacctcctgtcccttccccatctcagttattggcctcatgctccctctagctggaaaaatctgagtcagtcttccctgtctcccaacactttgtatcctcaatttttctggaatctctgtacttctgtcctttcccatgactgtcacttgatccaagccaccattctctctcgtggactgtcccagccacctggtttatctccagcctttacatttgcttcctgcttccttccagtaccttctctacaatgtgaacacaatcttttcaaaatgattatatgatcatatcactccattgcttaaacccctgtaatagaatcctgtttcttttaggatagaatcaaacattgctaacatggttttttacaatctaacctttcttaacttgaactttcctccctcccacatgactgtcagctttgtctttttccattgtactttgccgttacaagcctctttcccctctgtttttacccatttctctatttgttagaagcaccttcactataggaaagcaaggaaggagaatctacagagctaatcaaattataaaagagtgatgtgaaattcaaactggaagattttgtgcttgagtcttgcttatttatctgtattttagttcatccatgaaactaacaaagataatgtgttttaaagcaattgtaagtggctatttcaagccatcttac

SEQ ID NO: 128782 - DNA, 1406 bp, Homo sapiens
tcaatgtcccctggtctgtgtaaatatacttagagatcccaagctgaagactattgagataatatggaatatttcacctacagaacaaatattttttaaaaattgtttatttttagcatttgtccaacgggcatttaaggagtttttgtttgacttaatcagagtgttagttcttcttctcaataagataagatagtaattgtagatgacttaatgtgttttttaatatgtttccccattgtgtttacagaaaactctttcagaacttttatttaaaagtaaatagaaagtgcataaatttaatatttatgtttgaaattattttctcaccaaaaatacttatccactaaacttgttcatcaatttatagtgaactcctatttatttattaatactgaattttagactcatcattgtctagaattacacactgggatgtttttataaaattagttattttgttctgtagatgcaaagtactattcgagaacacagagatggtggtaatgctggcggcatcttcaacagatacaatgtcattcgagtaagtttttaaagtttcatggtgaaaactggattgcaaggcttgcctaaaaaccaaatctagacaatgaaaaaagtttattaagtcatattttcaaactgtgaaagataattcgtcacctgtctgaagtcagatagcactcttctcactacaatatctctaactccccaagacaatacgtcactaaaaatagagacattctgaaagcgtcaaagctacaaacaggaggctaaatcagcttctactagtgatacttacgtggatattggtctccctgctcatgcacaaatacaggccatagctgacaataatgttttttatcatttgagagttgcatcaaagtcctggatcttcaatctaattgaaccagtaattacctcagaatacatatatttcttaatctcggtatctcaatttataatatggaacagatgactcaagctttttacaaaggggtatcataaagatgaataaaacctgtagagaactggtttaaccctttgagttaacagacctgtaaaagttatactggtacacatcagaataacccagggaacttttttaaaaaaaatacagatttacagatccccatctcctaaaatgtattaagtctggggagatgcctaaacataacctttttacctatttttttttttaatcctgaggtgatttagaggtaacagccaggtctggtatagaacaacaaaaactgtaactgaaaattatgtcactaacagctagagtattttctgaattacactgacatggtagctttatcacttttaaattatgtcttaagcaaaataaaaattgaaccttcctaaaaggaaaacatacttttcattttaaatcataaatgcac

SEQ ID NO: 128783 - DNA, 1051 bp, Homo sapiens
gcgtggcagggacggtggacgtctccctgggcctttgcaggagtcagtaaagggaaaaacctacgttaaattgactataatacggttgtgttaaaaacggcttgttttgattattttgttcaaataattacttcttggtaccagctttctaatgtatcacacatcagtacagactttccagtgcatatacagtgaaaatacttgatctaaaattattttagtacttaaattgcaaattgagccacctagtgaattacttttgttgtaattttgtactagtacattattatgtataatagaccttcttagaaaatacttttcatttatacaccattcatttcttaatattaacctgcccgatgcaaatagtgtgcaggtaattgagcttctagaaaagtgttcaaaaacgaatctttctgtcttcgtatttctaggttctcctttcattaatgccattattcataaagggtttgatgagcgacatgcatacataggaggaatgtttggggccgggatttattttgctgaaaactcctcaaaaagcaaccaatatgtttatggaattggaggaggaacaggctgccctacacacaaggacaggtcatgctatatatgtcacaggtaagcatcttgccattagtgtaacgtttcccacccctaggtcacgaaccaaattgtcttttttttttttttttttttgagatgaagtcttgctcttgtcacccaggctggagtgcggtggcacgatcctggctcacgcaacctccacctcctgggttcaagcaattctcctgcctcagcctcctcagtagctgggattacaggcacctgccaccacgcccagcaaatttttgtatttttagtagagatggggttttgccatgttggccaagctggtctcgaactcctgatctcatgatctgcccacctcggcctcccaaaatgctgggattacaggcatgagccaccgtgcccagccccaaattggtttatcaggctctgcagaagtcacagattatcctcagtcttgcatcccggtaaatcccgttgg

SEQ ID NO: 128784 - DNA, 1033 bp, Homo sapiens
ttttttttttttttttttttttttgagacggagtctcgctctgtcgcccagcctggagtgcagtggcgcgatctcggctcactgcaagctccacctcccgtgttcgtgccattctcctgcctcagcctcccaagtagctgagactacaggcgcccgccaccacacccggctaactttttgtatttttagtagagacgaggtttttaccgtgttagccaggatggtcttgatctccctagcaggcattttctatggccgattcctaagccataccaaaactactttaaactttaagtgtaactattgagtctggtaactgtttatagcaaatcattatatcaaattccatcccattcctactcataaatctgaaaatgacatttaaattagcttgccttatgttaaatttttaaaaaattaatagatctagcagttatattattgtaagatttaaagcttccttcaaagcattgtttttttctttttccttagacaaatgctcttctgtagagtgacccttgggaaatcctttctgcagtttagcaccatgaaaatggcccacgcgcctccagggcaccactcagtcattggtagaccgagcgtcaatgggctggcatatgctgaatatgtcatctacagaggagaacaggtatgttactcatcaaacaagcataaccaagttcacaaacatgtcaatagagcacagagaccgtgtaagacttgagacacttttcagtgaaatatccaccacacagtgtgctagtattaattacttcagatacaaaataaaggtatcaaaataattctttgacatcaactttttacctaaaacccattagtagctgtcagccacataacacagtgtgaacaagagggcagctgagaaacaaaggcttgggccctcatgccgttttgaggcctgcagctctgaactaatgccttgtgccacttcgtgggcagcatgccagggcagctgctgttagtgggtcttcatggatgtacatgccacaggatttgtccaaaaacaaaaaca

SEQ ID NO: 128785 - DNA, 3216 bp, Homo sapiens
cttatgacacatggctctctaataagggatgaatggagcttaattgacagtattcgaagtagaaataacattcagttttctagattgtagggtttatacacatttatttacagttaagtaggtgaacctcaaattgttcaggcacctattaagaaactgagtctatatagaatattggtcacgattaacagcctttgaggcttccacattcggcaaggctttaatattgtgcctactagaagggtgatttgtttttcttcttgtccttcccaggcatacccagagtatcttatcacttaccagatcatgaagccagaagccccttcccagaccgcaacagccgcagagcagaagacctagtgaatgcctgctggtgaaggccagatcagatttcaacctgggactggattacagaggattgtttctaataacaacatcaatattctagaagtccctgacagcctagaaataagctgtttgtcttctataaagcattgctatagtgatgaatagtatgagtaactgatacatactcaactgctactgttccctttgaggaaatgtttacaggggcggccttttaacatatctcaggctcattttcattgcaattatccatttctaaaacaagattgcttcgatctagacttggaaatggaaaataagaaaaccaatgctttttcaaatgttcacaattcacacactacatttgttttgttatgcatgacgtgtctataacaaatatacacatacgacaggcaacaagcttgtttttgatttgccagacatgcatcattggctattgtttgtttgttttttgtttttttgtgttttttgggttactttgaaaatgagccagagccttcttgaggatattttgcacaaagtcacgctgacaaaatcattagcagtgcaacccaagcttctggctgagcaagattcagtttccactttttaaaatttttttattttgctctgtagctgcacttctcgttatcataaattgagatgaaaaggaaaaaacatcaagttttagtacctttttatgaattggcctatcttacaagagaagggcacaaacaccaacctgacttaggaacgcctaaattcagagaagtcaaagccggtgaaggccacttgctctttccaacacaagcctgccacagaggtcttcgggacagtactggagatgcaggttgacacgggcttgagttccaaggtgaaaaaactggggaggctgtgaaggaagagctgcattaaggagggtgaggagcgtgtggttctgtatcatggcagccccaatggatccaggggatgcctccaaaaaatacatgcttcccttcccttaatctgtactgttgggattgttacccctccaaattagctgccttatttcaaaagtcagtgaaattactgcacttgatgagggtcacaaaaataccacttgattgtttctttagttgagaatgctgggattcagactcgaatagtggatagatacacacaaatgcaaggacttttttgtttactccagatttggggtttattttgagtggcatgcttcaaatagttcataaagatccttgcattaaatttctgaaccatttcttcaaacttcttagtgtgtttagacaaggagaacaaaaattgaaaccaaagccctttctgttattttttcaatgaaggtgagaaagaaataccatacaattttctttgtgaaattactgtttattttcatcaacatttaccaagtgccattgacatttataaaaaaaaatgatcctttatagttcttacacttgcccttttcaccttaactgaatatgaattgagtgcactaacttatttacttgatatactgtgcatctactctgctttgaagcgaaagaaatataaacacgaggaggaataggaaagacagtgtgacacaaacttgccattgcaattcaaagccctgaaaacgatgggtttaatgcaaggtgattaagctgtgacctcctttaatctcctgaagcaaaataaaatggttacatgcaaaacttctagaaatagactcttaaaatatatacattttgctttgattttggcttcaacccagtgctggaactaggcatccagactagtttgaatgtttgtagctgaatttttatgggtcctcaaaattaaatcgagaattagcctcagttgttgcttcttttgaagtttcagtgacccaagctgggtgtttgtgtcttggctacttgtttaatagcactagaattccaggtgaagctttgagagttgatattcattaagagggctttttttccccttctttccttctcttttgctgtaacaaagggttgaagaaattgccatctgtgtagttttcagtagctgtcaagtgtgtcttacttaccttcccccagacgtagtttaaaatggtaaacacagctgtgatttttagttaagtaaaagagttaatatgatatagatatggaaagctttatggcttcattaaaaagataaaccactacctaactgtggttgtatgttgtttccatcatactaactagatgaatggatgcgccagttttcatcttggtccttacacttgagaagttaaactgtggttcagtatttaaactgccagtgttatacgtctcatgctctgtgtgccaggtgaaggtactgtgtaaggaagacatttgcggtgcttcttgtcctataatgattcaagtatatagtagttcttgaaagagtgtgcatatattactcatctgcttaagagagtgggttaatggatatatcagaggagccaaatacatttttttcagaacttgaaaaccaaaggtcatcatgagtgcactcaaaagttaggacaagtttattacatttgggattttcatctgtagccgtatgaagaaccctttccaatataaaagcatggcattaaattaggctgaagtcttttattttttgtatatgtactatatagaaatactagcaagttaggatcatccaatatggcctaccccgaaatggcccctctgtttccctaaccacatggaagaaagaatctgaacgtctccaccggctctacccgagttccaaaactaaagggcttctccagacctgatggttccagtttacctgctgttggcctgctggatacttgactcaggcataaattaagtgccctggtcccgaactttctccctgtatttgacctccttc

SEQ ID NO: 128786 - DNA, 2968 bp, Homo sapiens
ctcctcatcttgggtcttaaaaaaggagaccagatacctcctagcttttgtatcacaaccaggaatgggtattaggcctcatgcgctttgctcagaacactgccgctttgttaacaaatgacagcatggaacccagagttttgattcgatgcaaaataacagcagtgcaaccaggattcttgttttccttttccttcttggagtttggaatttctagcttttcaagcagcataagtagaatcaacattaggatgttttcatgaaatagcatccttatacttctttgagcttgatgttagtggctagactgatttccctttgctctcaaaatacaaagtgcattgaagtatacagagaaatgcctgaatatggcaagcaaataatgtagattaacattctattattgtatccgttttacaaaaaataaaattttgatatatgccggagaacggcattagaatgcaataagttgtctaggtttttctgtttcagtgtctctcccaatggcacgaagggttattgggcattgtccccacccccgcctttttaacatgtgcactatctggattcctgtaaatggccttgcaaacagaagtggtgtgtattttcaagcacctttcccccattgtatccgaatccctcttgtgtgatatctgtgacaaatagccttcttcttgtgttttctgttggactaattgtctcacgtaaagctatagaccttactaatttggcaggtattcaaaactgccattaagataggatttcatgtcagatacgtatttaaagagtaaagtcaaatttgtttaatgtcagatcagtgacagaagtgaaaagaaagtaattgtgaaagtgatgtttgagctattgtacacatctagcatatggaaagcaaatgcactcgaaaactactattctagaacatgaggcttcttcagcaacttgtgcactctgccattaataaattaaatttttcccctctagaaagccttaactatggcggaaactttttaaccttttatattttaataaataaaacattgtagtcccatttcttagtgtttgaaaggtgtgtcagtgagtcggccatgtctccatgtgtttcagacctgttcatcttattttatgatggtatatttcataagtaatattcccttacatgcaatggagctgattaaaattaatccatttcaatttctccatattggaacttcctcagctaccagatttctggtttggagaagtgctggaaagatttcaaagcctattcagttgtgtatgtggggatacgacagcaactgtgataccttgtagaatatgagtgatatgcaagctgtgttttttaattgttttaaaatgtaaattatggttatgctaaagtgaaaacctagaggaagctaatgattttatatactttgcacgaccaaatatggtcgtagtatgacgagttttatacattgccagagagttctgcctcctctgaaataacattcgcactgtagattgcatttcggcttttcctcctttcacattcttttttgctttacacttcacgtcttcgcacctgccctacctcccatcctttcaaagaggtttctttcacgttccagaattcagattgttctgtgatttcttttacatcagtctacccatttctgcaggcagccctgaaagcccttgtgttgattcagagtgtttgcagagaaatgcagttgaaccctggtagtggggtgtccctcacacacccgcgcacccctcccaaagttcaggatgaaaggctagaaaacccattcaaagttaggaaagaacacagatctttgaggccgatagcctagacctagaagatgaccttgagtatgtaaacattgtctccgtgacacaaaacactgaaactcttcatgtgcatataacacctgcttctgctcccattgtttcaagctcatcttatctttgtagtagtaatgtttgtctttgatacctacaaactaaaaaggtacttttatcaaggtttctcaaaacatttacaaaaccagctttgagaaaatgttatgttgcctggcaacagcactcggagtagtaattgtgttttctcattgtgatgttggtctgtgtgagcaaccagtgtagtgactctttggttcattattcgtgttgtttttatttttagtctctgtgtgacccaacagtggcaggggttacaaccccctctcctttcttttttgtatttatctatttgtaggattgtcagatcaagtacaagatgcccagttaagtttgaatttcagagaaacaatttcacgttaagaatgtttcatgcaatatttggcatatatttacagtaaaagcattcattatttgtctgaaattcaaatttaactgagcatgctggtttttctcattgtttggtttttctaaatctggcaatcctacagctgtggtcatgggaaatcacctacagcatgttaaagtcctctagtcatcatctcgtcacctgaaatggaagtcctttttccctcaccctccacttctttccaaaggagggcatcaaggaacttaacctgcctgcctggtgggtttctatttaagacatctttgtgattatatttaacctgcaattgtgctttggcttaatgtctagctcactgtacttgtaaatgattaatattcaataaaaccatttttaaagtacacttgtgtggatagcagttagctcttaagtattttcattttgccctgcttgttcatttctgcctgaccaaccttaacacaactgacttgaaaaactgtcagaatacaaataccaaccctccctctccatcttccagtgagacctgggttttaagtgacttatcctcacgtctcagcccacatggcagttactgaataacttctgcaatagcacgggcaacatgggttcctttcagaaatatctcttaaacaaacaggctgacactttagagccagacctcct

SEQ ID NO: 128787 - DNA, 1055 bp, Homo sapiens
aagaattcccttatttcctagtgatgccatatggtagactatcaatgtacactagtcccaacttggagtatggcaaacattatttttaagtatcaataaactgccagaaaaaagttatgtgttagctaaatgatatcctcaaagtaagatttctgaaatttataggcactgtgaaaagggattggcaggccagggctgctctgagcttcacttgccagagcttggggacaaataggatgtttcagaatacccgatgactctacagactgcacgcctcctgcagtcgttgaagccccagaggcttcgtgcaatctctgggctagaaaaccacatgcccaggtctgctcttcatcatggatggccataactttaaatacacgacggtaatttacaatcaaacacatccagatggacggctcccccaaagccaaatctatacccaggacgcagatttctacaggaaaatgcagccaagccagaaaaaaaaacaactcagggaacaaacagtccctaccactgtaaagccatggttccctctgctgctccgaatggagcaccacatgaaggaggtgaggaggacagctgccaggcgtctgggaggacctacaatcagataccaaggcccaggaaatgggcaaggggcatgcatgcggaagacagaagtgacagtggggagggcagacatacccctttctagtcgtcgttaaagtatgagggcccagccttgtacacccctgaggccccactgcgtggagagtcctgcagcatgggccaccgttccctgggttaggcccagcacctcgagaagatggaccacggaggatgcctactctcctggaagccactgcggctccagcttctcccagcatggcagaccaagatcacaactggttaggttgctccaaagtggccagcctgacgggaactgccttgtgctaactagatttgtaggaggcttcttgttggctgagatgcctgtggactggtcttttttttttgtttttatttgagacagtctcactctgtcgcccaggctggagtgcagtggtgccatc

SEQ ID NO: 128788 - DNA, 2043 bp, Homo sapiens
agtgcacatcctgcagactgcaggtgctgggctgcctctggagtcccagaaggcaagcttggctgcaggacagaaagggagaacagcttctctcacccctgagccttcacaagcccttgtctatttgccgttgccttcaaaatatacctcccccgaaaccagtagctttctgagtcctggtgtcccctccgccctttctggacaggtttgggaagaagaaagcagtcagtgctgggccttattggggtgtgaagcgccttgctctgccccttctgctcactgtgaaggccgctggatgcttctcttaggcatggtttaagcctccgattactaaaccccttgccccacaaacgtccacattgacgagcctctttttagtaactgcttccccgtaattccttcagaggttgctgtacccttcgctgatgtgctgccctcctgtaaaacctccagatgccttcccacgtaatgcccctttcagatgctttaagctgagagcttaaaccacaggtaccatggctgacgcctgccaggtttctgctgcagataatctatgatgggaggggcatattttttacttcattacttatgtaaactcttgttccagaaagctttaatgtgtgtgggagtgttctgggtctattaggtctgtgcgcatgggtgtgggcatttgcctgtgtccaccgggtgggtctcattatgaaatgtatgtttatgtagggctttaatggctgaaaatggcaaagagatgaatagaccacttggccccatgtgtaattgccaggccccttctgtgctcaaatgaggtgtccgagtgaaggtcagcccttcccttctgtatttggggcctatttatgccaccagtaattttataagaaatctgaatagttctcccctttgagtgcatttaactctttagtatcttctctcttacctatttgagcccctctagctacagtctggcttaaatgaaaggggaattatatgcttaagaaaaagtaggacacggttgaggcagtttgctgactgaatacgcgaagaaggacctgatgggctcatatgcaccactgccatcacagtccccatcgtgatgcaagcttatatgattcttgaggtaactctaccagatacttccagatttagaaatgtgtcaaaggaaaaattggtgatactcttctttcccctgccagaaacagcccagatctcctcttaagcggaaaagagattgaccttctagcagaggcaaaggtaaactcctgtaagttacttctgttaccaaagggaggggggcggcttttgtgaatgtatgaggagcttttgccagagagatattcggaggaggggtgtgcccatatgcacacatatattttcccgcataaccgtatccaatgctagcatttagaggaaggcatttagccaccaaaagtccatccatctatgctgcttccacagagaaaacattttctctttcctcctcttgaacttacataatatcctcctcccattccaaccttagaatggagtcttctgggggcagctgcaaagcgttctccctaggacagatggagcctccctttcctcatctactctgtgggtggtttcagggcccacgagtcaacatgaggagttgtgctggtggtatgtgtgttggaggctgggctggctgattcacagtgacgaggatgtcaataataacaagaatgagaatgatggtacctaataaagactttttttcccaagtcccatctacaattctttcattgggtgttttgccaagtctttctcaatctcatctcagctttttttttttttttaaagaaaatgtattcaatacttaattgcatcacaaatgtagacatagaagaaaggacttcaaacggaatttatgggaggcaatgtgtgcggctttttgccttatagagctgtgtagaaggtctggaatgatcttccagcaccaaatttagatggcctcaaaaaaaaaaaaaaaaaaaaaaaaatcaggccttattgagggcaaggaatgttccaggtcagaaataaaag

SEQ ID NO: 128789 - DNA, 1024 bp, Homo sapiens
acgcacacgcgccgctttttatttctttttcctggttttcttattccatcttctacccacccctcttcctttctttcacctttccttccttccttcctcctttccttcctcaggagaaaggcctctctctccgtgttcacagcggaccttgatttaaatgtccatacaattaaggcacgcggtgaatgccaagaatggggctggctgagcaccgtgggtcggcgagggcccgccaaggaaggagcgaccgaccgagccaggcgccctccgcagacctccgcgcagcggccgcgggcgcgaggggaggggtctggagctccctccggctgcctgtcccgcaccggagcccgtggggtggggaggtgtgcagcctgtgacagacaggggcttagagatgcaaacagactcagggagagaaacagaagctgattctgtgacagaagcagatctgtgcagcacagatgcggtgtgcgtggggagggggtcgcctgggagcgcattgcggagtgcttgtgtgtgcagatttttctctgggctcaggactcattgtatgtgggtcaacaccttcctccgtgactgtgtttttgttctgagctgagttttttggtttgcccttaaaaaaataataatttggcatccagagactggcagactgcctcagggcctggactgcggatatattgtgttctgcttgaggtttggggaggagggcaggcggtaggaagggagagggggagctgtttgtcacactttgctgtagagctgagagcacctgacaagcttaaggaagtcgttgggctatgtggacaagaaggagccagctcccagcgggttcacaagctctatcggagttgaaagcgtggtcatggctctaaggagcacctcacgccctccctgtagctgttattgcagtttcaggcagagatccaggagctgcagaggaagggagaggcacaataacctacatggacccaagggagacatgtgttcctttaaaaatgtgaacagaaggaaaaacagaatg

SEQ ID NO: 128790 - DNA, 1055 bp, Homo sapiens
ggacaaagcaccttgggttcggcgagaagggacgcgcaggagcgctgaacccagaacacgcgtggccgctgcggaagggcgtccgcccggcgtgcggaacgctgagggtattcggattgtcttttatttgtccctgtggcttgctttcacagtgtctacgtaggagaggggtcggggttgttggggtctctttttttttctgggaggggtagctgaattgtgggagacctaggtggacttgacttggctttcctgctactctgcgtctccttctcaagatgcgggggttggaaaggggacaggggactcaaggcttagaaaagagaaggagccctctgctgcctggagggctaagggagtagagagtggagatggaggtgagtagggatgggccagcccgaagagcactgaggaggagaaggggtcttctcctccctcgggtccagtggatgagttttgctgggaatgagaattcgggtgtctgtcgataggagcgctgagaaattgatgagaaattgacatgtccgtgcacatgcatgaggcggcgacaggatttgtgtgtaaacagtgtggagaggtggaggagggcatgggggtgggggcttaaaatgatgtcttattgtccttttggctttagggactctcatcctctgtctcgccccctttttttgacccggggatccagccgcattatacacgagtgaccttttaaatctacgtccaccctttacctggtaaagcccgctgacagttgggggtggggtggggagagtgtaggggtgctctctccctctctccctccctccgcctctcctccctccctcccccctgcactcctctctcttcctccctcccacctccctcgctcccgccctccctgctgcattttgcatgagctatctaggtcattagcattttagcgtatgcaagacttgacaaagctgatgaggggccagatgggcctcgctcttatggtttttttttcttcttcttcttcttcttcctctctctctctctctctctgtctctctctctctcgtctctcttcctttccc

SEQ ID NO: 128791 - DNA, 1034 bp, Homo sapiens
tccgccaagactgctcggaaggttgccatactgggagcaaaagagtgagagagagaaagagggagagagagaggcagagggagagctgaggaaagaaaaaaaggcaagacttggcacagctcagtcaaatcagcttcttttgtctgctttctcggcttgagcttcaggaaagaaaaccgtcctggggtacagaaaaactcagaactttttggttttcaaacttagaaggctttttaagtctcttgggctatttgaaagtgttggtacatacaatgacgtttagtcaccagtattaagggaaataaaagcctttttcaaaacgaagcttccatagtgtccatgcatttgggaaatactatatttgattttttgcatgtatgattataccatgagagacaggattaatatagaagatggcaaggcaaatttctaattagagggaatattaattttctacaaaataaagtttgttcatcaatacaaacctgctttcaaatcaaatcagaaagacatccttcggaatgtgttcagaacgtaagtttttagattttattttattttatttttagacatttatagacattaacttttcaaggagcctttctaagattttatgcagcccagccaggaagtcagagtaaaagttgttttatccatgtgtttaagaaaacgttttcttaaagcaacagcttttatttctgctgcttcatgctgtcctaaactacatcccccagcaattagtgacaacactgaagaccagaaaggcaagctgaagacaccagacttcgcttgaagggcaaacaagaaatgtgagcttggtcattatttttttgtgtgtctttgctctgaaccatttttgggaggtgggtggggaggtgtctatgtctaagagatgtatgcgattagtgaattctcattgtgagaaggaaatgatgaaaggtgatttttatgatgttggcagaaatggctgggaatggtagagaatagaaatttaaatcttttggagaagaagtggtgagctgtgtttgcaatac

SEQ ID NO: 128792 - DNA, 1031 bp, Homo sapiens
gcatgagccactgtgtaaatgttttgtaggacttttagaaaacatggggttgtgcctttggccacacgcatgcttgtggatctacaagaacagcggtcctgtaactcttcagggaaggggcaccacatatctgtcctgtcaccatggcaaagctggaagggtctgcagagctacccagcatgctgctggtgttgttgtaaccaagcagagggcaagattctcgccatgagaattgatgtacatgtctagcatgtgaagcatcctaagggctgaggtgggttcctgaaacctgtggaggaaaatgctcagtgcaagaagccaaagaaaaaggcaccaggctcagcgggagcacccgcctggagaagcatactttgtgaggatcagcagaaaggagctgagtgtggaagctgtccccaagtcatggcacaaaagtattcaaaagaaaggatttctggattgttttttaaaaaacaaaactgtgatgtaaatgatgaattgtgctctgtggtctgattaggaatgtaagtggatccagagtacagtggggctgaggcagtggaagtatttttttgtgtttttttttttaacttttaggtcagggatacgtgtgcatgtttgtttaatgggtaaacttgtgtcacgggggttcgttgtacagattattttgtcacccggataccaagcctagcaccccaatagttattttttctgctcttgtccttcctcctgccctctacactcaaggaggccccagtgtcttttgttcccatctttgtgtccatgtgttcacatcatttagctcccacttctaagtaaaaacatgaggtatttggtttcctgttcctgtgttagtttgctaaggataatatccgccagctccatccatgttgctgcgaaagacatgatgtcgttcttttttatggtggcatagtactccatggtgtatatgtaccacattttctttttacattctgtcattgggcattaggttgattctacatctttgctattgtgaatagtgctgcagcgaa

SEQ ID NO: 128793 - DNA, 1051 bp, Homo sapiens
ttgaagatcagattgttgtaggtgtgcaaccttatttctgggctctctattccaatccattggtctatgcttttttttttctttcttcttcttttgagacagggtctcactctgtcacccaggctagagtgcagtggtgcaatcgcagctcactgcagcctcaagtggaagtctcgatgagatcagggaggagtaggtgtgaagacagtagaagttctgggaggctgaggttggggaatggccctttgaccttgggattgcagaggtcgaggggcttctggtgtgggtggggctgcagccttgggtggtgtaagtgaagtgataaagaccactggatcagaagacatctagaaacatagaggcaaaggggtttcaagaccttctttggggacattgagaccaccccaaactgccaagatttgtgatagataagtggacagggagatcattggcaaagccattgataaatatggtgacagctccaagaagattggcaggcgagagagaggctgaggagtgagtgtggtataatggcatgggcctcaaagggcttttccctaaggagaggggaatggtggttttcccctgtatgatttctttggggcaaaccagacccgtttttctgtaagcacaaaatttgtgcttttgattagcagaatatctgctcccatttcaggaggcatctgtctgctatccgtgtgactcttatggaaaattctaaaagtgactggtgccataattggagctaggactcacttcttgctcctatgattctactttgatattaaataagtttcctttatgagacaccagtcagtaaatagaacaggatgtatggttaaatagctaaaattattttcatcattgcaattatagtatgccttgccatttcaaaccaaatatccacttatctttcctgaaattttgcaagaaatctattattcgaggatgcagagatgatttttttttggttgagttaaacatttttatggattagatatgaattcagtaaaaataattgaattaaattgggtaatatgaataattcatg

SEQ ID NO: 128794 - DNA, 1042 bp, Homo sapiens
agagccttggcttcttggagctggtcagactctttctggattgttttgttcagtgatgggtggtaaattggagaatgttgagagaggcgtgactgggatgtatccctgtgcagtacagatagaggtgaaagattttaaaatggatatctctttgagaggtaattcattggtgtcagctggtttcaataaaggtgctatctaaagaaaaaggtgctatctacagaaaagcttgaagatgggagggtgtgggagccgcgggacacggtgtggatgtcacagtgaagggagaaggagaagaaagggaggcccaaggcagggcagaatcttgctgcaacttcgatgttgagcattctggcccacgggacacacacagcccaccagttttcaaaatacattctttgttcctttgccaggataagaaataagacggctgctttcatgtctctacttctcaaatatgtcagtcttttcagtgacattcttttattcaatgtagtgggtgatctgaattgcaagaatatttcctattttcccatgggactaaattaagttatttgcattttgaatggaatagaagactctaaacacatttatttttttcttcctgaatcatccttggaaaaagaggttgctcgctgttgatttatttcacaattttatctgggtaaaagccacttgcaaaaccactccccttatcttagtacaactgtgctagtgcagaactaaggccaaagggtggaaaattccgtgagagtgatttggattcactcttaaaatgatagcagcagcagcagcagcaagactcacagcagcagagctagctaccagaaacaggtggccctagagctccttgtccccagaaatacacaggtagaggctgggtgctgtcagtctcagtccctgaggagtagacctctgtgttgggtgttacattaggccagtctgttcttttgagatctaagattctgttattttaaaggctttcattactatcccattagaaggatcaatttgaatttcttgtatttgagtggaaaatgcc

SEQ ID NO: 128795 - DNA, 1049 bp, Homo sapiens
agtagattgaatacataaatgtcaaaggcaaacgtacgaaatttcaagtagataattttcatgaccttgggtttcggaagcatttcctaaacaagacacaaaagcactaaccgtaaaggaaaaatatttgacaaatttaactatatcaaaatctgacaactttggttcatcaaaaagcatcataaagaaaatgccaagaacagaaaaaaagaaaaataaaaaataacaaattgccaagaacagagagattatatttgataaaggattagtattcagaatatataaaaaatagacttaaatgtatgtgcagtatttttttttagaaaagacagactgctgagagaaaaaatgggcaaaggacttgaattgtggcaaagaaacataaaatgataattaacgttattaatcaggaaaatgcaaattaagatcaagtgagattccattacacaccaagcagactgacaaaaagtgaaaatctgacattagcagactttaatgaattggcaagcatttagagctccaggaattcttgtgcagtcatgtggttttgtaaattggtacgactactctggaaaaatagttcagcatgtacttaagttgaagacatgcaaacactatacagcaacaattctatttctaggtatgtactcaagagaaactcatgcatatgtataagagaatacatgtcaagaatgttctttacagccccaggctggtaatgttcattaagggtagaatgtataaatccattgtggtgcattcatacaatgggatattatgaagccatgaaaatgaagaaaatggaaggacctcatgatcataattgtaagtgaaagattcaaactgtagtataattgcatttatattaattttaaaaataggctgtattagtctattcccatgctgctaataaagacataccggagactgggtaatatataaagaaaaagaggtgtaatggaccccaagttccacatggctggggagccttcacaattatgaccaaaggcgaaggaggagcaaaggcacatcttattacatggcagcag

SEQ ID NO: 128796 - DNA, 1032 bp, Homo sapiens
aaccctaaatagacatgggtaaatgtcagttgatatgttatggtttggggattacatagctcttcgtctttaaaaaattttttttatctgtgcttttgtttaaagcatgaagttatgatttaaaatgcccatggaaaaaccctgaataattcattgacttaccttagtcaaaaagaaaaatcccccctccccaccgtatgcctagcaatagggataaaattcttcttagtccctttctgtagctttgaggttaaaattacgggtgttattatgaactctaaataagaacctgtgaaataaatattttaaaagtgcccatttctgggaggcaggcacccatatttctgtgtatgcagccacgtagacagctagatcttaggcataatggtttagttgcatgtgggtgattattttcatttccacttattactgtgtgctagactccctgtgtatgagtacagattgccctttcttgcactgtatttagaaatctctgtattacccttgggcatttgttcattaatagggggtggggaaaggaaaagcttgtaataatgggctttacatattaaactgtgtgcatccgcatttgggccaaatggaaaatctggtttgtatgactgccctctgctggctgtaggcctttgctgcagtggcaggatatgagtccctgggtggagcccctgtgcagatgccggtatcagtcttttattcacttgcactgagttccatccaagtacatcagaaacagcctaagattctacctactgcccaggttgatggtggaagacagcattcttgtgaggatcaaggagacatttttgattttagtagaagtacagtagaagtatagacacaaaataatcctggccaacatagggtgatgtttgaatgaatgaattcacatttctccacgggccacactcctactcatctttcagtggcaacaggggaatgtttagtggctcccatatgtgatgtccagaccccttgtggaatgcaagatgattttacggtgtatccagatgaatc

SEQ ID NO: 128797 - DNA, 1042 bp, Homo sapiens
tgaaaattgctgtatggttatttttccctcttgtgttacagaccaaactcagtgtctgatgtacagtggaataagtgaggaaagagacaatattgggcaaaccagtgaaattaggctcttgtttacatgagtagcccttactgagattcagctttttgttgctctgtgtagccttttgatgtagattccagagttgtaacttacatgataaattacaagtctgtatttattcatacattagagataggttatttttacctttgtgtgtgtgtatacacatttgcttggaatcggtgaatttctaggccacattgaggcaattgaacgctctttataagcagttaattgtctagacccaacgtttgctgcaaacacagtctggggcaaaatgggaattaacatttttacaaagacaggcatagaaattctaatccagcgaattgtttcctttctctggtagcagggctgagtcctacctggccacaaggctgccattcacctgtgtagcccagaaaacaatggtaaagaccaccagagataagaccagctaatccatgccttgtaatagtcaggtttcgcaattcacatcacctgtctgcaaaggtaaactcacaaacccctcctgagatatgtgtacagtcaaatgggatcactgctgtcgctaggccagcagctctagaagcctatgttacttttttttttttttctgagacggagtctcactctgtcacccaggctggagtgcagtggtgcgatctcggctcactgcaagctccacctcgtgggttcacgccattctcctgcctcagcctcccgagtagctgggactacaggcgcccgccaccacgcctggctaattttttttatttttagtagagacggcatttcactgtgttagccaggatgatctggatctcctgacctcgtgatccaccagcctcggcctcccaaagtgctgggattacaggcgtgagccaccacgcccggccaagcctatgtcgcttttaagatgaatccaaaaagactgtgtgctactaggcta

SEQ ID NO: 128798 - DNA, 1930 bp, Homo sapiens
tactctgacatccagtgaatctactattaagatggattttagagttaagtgagtccaggacgaccatcgatgtctcaccgaattggaactcactggtcagcagccgtaatgtttgaattggaaccagaaaatagctctcaaatttgcagagtcagctttgccgggcttcaggctgagtgggctcatagctggttggccctgtatctctggcctgggcaccgtggctccttgccaaggccggcaacccttgatggtggcagcacggagcagaccgagcccccagccgacttacccccgaggcctcgcgcctcccccttcacagcattgcgccttccctcttccagttcccagggtcgcttcaggctgtcccagccctctgcctagtcagctgtcagggaggggaagtggcaagtccaaggccgccagagggcttcctactgcctgccctgcctgtggcatttcttaaggtgacaaagagtgtgtttttaaaccaccctccagaactcttactccccatgaattctctgcagctgctcccccagaattgactggaaagagaacctcgtttaagctgcctatgcagcagaatgctgtgagtcagacgacgtcctgccaagtgcaacctgagatgcttcagtggaagcttgttcctcggtggtgacaccttgtctccacgctcatccattcgagtgaaaattcatctctttccctcccaaaaacatcatgtaatgaatgatggttgtttttgctctgaaggagacttttttttttttttttttttttttttttagacggagtctcgctctgttgccgggctggaatgcagtggcgtgatcttggctcactgcaacctctgcctcttgggttcaagcgattctcctgctccagcctcccaggcatctgggaccacaggcatgcgccaccacgcctagctaatttttgtatttttggtagagatggggtttcaccatgttgaccaggatggtctcggtctcttgacctcatgatccacccgcttcagcctcccaaagtgctgggattataggcgtgagccactgtgcccggccgaaagtgacttatatttgcatagattatctctgtaaaaagtgaaaggtttctgtgaacgtctggtacttataaaatatctttgtagggcaggatgggagatgattaaactacttcctcatttagacagtgccacctgtaagaagacttgtggtgtggattcaaagatggttatccacagtgagatgaatagaaggcagtacttctcaaactttcatgttcaccgaagtcacctggggatcttggtaaaatgcagattcggatacagcaggtctggatgaacccagactgcttttcctaataaactcccagaagaggcgcaggttttaaggctatgaggtgcttctctggaccctggctgtccgacggccacatttaatgagaagagaacccagctgtgtggttgttgactgcgatgaggatcgcactgacttagaaagttatgactttaatgttccttagtcgaatcactaagatttctatataaaacagcagaaaatatgggagtttggagaagagagaaatgagctggatgaaatagcttcctagctcctgattgatcattgggcatcagctattttgtgtgctggtgccgatgagcaggggaacacgtcgtgaacagagttgtgtcatagctggacgagaaggagatgttgtagggttcagttcgtgtagtgaatttttcctgaatccttaaattctcatatataaaaacatatagatatgaagacattacaataatatagaaaagactgtgtatgtatgtgtgtatgtgtaccctatgagaaatgtttttgctggtatgcgaaggggaaaatctagtgtttggaaagagttctccactgtgctttgggactacaagttc

SEQ ID NO: 128799 - DNA, 1050 bp, Homo sapiens
cattggccctgctgggcagccattgccataggagccagaggggtccaattgggaattaagaaataaactataacaatcacaggcctcattgagcggaaagtgctcagagtcattttccaagggaactccatggagattactttcagaatgctcacaaataagagaaacagattccttctgcatgtgaagcgtattgcagttataaaatgctcgtgcatatatgactttattttatttccattcagtaatgttatgagtaaatagggcatgtgctgttttcccgatttctagataaataaatgaaatctcagagagtctcacttttacaaccactgtgttcctagcaacggtaactatccaattgaaatgaatctcctcccacctccctccctctctctttctgaacaaagggggttagcttacaattagacaaaactaagatatgaaaaaaccataatgagtaacagtgatgtgaaacagactggaggtgcccccaggaatttgcaatagaaggttggaatggttagggaataataatttaaataatagctactatttttgaaggtttaagagtcaagatagacaactaaaaccagtctagaaactccaataaagctaaaaataggatttcctgtataggcttaagcgtgtgctaagcactttgctaagttgttattactaacattattattatttgaggcggaatcttgctctgtcacccaggatggagtgcagtgctgcgatctcggcccaattgcaacctccgcctctgaggttcaagagattctcctgcctcagcctcccaagtagctgggattacaggcatggcatttaccacaccagctaatttttgtatttttagtagagacgaggttttgccatgttggccaggctggtctcaaactcctgacctcaggtgatctaccctcttcggcctcccaaagtgtagggattacaagcgtgagccaccgcgcccagccgctaagtgattatttaccagcgaaatcttgtctaatcccccatccagttcatgaaataggtactgttttt

SEQ ID NO: 128800 - DNA, 1047 bp, Homo sapiens
tttatgtgttaaatttctttctcttgtagcagatgccaccagaccgacagtccctaaactaggtcagagagagtgatgaattgacaaagtccctcaggctacatcatccgcgtcctcacttcgtctccagttccctggcctgctttccctggcgtcttagggtggcccctgttccgagaaccacagaggcctagggggttcctctgtccagctccaggattcctgatttgcaaattatcagccctcatagctggaaggatggagggaggtggggcttaactgtccccagccctttgtgcctctcccgtatgctgagtcctctcattttcattccactctggcactgatggaataatgtcagaggacagttagccacttgaaacagcagccagaaaaccacacttctcttcttgaactttcattgtgttggggcccatttccaacaaacagaatccaagtaaggcccccctgtgtgcagttgtaacagcgttgatatagcaggtagagaataggtttttttgttgttgttgtttgaaataggatcaaaggaaccttatttcaaattccagggcacagagaccaagagaaataacgacttgcccagtgtaacacaggaaggaacagagtccaccgtgttaaaagaagaacttcagctgaattatatttaaaggagtttaactgagcaatgaaagattcgtgaattgggcagccctcagagtcacagagaggctccagggatgcctcatggtcagaacaaatttacagaccaaaaaaaaggcggggggaagtgacctataggaatctgcagtgaggtacagaaacaactggattggttaagtttggcatttgccttgtttgaacatagtttgaaccgtcagcagtgaatgaatggttgaagtgtggctgctgggattgaccaagactcagctatcgttacaggtgcatactcctaagttagggtttcagccttgtctgcctaggttagtttgtccacaaggactcaaatatagaagtacagagtccttctcaggccatatttagtttgct

SEQ ID NO: 128801 - DNA, 1046 bp, Homo sapiens
acaacagccccggaaagtcagtcttatcattgtcccgtgttaggattaggaaaagagatccagagagatgtgacttgtccagagtcgcgcgttcagtcacctgaacactaaggttctgactccggaccccacggcacccccgcacccccacaacgctgcctccttccaggatcacctctgtggagccccgcacatgggtggcgctcagtaaattttaaattccaggatctagtcaaacctgccgactttcattcagtaggtgtctgagctatatttgctcactcattctgcaggccttgagcgcctactgtgtgccggcgcttatatgagagcgcgggaacagagctcctcacagggggccgggtgacaggggagctgcggtgagcgcggccgagagatggccgtgagctcccagcctgcagtccccaggctgcacgtgggcccggcgcgcacggtcggtctacaccagggtgtgcagatgagggaaactgggggagttcgcaggtcgcagcgcagccagggggggacgcgagagggcgggagcgactccactcggagaagcgggactgccaatcggaggaagaaagaaaaaatataaggagaaaattcagggtgagaagagccagaagtgagggagctggaggcctggacccggagactgggtgcgggtggagtgagaggagaaatcaatcaggtggctgagaaccagaacgacggcctcgccctcctgagagccaggggcggcgggggcgtcgaggggtcttgggtgagcactgcacagaacccgaggcgggatgcggcccccagccccggctccggccggcctctgtggcggcccaagttgactggggctgcggtggccgaagcccggtcattttcgaaaggaatggcagtcggagtattaagaacggctgctctgaggggttcatggtcaatgtctctcacacccaggcgggctcggcgaaacctggttgggttgattttctgaggccacacgcgcagggagggcggtggagtctggcccgggcaggcaggggctggagcgg

SEQ ID NO: 128802 - DNA, 1076 bp, Homo sapiens
cctcccaaagtgctgggattacaggcgtgagccactgcgcccgtctctcagcctttttataactagactgatgctcttcccagaggccccgcgatgccccagcccgctgtctactgtagtcacaaacccgcgccccttttcctccatccttgccacagccagttccacctgcaagcctccctattgcagatgctcttcacatgtcattgttactcttaactgggaatggatttgaaagcagcaggcaaactgcagagtttcacaattaatttgagttagttatgattcggatgagctatagaaaatacttttgagttatgctgcacattagacattctcagtggattttcttttccaacttggtcaagaggtgggtgggaaattgggtgagttggtttcttaaaccctgtttgcaagtctgaaaaagaatgttttcaacttgtagaaaatactgatgcttttgagagatgaaatcccagtgagcatctctttcctagcggaggtcatccctctgcctccctcctcctccacctgttcactgactggcaggcacacgctgagacctgtttattaagaaacagtatcagagaaggctttcggcacagtctgtccgagtgatctcagcccttggatcagcaggcagcagctgtacgttgattggagtaagaacctcttcgtcaccgccctgtttatctcgctggttctgcagctgctgcgtttcggagcctgttgtgctggagggcagggcaggaggtcaggtcgggtgctcggtgtgtgattttatagtgcttggttattaatgagcaaattagtaccgtgtcctagtaaagtcgatgactaaactccttgcataaaagtgtccgatctatttaggaaatactgaatatactgcagtgacatacacaaagccttcatggaaccagtaaaagggaggaataagccagacaaagatggcaggtaaagaagggtgggtggggccgggcctctcctgctgtggacgagtgggtcgggggctggtgcagggtgcgtgaggcgcacttcctcccacctcagctgcctgttgtgcaggcattagc

SEQ ID NO: 128803 - DNA, 1197 bp, Homo sapiens
ttttcacagactaacccagcacaggctgatgacagacaggctgtggtggcagtgagcatttgttcatcacaggcaatagccatcagggctcacaaccccagttgctaaatacattacccttgatctctgggagtctactttgttaacaaagttcattgaaggattactgttgcagcatgacctccgtgtcttaatgtggaaataagaaagcttccatcatcctgtcacttaagatcagtagtgatgtatgagcaaggctggcgagctgaaagacttgcctttgaagcccatttcctggactggcatgttgatcataagtagggggattctgtagtaaggtgcatctgcttctggcacttcactaaggtctctgtgcaaactgcttcatttccttgccccaaaagattcttttgagaataatggagaatcctctctatttgggcattgtactaataatccatctcagtatacatgtttgaatgacacaagagcaaagtcctccatgagcccagaggatcttgcgcagatactcactcatgtagctgcagagtctccagatggaggatcctaaaagaagcagaacagactttaattctgtagacatccgagaagagttgatacatgtagcttcaggcatctttcagggaccggagaggactgtggtgtattgtaattgatacccgcagggactctctgcagggtcagcttgcctttgtgcccactctttgttttctcctcagtgataattcggaattgccagagatggcgttaagattctccagctctaatcgtgacacacagtgtacgcccatgaaccacctgaattgacctgttgctgatgaggaaactgagtcagagaaccacagcagccacctttccatattggcagtgtccaggtggaagctgtccagcatctgcccaagagggcttcttgcctgggtggaaggtttggacttgggttttactctgtgctttaaaacagtcaaactttttcaagtgaatgtacatgctagtttgataaattataaaactcttttaagcctggcttcaggctgttttttatttatatgaattgcaaaccaaaatgatgtagtttttttctcttttgaaagtactatttctgtggatattttttctgcatcagtcaacttaggtgagtgtagaccttagtctctggattatgtggtcaattgatac

SEQ ID NO: 128804 - DNA, 1118 bp, Homo sapiens
gcttcaagaacctttttggattctgaacatgcagggagacagtctttcttgtactttttcacttaagttttcaatatattttttgtttataaaataaaaacttacagcttgtgtaaaacaagagaagaggttataggattatatatttaatagcagtaacaatttttattttttatgagctccttggaattacagtctcagtgtaactggttagggtttttcttgagtagaattggctttgtagttggtttgttgttgtttagtttttgtctatgctaaaaataagttgtgccggtatattgccttttttttattgtgataagaacactgtctgatgtattattttatatcatttactcttttaacatgactaatttcggaattttatttattcttactaatttcggtatcttttaaacatagaatgactttgctttgccaaatttactcctaaaaatatttctcaaatatttttatttgctacattgatttctggtgaaagaaagagtatgtgaaaatattagccttatgtagtttataagaattgaaagacgagactttttttgttagtcaactatattcacctaatttacctttcttttataaacaatcatgactacttaattattccatgtaactatgcataccctattcctagtttcaaaatgaatattttattctctaaaaagaccttattcggctgggcacggtggctcacgcctgtaatcccagcactttgggtggccgaggcgggtggatcacctgaggtcgggagttcgagaccagcctgaccaacatggagaaaccctgtctctactaaaaatacaaaattagctgggcgtggtggcacatgcctgtaatcccagctactcgggaggctgaggcaggagaatcacttgaaccctggaggcggaggttgcggtgagccgagattgtgccattgcattccagcctgggcaacaagagtgaaactccgtctcaaaaaaaaaaaaaagaccttattctttttagaaattagaagattttacatttaatagaatcttcaagaactgctgtgctttctatagtaaggagcctacatttgagttgtcatggttcttcagcaattttcacctctt

SEQ ID NO: 128805 - DNA, 1406 bp, Homo sapiens
taattgttccctcatgagataattcactgagatcggggggctacttgggagtcttaaaaatgttcaaagacagtcgaatagacatgctccccattaggggtccacagtggggtgcaatctgccactagctgagggctgtctggggagaggcgctgggtgcaagtgcagtttgcaggttggttcctgggagttggcctgcagaaagttcctaggagtgctttcaggactgctttctgggggagcaagagggaggaagcaagattacacagggagaggatttggcctgcagtatacactgaagttttcagctgactccacagggagctcttcccaactgccccagatctttggagggggcagagtctttgtgcccctgcattgaccagtcacagggtccaaccctgtggggtgagcccttctggggcgtagctcacgcttaattttcctaaagtaggctggaggggtcctgcctatgctgcagccacgctgagacttgggactttttctttctttctcagggttatagttctgctcacactgtcttggctccccttgcttaggaaatgtcacgtttgaaccgtgcaactccccacttttactggcaccattcccctgtttaccaagacagccacgctacttggtgttgtagaaagagccaaccatgcaagagaataggaaggcctcttcacttttgtattggcttcaggaaggtattgatgccgtttatagacctaactctgatgttcaattatcaggtttgtcagtcccaagaaattcacctaaaatgtaacgtctctttaaatatattggcaaggaagtgaacaaatgattaagaataattttttaagataacaaggcattttgaatcgatgaaaatgtgaaaaatgaaggattataaaccaaaggcactagtggatccacatacaacctggatgtcctcagtgaggaaagtgactgcctcccttttactcaccgtggtctagctctgcgctcgccacataaactcccttaatctggtagtgatatacgcagtccagaatcttttcaggtagctaatccttccatctttaatttgattttcagggtaacaaacctaaacacttgtctagctaaagagaaaagaactattctcagtacactatttgtgttccattagagtatgtagtgtttgttccttacatggagtggggtcctgtacacacgtatatgttggtatacatacacaagcaacagacctccacatactgggtacttaaaaatcggtctttccacacaagttagttcagtgttgtgaaaagcatttgtatttaagatctttcttatttgagtttggggtttgagaacttttgttctagaggaaaaaacagcttcaaccccagcttattgttcaaactgtcccagtggga

SEQ ID NO: 128806 - DNA, 1172 bp, Homo sapiens
ctgtcatttgctgtgctggaagacttttttattcagccccgttagatcgcttacagacacaagccggtggggtgtagttggggaggaaccttgagagaagcatggggaccttctggaagggaaagggatgaggagggaacctgagtcctgagagtgagtgcagacggcgcctccacctgtgtcttgtcgagatgagggtcaggacctgccgcttggctgtgacagcatcctggcctcctgaatgcagttgtcctcacagagagagcactctgccctaggcttgtagggttttttcggtgtgagtttttaatttcaaatatttttaaattataaaagcagtacctgtccactctagagaaaccatgacctgtacatagtacattaggaagaagggggaaaaatccatgatccaaacagccagagataaccacagtgaaaagctgggcacgtggaggtgtgtgtgtgtggtctcagtggtgtgtacccttcctgtctgtctcaaaagcagggtcatcggatacggacaatactgaacttgaaaaacaattgaacacgttttgtctctttagcagcttgcgtttttggctctgccactgggcctgtgacatgtgttgtttatggtccctgtgctatttgaggacattcctaaaatgctactcctctgaccactgccctgtctacattgcaagggagctcccctctggacagaggctaagatgagtaagttctggagacctagcatacagtatgttgaccacagttaataagaacacactgtgtactcgaaatttgctaatagattagatcttaggtgtcctcatcactcccaaaggtaactgtgagaagtgatgcatgtgttaattagcttgactgtggggatcattttgctatgtatatgtaggtcaaaacatcacatggcacaccttaaacatagagtcttcctctgtcacttataccttattacatctggaaaaaaaggatgctcgtccagcatggctcctcatctcgctggcccatcttctgtctatgcagggtcccctcagttacactgtagttacatggtcagttaccgtcagccttggagaaggtgggagtcttttattcctgctccatgttctgtctgcctatgagatgcctgctcatcccgtgagggaaggcgctgcagcaggagg

SEQ ID NO: 128807 - DNA, 1034 bp, Homo sapiens
gtggaatgacaaatagcccagtaaggactaactcagaccgtggttgagaacatgttccctattcagctttgttggaagtggccctaacttggaaaaaacctactttgcccagtaaaattcccagcatccatgttctagtctgtagtccttggacattgtcctcccttgatcccctgccagcggctcctcttacctaatggccctgtgtcatgtcccgtcactcagacatgcagggattgtggttctgtctactgcaccccagtttagagagggacagtaagtgggattagactgctgtggagtggtcaccaatgtggtctgagtggctccacttttgcccgaatgctttctcccagtcaggccgctcacctgtccatttcaaagcgtattgaagttggacctccataagccaagcaggtgtgttggggaatgaactggaatctttggtggcaggtctagaatgcagagtaagagaaatggcagagccaggcagaagaaggatggaaacaggagcagacacgtctgtcccatcatttccccagcaactgtcaggcctcggggcctcaaggagaactgttcgcttgtaaaagcaacagcaaacacgtgaagcatgaacacaccctttaaagtctcaacagttctgttgagaccatcttaaattgatgattgtattcaaatatagttaacagcataaaacataagtttatgtttataataaaattatttaagtgaatctgttactttttgcaggtactctgtccagatatagattccaaatacactgaaaaaaaaaattgacaaactagaaaacctttttttaaatactgtgttttattgaaataaaatttaaatattataatacagatgatcagtttcccaagaaagtaggaagggttcttacctctaatttccttgctgtgaaagtgtacgtgagtacaaactcatttttctaatatcaaatcattgctgcttgtgcacaatttgggaaaactgattattttctgaaaaactaacaccaggaggagctactaagc

SEQ ID NO: 128808 - DNA, 1028 bp, Homo sapiens
taagtcttgacttgaagttttacgttttcctcgaccacaaaggagaggacattacttggattcttcttgattcttacatacttgagcaattttggctttatctacttatgcgctttattcagtagatgaatgtgaaaggctcttgatgtgtccaaacaagagatcaaatagacttcaggtaaaatagcaagtcatctgtcttagcagattcaagacttaaagagtaactgcaactgttgagtgtcaaggtgaagttaccttcaccttgggtagggtgttccaattttatctgtaaactcagttatctataaatgagtcttgagttacttgtttgtgtagcagattctgttttccaaagatggcctcagtgatacctctcattccacatgctcttctaagtgggcccttaccacctccacaccaggaggtggagtctggccccctcccctctacccaggtgggcctggaacttgcttgtagccaagacagtctagcagtagggttccaggtgacttctgaggcctcgttggctggaacacttgctcttgaagctttcatgtaaatagtccagctgccccgagccccaagctatgaggaggcccggtgcccaggcaagcccccgtggagagaccatgatcagtgagttatgcaggcaccccgagcttgcctggggagcaggtgcctggccagctccccgctttgctagctctccccaccttttgacaatatccgcgtgagagaccctgagccaggactgcccagcccagcccttcctcgaattgctaacccacagaaatagggtgaacagggaaatggctgatatgtttgaagccactgagtgtcaggatggtttattgtgtagataaatgaaatggctgtcttaggatttgtcttcctgtggttctgtgattagacattgatacctggtatcaaatatatatacctggtagaaccatctgagccagtagaatgaggaaatcaggtcatctaatgaatgttctactctggtttcttctaaagggcaactg

SEQ ID NO: 128809 - DNA, 1673 bp, Homo sapiens
acgttctaataaataagtatttcttctctgagagtaggaagtactcataatctacattctacgccatgcacaatctacttgtggattcttgagaaaggattattgaataaatgtttgctcacaccattttatgtttttaaaaatcaatccaatttgccagaaactggctttcagaccttgcatttcactctagaatagtttttcacagctgtggctgtttttcattgctcagaagataaagcattcctactgcttgaaggactctcctctgacttcattggtgcttcgtatttcctccagacacagcagctgtcaggaggcgctgtttccctgctgaatccggctattcagaagtacttgcttcaatggtgaaagatcatcacgaactgccagttgctcagaaaacttctcataaactgttctgtgtggggacggctggttgcacatttctaatttccaagttcttccttttcccaccatctttgttgtatattgatttggaagataataactggtttggagtgcacctaaattggagatgtatgcactttctgtggagacaaagaaatgatcgaagataatgaattgagattcccagggccccttgagacctgcagcaggtacttgtgctgaccggtgcctgccggggcctgtgtacataagcgtgtgtcttctctcacttggtttgcaatttgaagttggagacactgaaaaacaaattccatcagttcctatctggttgaacttcctgctactctttttttttttcctctctcatttttttccctcccccaccttcccagtttccttcctctctccagcttgtttccggattgagccttatcactagagaaaatactccgaaaccagagtgaggatggagaatgtgttaccagcattctcacttcgtttctctgtctagcatgcttctggcatgggctcctggcaaaataattctccttttcttcacctctctaacctgattgaattagaaccctcatgagagtttcactctcccaggataccaaatcaataatcattttccttgaaattcttctgctggcttttgctttttgaggcaaagcatgacttctttgcagtttgtgttcctttctcgtctctgtcaatctcctttttttccccattgcttgctgattatccagtctgaaaatgaattccgagcagacgcttctgctttgcttggtggaattcatgaggtattttggaccattcatttttctggttggattcaatgccttaagttcctcatggggaagatcactgagaagagtctctttattgccttcatttttcaagtgccttttaattcaagggtgtttctccttttctgaattttcacactgatacccaacatttatggttaggtgattttcaagaggggtttataggaggtggatcccccttcctgcacctatcgctctaccctccccccactccacatctggacaccaaagtaatcttctaattaagaaccttgtagttagggagaactataagcccacaaacaagccaattaatacacttgagttccaaaattcattttttcccaacagtgatgacttcagtaattcttgtcatcattttgaccattgataacagaatcctgattcaaaatgatcactgtgagctgggacagttggccaaaacatttt

SEQ ID NO: 128810 - DNA, 1029 bp, Homo sapiens
attatgtacagcgtttggagcaggtctcaggttgaataattggcatttactattttaagcgcatccttggtattgcatgttcttttgtatgtagtaacgcatggcaatggaagctgtaatgctgctgctactactgctgatggtgatgaggatgctggtgtccacaggtgctttcagttgtgctgatggcggagtatggaaggcccagctctagtatattgagcatttgctttgccacattatgagggaacatttcagttttaatcttaagaggtcaacttatatgtctagaatatacatttattagggaaatcaggataaatgatccagtctaacattctgttgagtgttgaattaatttctgtattgtaatgtatgtcatattttacatacatacataaaatacacaaagttgtgcatgtgtatgtttgtgtggtattttccgggtatcatctccattgctgatgataatgctttttcatttacaggtcggcggaagcagaagtgggctgtggatcctcagaacactgcctggagtaatgacgattccaagtttggccagcggatgctagagaagatggggtggtctaaaggaaaggtattttggagaaaagcggaaaaaaatctgagctatgaaaagagattagaaattaggggaaaacttccttcttaggagactggaagaaacttatgctttggatcagtaagtgattttgatcccaaatcaaaaattgttgtgaccttatgatgataaattaggattggacataagtgtcaactttctatcatttaagctgccatgcttagcatctttcatagacattgcaactaggctacacgctttttccctttccatttattcttgactccagtagagcctctgctgatacctctacacttaaatggttcttgttgaggtctttagcgatctctaagtgccaaatcagtgggccgcttgttttgttctcacattacttaactcctcagcagtgctggatgtaattgactactctctccttgaaatacttc

SEQ ID NO: 128811 - DNA, 1052 bp, Homo sapiens
accacacagggaggtggcctctcaaagttcagtgaggcagcaggaagaaaagaaaggtagaatgtcccatcagtcaagcaagggagtgtgtaggcagaggtgtggtggaaaatccagaagactttcagccaagacacttgatcccacatcgtggttttatttcttttgaatcaagttgagcaaatcattcaagtgcctaggtcacatttttctcacatggaaattaaactaatgtgttatatttctctagttgaaaaaggtcattacaaggaataagtaaaataaactaagaaaatatatagaaaagcacttagcaaattggcatgaagcaagtgctcagtaaatatgagttaaatctgagatgaatgatggtttgggcaacacacccttgagcagacatcatgggtgtggggaatatggggtccagtgagagtctggggtcaccgtcagcctgtggtgcatggtggtcaggcttggtagagccccagatcgtgggtggtaaagggaatgattaaaatttaatatcttgaagctgggagttaaaaatgatttgtgtaaaatagaagtccaacttttctgaatgtatgcttggctgacatggtttgtctatcagctccagggatgcaggtggtcaccatcccacccattatgaaaagattccaggccatggatcagcaacagtagagttattttatggaagttaaagagagaataattataaggaacaagactgaaggaagttggggagttccagttgggatcccaagcctgcttgtcctattaataagttctaaggttcagaactgccatcccctgcatttccacttagacatgctgaaaatctgaggtcaaaggccaggccacactttaaatgcttcaggagcagatctgtctgtggggaggccctcccgcttgtctcaattctctgtgcctttgcatctctcgtctcaatgtctgtatggttttgcttctgtggttcttaaagtctcagaagatgaaacaaggtgcacaaactgttgaagaatctgtgtgtagtgctgagagaactgggg

SEQ ID NO: 128812 - DNA, 1052 bp, Homo sapiens
tttctgtcctgcctttggcaataccttaaatattctgtaactgatggagattcacctagggcgttgggtagtgctaatttctcccaagggaacaacatcactaatactgtataaggtgctagaatcaaacctcattttatatactttggttcttagagaaaaacaaaacatgcagaattatttctgtgaagccttactatagattgctatagccaattgtttatccaaaaagtgagacagagagaatagaaaatgaagataagatgcagagattctgtataaagtgtaacaaaaagacctttgctatttcttatattaaggtaaactatcatatatatatatttatatacatatatatatatatgtttgaggcagatagaatggaaaaacgtacagtgtggtcatctttattttgtcagttaattcacaacttttagtatgtgtgcaagagaggtttagagtggggatgggataagggatgcccagtgtgatatgggaaatcattcatctttctgttctgttccacatgttagtagaaggagtaggctgaatgagaggaaaggggaataaatcaagacatagatgtgctttttaaatgttctgagcattgatgttatgcttttgtgttgtttcttctttattccaaggtttctctacagtgctgtaaaaatgtcccctgcctagggcgctaaccaataacgtttacctcaagaaagcttaaaaaaaaaagaggcagtttttttcccatctcttaaaaaatagtgtccctctaaccaaaaggtgaggcatttccgcagaagttcagcaagagaagagaaccatttctgaggctttccttcatgtccccatccttttctaccgcaccccaccccctttagttactaatgaaagaatccaagagattagttttgaccagaagtgggttaggatgtgattaaagtgtattattggtgaatataaactttgccagaactagcggtgtggggtcctttcaaaggatggctgtgtacttcagatgtttcatgctagcatgtgtgtgtgtgtgtgtgtgt

SEQ ID NO: 128813 - DNA, 1054 bp, Homo sapiens
attttgtgcggagtaagagttaaactgccaaatcccgtcagacagccgtctgttgccccggtaacaccctgcagctgccggaaagagagagatggcgcttccgggcaccaagccttcattctcccaagtctcaagcgagctgtttggtgccttggttttctgtctggaaagaggggaatcgggagcccgtcccacaggccccctgcgtgccttagcagctcatgtacgatgagtatgtaccgagaatgttcttgtgttcctcctccctgcatttatgcagcaaaatgttctctgcgcacgaggtgccatgctaggtgcagcagtcagcagcaaaccaggcagacagctgcctctaggctgtgtcttgagtgggaaagtctgtggggcccccagatccctgggggaccgtggtgctcggaggagccttccaccgttgctcccgcatctctgtagtgagaggatcgagggcacgtgccctgcttgcatccatgcccgtagggctgatgtgcttgccagagctcagatgagccgaactgggaaggaaatgggctttctcagaactggcaaggaaggacttaagaaggacgtgtgtccacaggacccaggggacccgccatccatgaggccagagcttgctggtgttcaggttctggggccttggcaatatggtttcctaagctgagagcccaacaagcaggcttgtggtccagtccagttggtggcccttggcctgtccctttaagagagaggaaagggaaggcgatgtaaagaggagggttggatccctagtggaggaagcctgtaaacacacctgcacggggatgtggattctgggtttaacagcgccctggagcgctggccggggaaactaagtccgaatgcagttctcacagacgtgggctatgtcaggggaaagggctttagaggatgctgcaggtttaagcccaggactcattccgtgtgcagtgagagcaggtctggcagcgcgagtgggcccagctgcagctgctggggaaatcaagggatgaggggcccctgccctgaccaggtgact

SEQ ID NO: 128814 - DNA, 1038 bp, Homo sapiens
gcctcttacatgacccatcatgagggtcatcagaggaagtggaggaggagagcagacagggggcacagccatgtgagctgaagcctgtatgaccccgaggtgtggcaacacaggctctggccaggctccagggagggccttgcgggagagatactgtgggtggagtcaggggagaccgggagagctggcatcctctggtgggggatggaccaggggggctgcttctgcttcagactgagaaagaaccccagggcttctgggaggcagaaggccagagtcggtccctccaaatgtagattttttttttttttggcatatcttttcaggttggagagtggaacctgcctgccttatcaaagacagtggggcctctactctttatcccattaaggaggatcctagggccatgtttctgggctgagccgccccacttgatggcagtgattgtggtatcggtctcagctctgctgatggggcaagactgggggaagggaaaacatggaaggcccggtaatcactcttgtaagttagccacaatcaggaccccgaggttgggctggccatggagcagtgggagaagtgccccattgaaaaggagcagcctggggaggggcagatgggagaatgtaggtgcaggagtggattcggatcaagggaggagattcttcctgacgggtgcctttctgaaggaagaaatcagttatgaccagtttagcaggcaccgagggggcagggcccaccttggccaggggtgggctgttcgctggtgggagcccatgtgggtgtcacaccatcagtgtccagctggctgggttggctgcagctcctgtaggagcctgtgttcctgggaagcctctctctggtgaaaggcaaggtgggcaggctgtgtgcagaggagaaacccacgctgcccatgtccacacagctgtgtgggcaccaggacctgccgagatgccatcccaggctgcctgaagcagtagctttctgcagaagagacagggaggagaaagcattgtgcaggcacggagcagcaggcag

SEQ ID NO: 128815 - DNA, 1041 bp, Homo sapiens
actccgtctaaaagaaagaaagaaaagaaaaagaaagagaaagaaagagaaaagaaaaaagaaaagagaaagaaaagcaagcaagctggggagcagggttggcgactgtgggtagtcaagggctgcatggtgggcaggaggccctcagcgggggtcctgggccagttgctccaggtctccttggccctcatggcctgctgtaagatgaggcggactgactggttggatggtttggtctgtcaggcccctttctgctccagtcttccatggcgagaaacctatttattgattattgcagaccagaaaaattgaaagaggttgaaagggattctgagttcttttctggccaagattcctccagaagccggcagaatgaggttcttgatcatcatccagggggaagagtttctctttgggctttactcagcctttcttgcagtctcccggctcttgtttgcagggcaggaccatggccagctccctacgaacgtgagatcagcagtttctctttctaacctttatcacccgggataccccctgtccccactgcagagctttcacatcatggcttccagagcatcagatctttccagccagggtcctcacctacccccctaaacctagaggggagtctcaggtcaaagtgttccatttgggctgcaaactccatataatgggttgcaaccagaattctaaaactaaaatgagtaaaataaaaagtaccatagtgcttccaaggttgtaaggatatgtattatttgctaaaacatttgctcacttctacattcataagtgcgtgtgtgtgtgtgcgtgcacaatgagttgcagtgaaaaatacatttcttactcttgagttgtcagaagaattttaaaagcaatgagttcacagtcccttatcgcaaacctgaaagttttaagtttggcatgaggtcatttggcagcaaaacacaacctcatgtaatttaagattatttatactctttgtttatctcacttgctatgaacatttgtatgcttaactgcagaatggagttgtacctt

SEQ ID NO: 128816 - DNA, 1372 bp, Homo sapiens
ggctggaaatgaatatcaagcttttcggtgcctggagccaactttgtccaaataaaagagctttgtactgtgaaggaattttactaagtaaattttgtttaaaaaatccacgtgaattaaaggaaaggaaatgaagaagaagatcgtatcaatacgatgatctaaatcagtgttctgcaacttttctacccagtcatcagtgggagtgaatcagtaggaatgtggggaagggagtgaggggagacccccttcttgactcagcagtggtgacggtcggtgtgtcctgcagacctgaagccaagatcaagggcgcttgagcaccaggagcccccgcagttcctgaatgaccagcggagggcaggtgccagcctgtggcaaaataggaaagaaaaggacaggatggggacttcaccatttttttcagccttaaattgttccttaaaccttcatgtccttttctctaatgtatgttcttgtttggtaaaataaaaaagtttgtaaccctgagttctctaaagatatacattcttttttactggtttgtgaagtcagaaggatgagagctgctatttcttggaaccgtgcaataaatattagcatattcagtctcagttctgcctagaggacctatttgcttttctttatctcgtaacccataactcacaggacattaaccagggtgtccaagaacagtctgggaaagttttgataattacttcagcattgctgtgtgatgggagacattgttttaaaaaccgaatgtggtagaggttaaaaggacagccgtcaccatcctgtttcaaccaacgcttgactgagaactctttctggaaatctctcgaacagacttccaaaagttatatgtgaaaaagcactgaaacctcacataacgcaaagatccactgcaatacaggcatttaggaaatcatttacactaccttgctgatcacttttcacacttgatcttagccaaaaggccaagaagcgatgtggataacttttcaacctgtaaaatagccaccaatctgcaaaaaaactaattgaacactaataaatgaccaaaattgatgcaatggttataactggtattatttttatttctgatcatctacaatatcaagtttaagactgactgtatatgtcacagttttgtgtgattaactacttttattaattgtctttaaagaactgcacaaaagcgccctgaaggaagagaaaccaaggatgaatccatgagggattcgggctgtgtggcgattgccttcattttcccagtggaaggacattttccagagaaatttatgctgaatacccatttttatatctcgcccgattgagtgccaatcactgtgccaagggctgtatatatact

SEQ ID NO: 128817 - DNA, 1487 bp, Homo sapiens
tttcctcttagccagttctagccacaatattgactgggcccaggcatttgctacactcagaaggaattaaccaggcaggagaaaacttggtccctactggaatgaatagtttaaaggccatcttagatgctgaaaactctgagcacaaatgaaagcgacccaagaaggaaaaacttcagagcctaagaataaaaaatggtggtagggttgggggataaactcgcccagagctgacttaaagtgctgtcagggaaggaagtgcctttcctggggaggatgagatggtccatgccgggtctggagctgtgggcgttctgatgttggatagcccaccctagcaggctgcagtgtcttaagggtagtggcatgagatctttggaagtatcgatacatttcctaacagtgagtttgagtttgttctggtatgttctgaatggatatgtggctcaaagattaacttagctaaaaataagtatattagatattagggaaatattgttaataaaggtcttctgtccctgttggataactttagaaaataatgtagacaactgaacgtagtggagatgatggcatgaatacagtcagggtttgatgcttgcttcctagaaacttcctagaaatagaacacatctagacatagggaaataaggttccaaagaaaaccttacacttttattcagattttatgttggcctcagttgtactagaaaagcgtttcagtatgtgtctcttggggaatctgcaccttcttggtcactgcacttcatagcccggcatatcactgagaattcagaaatctgactctttacccagggacgaatacatcgttatgagttcaggtgcactaaatacataggaacacccagagaaaatgagcccgaaacaatggttctttttattttggaagtttcagacaaactctttggaaaattgaagaaatctatggatccttttcctgggaagactgtacagacatacgtattcgtgtggtttctgtgggtgtagggactggccctggtcatgtgtcaggaagccccaatccagaagatcgtcttcattttaccttggccggtgatctgactctgttctcgcgcccatctgtggttgattctctgtcgccttggaatggagcatcagatcttgaaggtcgctcattgcttttccacgcatagaactgagccacatggcaagagcttcctaatgaaatggacggaaactctctgcaaagggctgccccagaagcacgggtgatagaaatagagtccaaggcactaaggccgctgagccacagtcctcctaggcaatgcctcctgctggcttagtgggtttatttcataagttgagtactaatgtcctgttttttaaatgaacatatttcttctaacatttctaacaattatgaagattttctccctaagtgtgactttttcttatgtcttggggtatcagatttacagcgtaacatgtgtacttcaaattgtagt

SEQ ID NO: 128818 - DNA, 1064 bp, Homo sapiens
acaactttgaagagcatctttcttagttcatgtgctaaaagttaatgtaatagaagcacaaagactgtaaccgctattactcgactaaaaaaatagtttctaaaagtatgagatgcataagaacaaaatctataattttagttatgcatctgaatgtctgtcaccatgatgacaacttttaaaagaaaataaagacagaactaatgccactttaaaggctcaaattatgaatgtggagatattttgacccagtaaatactctataattaagtaggtggtgtggatgagtattgtgtaatatttattttgctttatgaaaactgccttgtttttaaataaaactttaatgttagacttaagagcttataatggtaagacgataaaaagtattaacttaaaatgttttgaaaattataaaagtaattattgaccatttctaagaaagtctttcctttgacattgtttaatttgtttcctttttgttttttaggtttgcaattttttttggtgatggcatgttcagaatcttggatccctaagttcaatatattggacatatttaggaactctggaaattatgttgttttcacatatctagtaacttactagatgaatcagtagatttcattaaagtatatctaataacagataattatgatgtacttctgggttgacatgcatgtctctcattatcagctatcagtattagtgtcatgctttggagacagttatcttttgaaggttttggggttcttatgaacctcatttttcccaggaagtttctgtaattcctcctatgcctattcttgtcttttctgtctgcttgcagtgtaagttatttagatcagaggcaattatttttcaggaagaaagaaatcatcaagtgacactcctaaaggcagtaaagacaaaatttcagtctggaaccggtctcagaatggcctgtattagaatatgcaaagtccacccaaattatatccaaatatacttgtggcacagtgctaccagtttttaaaatgagacgttactatgtagggcagaagtgccaatgaggagagagaagg

SEQ ID NO: 128819 - DNA, 1072 bp, Homo sapiens
acacacacacacacacacacacacacacacacacacacacacacatatgtgatctaagtagctgacttcattaaaatattgttaaatttaactctattaaaaataaatgtttggccaggtgcggtggctcacgcctgtcatcccagcactttgggaggccaaggcgggtggatcatctgaggtcaggagttcaagaccagcccagccaacatggtgaaaccctgtgtctactaaaaatacaagaattagcaggcatggtggtgggcacctgtaatctcagctacttgggaggctgaggcaggagaatcgcttgaacccaggaggcagaggctgcaatgagctgagatccatgccactgcactctagcctgggtgacagagtgagactctgtctcaaataaataagtaaataaatcagtgttttataatctcaggaaatgaatcaaatatgactttagctttgtagaaccaacttggatttcagttgttacgatacccagcggctaacaggataagacgggcaccactccattcaaaataggattgtgattctctgtgtagaaatgtgtacattttcatttttctgtgataaaaatggcttctaatattttatattttagtgtcatgttagagatttcattccatgctcatttgttcattcacatgtatttttatttttagctctaagcgaaagacatgaggcctcagcctgaaatgaggttgttttgaggtcatctgatttctgactagaaggtgagcgatcgcctcgtcctgaaaccacttcagcccgcatggtaaatggcaaagccagcgagagggaggccttcatgtgtttccgtgtctgtgctgccccagttccttcctcttcaagattaaaaacattttaaagttgtaaaccaaaggtattaaacaacatactgacatatcgtacctaaattagctcaaatgttttacaaaagggcttacatcataaatgctaattaaaccttttagagctgttttaacatggctttttaaagtgagctcttgtgagctacctaatcagcaacaaaatatttattatatgaaaaaac

SEQ ID NO: 128820 - DNA, 1248 bp, Homo sapiens
aggtgtagtaaaaatatggtataaataatcatctgggaccaccattagatatgtggtccatcattgaccagaatattgttgtgaatgtgttgcatgactggaaaaggagagctagacaacactgactacttcaggggaagagaactggcggctaatggcaaggatgaaaggaaaactttttattgtgtacctttgttcactttttgaattttatgcttttaagccatacagaaatattttttaaaacgttagctttatttacatcatgaagtttaagtatgtttctcaggaattttcttctttaacatcataaataaagaaaaactcaaaaaaaatgatttcatcatgccttctatgttaattactctttcttgtattttacatctttccagtaaatttcagttcctaaattcacacacagttccacataggaagctaaagaggcataatccagattaagaaccaaaaatgaaacagaaataggatacagttgaatcatctgtgtaacaaataaagaaaaagcctgggaactataaagctatggaaaatgaaagaggctcactgagatgaaccagagtgtacaaatgctgaattcaatacagtgccaagtatttagagtgtttttttgcattgaggttattgtggctgtgaacaaggattaccatccacagctagaagagaaatcccccgggacagaatctctaaaacagggtcctcagttacataactagcgatttatgaaatgtgcttatattgtatgtgatgtcatgacatcatttcttggtcttctgctcagaattaggtagtttgactataaaatctactatttggggacacatttgctgctctgcaaggttactgttaccattgctgcagtcaagtggcatatacttaagggactggagtcctgaaggtctgtgttgattctgggaggtgtgcacatatgtgggtccagtgttctttacaaaggccccctgtgtggcatctgtcgtacttcttatttgttcagcatatcccttggcttgtgatggaagatacacaatctgtacctttgtctgaaggagataccagctcctgagtggccttttacatcatccttaggtggggatagttaacttaaaaaaaaaaaaaaccggcgagggagaaaaggccgtcttagccatagttggcagcccctagccctttagcctaaggaagtctacagagactacggcacttgggtgcagacttttaatgaacccatctttt

SEQ ID NO: 128821 - DNA, 1023 bp, Homo sapiens
atgtgacgctagttttcctcaactcatggaaggagacttgggagatacactgccctgttacagccccttcggctgtggcttttgtacaggtttcctgcttcccctctcccagttttacctgccttttctttgtccctgtccctgttttgctcctttttgaatccagtcccagcactttctcctcagtgtgaggccttggcttggagcgggagccctggagcatctgttttccgagttccaggaggtgaggctcatctagtccctcggactgcactccctgtctctgtggagtggccagatccctcctagtagcagctgctggcaagaaatgggtctgctgtgcttttcagtgagtgcctcaggctgttggggtgttctgccttcccgagagcccatgcctcctctagtggctggtgcaggggcagtgactgctggggcctggtcactgcctccctacctgcgtgtgccttgctgtccacaggattctttgagttacgtaagaaatgatgtctgactttgggttttgctacttattctgcttttatatttcatttagagaaaattatagttttgtacataaaagtgaagaattttatcttatttcatggaggaaagcatcttttataaaataacacccttgttgtggaggccaagagagtaaaattgcctgttaaagctttgtaatttgcatttactattaaaggttaatggttttattctgaaattgccatagagtgggttagagaactaattgcttttattaatcattaacaagttactgaaaattatccagaatgtggcaactagctaactatatattagtgaatatgaatattgttgaaaatttcatcttgaggtcaggttttttttttttttattctgccggtgaaatggcccagataacttcattgtaaaaatattctggctttggaacataagttatttgttttatatagtttgcctgtttagagaatatagaacatttcaaataaaattagtcattttgtgaaaattcagaggact

SEQ ID NO: 128822 - DNA, 2119 bp, Homo sapiens
cactgggtaatgtggaataatctaattgtattctaattgtaattcaaaaattaataattccttcaaatagcaagattttgttagtattactctgtgatcatagtcagaaacaaaccaaaccgtggcattctgtgagctagtgcagatctgtgggctacagcttgggccattttaaagccccagtaatccagtaatatttttgctgaactatggaaagtaaaaccagtatgcttaggactgcataggaaacttctcatcattcagaattttgattggataattatatttgtttatatcagtggctgaaaggaatgaccagaaaagaaacactctgtccacaagctagttgaggatcaacatgtcatttcttggcatggcgctttagttctctgggttacttagttctgttcacttgttatacaaaagcaaacagatgagtgaaataaagcaaactgggtgttattgatattagaatgagaatctttgttcaaaatttgtatttattaggacaaacgttcagggaaagttcttcaggggcaagacatctcatcctgataggaacagattatgcttatgtggtgaggtgatttaattttcctttctcccttcttctttccttccttcagactcttcctccatcttacccatgatttattatgtatctagatttttaaaaatcccactcagtatattcgcttagctttaaaaatgcgttcaaccttgactggcgtagataaggccagcaacatgcccagatgttttctggaatcagagggctgagggtcttctgaatgtttcaggaagggcaactgtagagaagcaaagagcccttaaatacttcagagaagtttgggtaatacacttccccacagcctgtatctcacagctgatagcactaatgtccttagcattcaggccctaagattcccaagagtgtcactttttactgctgggaaaattttcttaagattcttatttgaattctatatactttagcaaaatcctgtgtaccttaatgtaaattgagaaaaaagggaccgctttgttttgatagtaatttgttaataagtttggtgattactattgtttgcctttttcttgtgatcttcttgactctaagtagtattcagtcttcagtttaatatccttttgaacgggacttgtttttttccttcccaacaagtactaagaatgatcccatttgcttttacatagccaaaattgtagtatgagtacaggtttattaattgttcttccccttgctgatgggagctactgggaacacgtaaaagctgatttgtaatagcattttaaaaggcggagcggggggatgtaaggcagaagggaacgtggatggatatattgaacaagcttgagaaaattaaaaaaaaaaaaaacttgttcaaagactgacaaatggatcgtgggtctggattttctgaactgagactctgggttcatctgctctgaatccaccaggcttccagactgcgccgttgcttctgctatcagtgctgcgtggtttagcatgagcttttagggaaatgtcacatcttgttcacatgggtagaattatattacatctgttcttactgagcatgaaccaagattaaaatcttgccattctcaacagaacaaataatagaaaattacagcaaatgatgtgcatgttctttgctcttaatcaattttctgcagtcctacaaaacttttccaaagtaaatgtaaatattttctttatacacacctagcaaatgcacagtgtatgattatatttttattagtatacatgaacttgggttaaagttcaataaatacggtttaaaattgggaaggaaaaattaaataatttcaaggttgcatactttcactagtagaaattctctacttttgggacaaaaattattattttccaaatatccaatgagtatgtcacttgcgggggagaaagaggaactggaagaatatcctgaagaggttagggaatgtggtaaaaggggcacattttaagggctactcacaaaagagtcttatatgaagcatattagtttgggtttattttttcttgggaggaattctaacataattttaagttaaggaaagatagcacaaaatagca

SEQ ID NO: 128823 - DNA, 1141 bp, Homo sapiens
tttttcccttcagttttaaacatatcagactaccagtatggaatactcgacccgtaattaactaataaggcaaggaatccaatctgcccaaatgttaaatagtgccatttaaaatttggaagcctgaagcaagacagtaaggctttggtaacagtggccaagccaagtggaatctttctgagtgataaaatgagcttgtaaaatgagcacagttgtgggagtatgcagtatcaagactggtgaagcaggtgccagtggttgggggcctcaggatgaaaccatggttctggccaaaatattgctgtttgttttaatctctaacgcagctcggataatatgaagctgtgctgcttgaaaacattttatatttcttgatttgtctttcccttccaggagtagtagacatgttgtcagcagatttataagaatatgatagaattttagaattaaaatttgagtcccttaagaattgtagactactgggaagatttgaagagggtagaggcagtcaatggaaagaaaagaggacagaagacaaggtacttttgttttctcttaaaagagttgaagggtagaccctgtttataggcagagaaggaaccaacagaaaaggaggattacatgtattctagaaactcttacttaattttcaagaaaactgtaaaaaatacactgactgatacctttccagcattagccaaactgtgagttgtgaggtgtgatttccaagactactctcacttctcacaccaactgcaagtttggggtgtttccaaaaccaccttcaggtctgacaatttgctggaaggactcatagaactcactgaaagctgttacacttattgttatggtttattaaagggaaaagatacagatcaaaggaagccaaaggaagccatggggcagagtctgggaaggttctaatgtgaatcttccgttctcctcttccatggaggctgggcattgttaccctcctggtactgatgtgtgaccgtacgcacggaatgttgccaaccaaggaatctcttctgatttttggtgtctagagtttttattagagcttcctgagatagcatgtttgattgattgattgcccacaaagttgaactccgtcaccatgtctactggtatcgtgtgagcc

SEQ ID NO: 128824 - DNA, 1578 bp, Homo sapiens
agggtaagactgagaggttcattttatgttcttggcttgtatgcagtatggtgggattagtgttctggtaattattccctttctcctaggcttatctctgcctatatttttgcatttgatgtacttgaacctaagcgtagaacttaaaaaattgtgttagctgtgtctgtccgtttcgtcatctttgcatttagaagcctgccattcctgtctgtgcacatgctggagggatatacgattgtataaatagaattgagcacagagacctgtgtttaaacgttttgttttgtttttttgctattgatggaggtggattcttttcataagagggattgtgttggtcagggtctcaatggcgactaatgaagtaaacacaaaggtttttagttgctccataattgttgggaaagctaaagaaactcaaggcgaagtttctaggcacagctcctgaagcagagtgaaaatccggttgtctgatttcttgccaggccctgcctagcactttcagctgtagccatcctgaacaactggtcatgttctcttgcttgtagtctttgtggatgctgttttctttctctggtacactcagtcttcctcttttcttggcgagtgcttctcatccttcaggccctattctaagtgttacttttaaatttttcctggtccttccataataatctcgctcagaccgttagatgcttctgctctctgcttccattgcacactgtatttcccctgtcattatggctgacgattgattattgcctttccccactcctcactgagtcccggtgcctggcacaacaccatgcttgaatgtagcaagttgggtggttcagaattgaaaagtcactgattacacgtttgaagcttcatcatcaagaaatagataccaatcaccaacttttaagttgtaatttataattttcataattgcaattgactcaacagatttttgctttggtttgagtgtaacaccctttataacatatctaatgccgcttgatggagattggataactggcctgtttgctaataattctttgaagtttggaaactgggaatctcagagatttgtaactagataaaagagactctaagaaataaacattttggccaggcatggtggctcacgcctgtaatcccagcactttcggaggccaagatggaaggattgcttgagaccgggagattgagcccagcaacatggtgagaccttcatctctaccagaaaaaccccaaagaattagctatgtatggtggcatgcacctatagccctagctaatagagagtctgaggtgggagcatcccttgggtccaggaattcgaggctgcagtgagctatgatcacgccactgcacaccagcctgggcaacagagagagactgcatctctaaaaatcatacatacatacatacatacatacatacatacatacataccttttattttaaaataattttaggttttttatgtttacagaaaagcttaaagatagcacagagtatccatatacacctcatcagcttcccccactgttaaaattgtttgtgaccatggtacatttgtccaaacta

SEQ ID NO: 128825 - DNA, 2505 bp, Homo sapiens
agaatcatttgaacctgggaggcggaggttgcagtgagccaagatcgtgccattgcactccagcctgggtgacaaagcgacactctgtctcaaaaaaaaaaaaaaaaaaaaaaaaaaaggtgatagcctagggaatggttgtgttactcagtattgacatgctgcttcaggggattttcttggattcaaggcgtatcttaaccctgttggtacctctggttctttggtgtacttaagcacatatctcctttaaacctcctattagtaaggtgaagtgggaaggtaggcaggtgggatgacctttgtttcacagatttgtaagcaaagctttagtgccattgtttcttaattaagtgatggtgttggtatgggagacaggtctcaggtatacaaggctaggagtggtcttgagaatattttacatgtgacaaatggatattgagaaatagttacatggttagagaagaacagtgtagttaggaattaatggatggaaaagaaaagggggatcctaagaatcaaagaccctctctattgtggcatgtatgtttgtgtgtatttagttgtatctgtctgcgtgtgtttgtttattgattgtgttttggccacataccttataatgtaatgcttttgaaagtgacaaagccatatatcttttaagatagggacttaaaacaagaacctcttgaattttcactttatttcattcttttctgcttttttccctttcggatcttttattttccccacaggaacccataggggagaagacttagaataacgtaaatgcaggggcgatgaaactgaggagaaagggctaatgacagccctgagtaagtgctgggaaaagagcctggaccccaggggtggagaaaaggaaaaagtctagcgagtacctaagtaattgacctcgttcctagcatggctgctatgccacacaattacagagtgtgatattgtaaaggatcagagaactgtgggctctgcttgaggcactttcaaacctcactgctctacctgaattgaagctgaagcctgtgggatgattgacttctgactttctggcagtgaataggcagacccagaagggaagtgggtaggaagtagtgctggcctggccctgtttatcttccccactgtaggcagggggattgtacacttgaaatcagcatgagagtggccccccaaaacatgctcacattactgtttggaagcatgtgtctgaagttagctacatagctgggtttgagggatggttgtctttgtgatgtctctctctacttttggcctgcatgtattttccagtgagggctggggcagggaccacagagaagatttagaacaaagttaagttccaacccttcatttagccctgtgacctaggtagaacaagctactctactctctttgccacagttcctcaactgtaaaatgtgataacaatgatacatttacctcagaggaagaagaaatgagtttatgtgctcaggcagtgcctagcacaaagtcagtgcggtagaaatgtggtctggggtagcagaccacgcaaacaacaaagcaatgcgttctattcctcctgagtgtctcgaccacattcagtgcatattttgttattcactattagttttctaaatgtttgcccttagactttgttgtaggacttcattttgtcgtagttacctatctccagcggatgcagggaaatagttacagatgtgacgaaagaaagacatggtgtatgcagatttggtggattttgtgagctttttgattctaggtgaggacttgggaaatgataatggtgacaagagataaagtctctgatgtgccagtcacattttccctgcaacagtaatcatttgttagaactcaatgcaaatagaaatatacttgataatacattcttctgggtaatataagctgtgcaatgcttatactttatgcaaaactatatgtttaaaatctgctcatgtttaaagaatggtgattattacgactggccctcacagagcatggtttaatattttctaacaatttttattattaaatttgtggattttatgatcattttaaatggtgctgattttattcgaaaataattttaggtttactgtggtattattttattaaatggttctagtttccttgttttcctgtacaagtagaaccaattggataaaataacctgtttctctttaaagaagagctgttttctttttctgtaagtgacatttttgcaggctcatggtccaaaacgattagctagactgagaataaggtaagtgatgaattagcaaaaatttctgtgaactcctaaaacactcttaccttgtagctatgctaggataggaatattggaggtgacatcactgttagtggtaatggcttaaattgaaacacttcggcttcttacaaagttctttttctggctcccaagtgtcagcctgacagaccgtcttaaaacctggaggttcagtgccttactgggttaaccagtaggccttt

SEQ ID NO: 128826 - DNA, 2047 bp, Homo sapiens
atactttgtatgacttcagtctttttaaattcattgagacttgctttgtggacaaacatagtctcttctggagagtattccatgtaaactttagaagaatgtgtgttctgctttgtttgaaaaaatgttctgtatatgtctgttagatctagttggtttatgtgttgtacaaattctctgtttccctatttatcttttgtcaagttcttctatctgttattgaataggatgtattgaagtctattattctagagctttctacgtctcactttagttgtgtcagtgcttgcttcctatattttgggactctatgtttggtgcatttatgtttataattattatatctccgattgaatttattctttaatcaaatatagtatccttctcaacttcaacaacatattgatattaagcatatttaagaaagttgctttgtaaagtctttgtgtagtaagtacaatgtctggccttctcagggacatgttctgtcagttaatttcgttcctttgaatgggctatactttttccttatatgccttaggattttgttgctgttgaaaatggggtgtttgaaaattacagtgttgtgtctctggaaatcagagtctcctctttcaccgaggtttgctttttttgttgtttttggttttatgtatctcttttttttgtcaagtgacttttcccaactatttttgtagggattatattccttgtcttgtgtggtcactgaagtctctgtttcttagttaatcttctggtactgttttttttgtgtgtggttttttttttttttttttttttaagagatggggtcttactctgtcacccaggcttggcaggagccactgtgcctagcctggtagtgttttgacagagatttccttgaatgccaggagctaaaacaaataaacaaacaaaaatactttttccagtttttgcaggttggctctttgctggggccctccttcaatagtgagccagacttgtgtctaggctagtatttagcctaaggtgaaaaagcttaaggtcttcctgggttttattctgagcatgtgtgtggctttctaatttcacccatatatatggatgcttttgattgccctaatttcctaaggtaactttcttcacgtcttttcttcccagacctcaggtcatgtgttgcatgtctcatttgtactctttgaccccaggtgtctggattgtttttgggcaatgccaaccacttccagcctggatgagttttgagttttaagcatgaaccttgtcaagtatccctgacaggttggaatggagtcactaaaaatttatgaatgcgttctacttgttcctattggaaccagggaccagggtcccattcttggaatatgggctgccatcacactgggaggagatagggcaaaggcaaataagaatgccgtaaagctttcctatcctttgaagttcttgattcagtgttcagttggttgctgtaagcatttcactgttttccagagttctgacaaagttagttctgacagttggtgcttgttttttgatggtttaggtgcagggaggtgtatgggcacttggaattgtctactctgacattttttcgacatctcccagtcagccttgttctcttgcagtagtccatttaaaaacccacagaagcctttccttctaccaccgccacacacgctgcaggcaacagatgccaccttacttgtcataccctcttcctgtatctccctggcaatcacctcaatttctgttgtatttttggtatagttattagctgaatactagtgttaatattttccctattaaatgttaggttaagccgggtgcggtggctcacgcctgtaatctcagcagtttttgagaggtcgaggcggttggatcacctgaggtcacgagttccagaccagcctggccaacatggtgaaaccccgtctctgctaaaaacacaaaaattagcttggtgtggtggtgggcacttgtaatcccagctacttgggaggctgaggcaggagaatcgcttgaacctaggaggcagaggttgcagtga

SEQ ID NO: 128827 - DNA, 1051 bp, Homo sapiens
aaagaatttgatgtaaaatctggcttgacataatttctttaaaaatatatacaaacgttgcataaaggaatattttaataaaaacaccagttaaccagtatatttgaaaccattttttcccaagtattggtgtcatgcttaagttttcttttaggtgactttatttttgacatagtacacgtaacagatcttcatttaccatttattatatgagacataccacttgactcagctaaacctccgtttctgattctataaattggaaataagagtaaccattttactcatcttagaaatggttataaagatcaaaacaaaggatttatgcatatgttggccaattcgaggagataatttcctagggttattacagttgtgagatttttccggtttcaaaatgggataatttgtaaaggtgttttaaagatgctaagcacaggtcagtgatgatcatgtcattttggaaacattcattatacaagctgggaaccttgtaaaatgagtttcacaaggtcatttgctttacacccacagagtagtgtatattgcagctgatcacattcttaggggtcagaaattaatattaatttgtcaggcttcaaatgtaaatcagcatttccctgtttttcttttgagaagaccaaagttgctaacctgtattcttgttcttggattatgctgtttgtaataaaaaaagatggatcatgatgaatgctgattagcaccttggggactgttgacggacggatgtgtagtgtattttggaaggtatggtgaccacgctgaggtatcactgggctagtaggagaaggaagcatagtgtacgggctttaaaaatcatatactgccttcagaatgaagtaattatcttcaggtagataatcagaaattaattgtttttgaggatttacagcagagagacctgaggagtagattttgcaaacagattctttatttttcttaacttttgattgcatttattttatgcggaatttattcctgtgccgtaagtttttatttcttcagtttcttctcaggtatctttttcttc

SEQ ID NO: 128828 - DNA, 1047 bp, Homo sapiens
cccataggctaattgatacaaacaagattaagtttctgtggcatatttctgttcacaaaaacaccaccaaacttttaagtaaagaccaaaacacttctagcattaaacgttgaaataaatgtgagccatacctatatttaagaaagattaatgcaacgtgagataattcttacccacttattccacctggtcacaggtggtcagagcctatcctaggagctcagggcacacggcgggcaccagtcctggacagggtgccatcccatcacagggcacactcacactcacacccgcacccatgtccttagactgggaccaggtaaatgcgttaataaacctaatgtgcccagctttgtctgggaggaaacccaggtacccagagagaaaaaccaccagacagtggcccggttgggaatggatttttcttatcaactgtgtaactaaatgatggtcaatgaaacgatgttatttgaggatgtgctgtatactaaaatatatggaattctatttggtttgtgtgttagtaacccctggggatggattcagatgatctgaaaattccttattgaggctgtgcatggtggctcacacctgtattcccagcactttgggaggctgaggcgggttgattgcatgagcccaggagtttgagaccagcctggacaacatagtgaattcccgtatctacaaaagtgaaaaaaaactatagaaattccttataaaggtgttaaatatctaaatatgacttaaatgtaaaaccaaaccagaaatgttttcatcgaaacaggtcagtatgttttgtaagttcttatagaaaaccataaaatatttaaaaaacagaaatctaccattctagccttgaagtttctaacagtcagctgtcttaaaatacctgttcagttagttccaagtgttaagttacattttctgacattcttaatgggcttttaaaaattaggttactaataaatgtaatataagtgtgtgtgtgtgtgtgtgtgtgtgtgtgtgtatgtgtgtatatatatatataaaatatgtatttat

SEQ ID NO: 128829 - DNA, 1476 bp, Homo sapiens
cttattttatcctgggacatgttcatcctgggttatgtagattcattcttggagatgttagtttattctgcaggccagtttcactagaattaaagctctgtttcagagtgtagccttcatgtgcccccacaccatcattgagtgatggagagcccagcagatactgaggtgactaaaccagccacccccatgcccactgcttgcacaaaaggaaggtgctttgatatgactgatttttcttagggttgttttcttttttgttgtttttttctaagtctttctcattatttgtgaaaaaatcttggccctcaatagcttcaaaacgttaacatgctgggaagaaccactcgtgaaccaacactccttctccatgatactgttgtcattcccattttgccagtcatgtgggaaggaatccatgtcccggagacatgtgttgcagcagttctgacatgtttttgaatcagcgatggtgtcacgatgcagcttttgagaatgtcaagtttcagttgcattgggaagttcttgtttgggagatatcctatagtgtttcaaggttaagtgacatttcttacctttcttatgctttgttggcccttgtctacaataaagaactgaagtggagctatttttgtccacttttacattctgcctccaaaacctagccatagggtgggatgctataatttcttgatgcagcattggtatttgaacaacacacatgaagcaggaatggttttacattttggttcatttgaaatatggttatagtgaggttttaaataaatcatctgagctacagtaaacaaaaaaagagcaacactagccagttgtcaaggaaaagactgatgggtagaataaacagactgctttctgcagtctaaacaatctgttttcatggtttttttctctttctttttgaagggtgattgggagaacttccaaattaagtagaagttagttaaatatgagaggcagtaaatccacaatgcgtatgttagtgattattacagcctgttttctcaatagctctaataacaacaatgtcagtgactgaacacagtagaacagtattgtttgtcgtggggtggtatggctggtggtggcttcgacatcctcagggctcaacacctcagcattcagtcagagaaaggaaagaaagtatagagaaagtataactgtttcttaaaaactctagcttgggccaggcgtggtgtctcatgcctgtaatctcaccactttgcaaggccaaggtgggaagatcacttgagtccaggagtttgagaccaacctgggcaatgtaggcagaccctgtctctacaaaaattaaaaatagatgagctggatgtggtgtggcacacctgtggttcccagctagttgggaggctgagatgggaagactacttgagcccaggaggttgaggctgcaggggcctgtgattgtgccactgcagcctggataacggagcaagactc

SEQ ID NO: 128830 - DNA, 1130 bp, Homo sapiens
actgctgacctcaggtgatctgccctccttggcctcccaaagtgctgggattacaggcgtgagccactgcacccgtccaaagcagctgttttcaaaccttggctgtgcatcagaatcacttgaggagccagatatttgagatctaccataagagactgtaatccaagagatctgggatgggcccaagaatctatatatttaaaaaatctaggttttcagaaagttccctaagcagtacacagacagggatgagaagcatagttgtacaggctgatttctgccaatatctatgagttagttatcaaggagaaggagcatatgttagaattgcttgggaatttgttttttgtttttggtaaactttttatcactaggcatcttagatttagaggggcggaatggataaaagaaggtcctcaggtgattctaatggattaccagtatttaaacaatctgaatggaccttttagctggagtggcttggcaaaaagtctgtattaaccaaagagttgctgttgccatatattatgcctggatttagaatgcaggaaagacatttaacattaaaattatgacatataattgaggattcctttgatccaaaagcttctttctttggaagtttgaagtatttcaaggtcattattatgaacacagatgatccccattggtgctcagaagtgccaggttagaggcattttattatgcttggaaattgatatttcaatccagtgaattttgtgtctcaaattcagaaatgttatatttgttgtaatcagtgccaaggataagattcctaaaaagaaactggtgaatgaaagaggagacatgacctaatagatactgagtgtcattagagacaggaaagaagggagcagagaagaaaaatggcctacctacattttgcttgatagattcgtggggagaacagccaggagaggggatgagggggagttggatggtgtttactggtaagatattagtgtggcacatcagcaagcatccctgcatctgtgcacactcaataccttccctttgcactccacctagaaatgtacatggggatggtgagaaaatccgagaaccttgtaacggagaagctcagggccagaaatcctaggagaggctgg

SEQ ID NO: 128831 - DNA, 8761 bp, Homo sapiens
agccgaagtgtgggcagtaaaaatgttggtgtcaggttaaaattcctgagagaactgtttctaatggaatctgtcctggacacttactagtagtaagctttgagacagaatgaaattggagtagaataaaatcccacctccattcacctaaatgttaattgtttcttggcaaagtggaagtccagattttagggcaaactgaaaagtacatttaaaatgtcaatttagcttttgtagttgtatgtagggtagtattttttttttttctgatcttaactttcctctgcattgatataaagtgcctgtgactttactgtctagttttttttttacatcttttttcaagattagaatatatctctaaatatttcctaaagttaacttattaaaagacatgctaattttagtaagttatttcttctaacatagctatacttcaaaagcagtatttactgaggaaggattttattaaaaaaattttttttcccagttagatggttttgcttgaaatactgcaggaacatggtctgctgttttaatacctgctagccatgttgtttgcgttgaaatcattcatatgtaaaagctttagaggaattcttgttttaatctttcggcaaacaattgcttgtcaatgtgtttgaacatacatcatctctgtttttattgaagatcttttggggttatagttgttgccttaaacatatttgctgtggaaactttgctatttcttatggtcacataacataaaggttaagatctaatatttctatcatttggtttgggccgcatctctaagaaaagatgtcagtgaagttgtacattgtcaaaactgattccattaacccgtgaatacttgtctctttacattttttaatgtaaaattatttggttatagcttggacagagcacaacaccgatttaataaaacttagtttccctcgatattaaagtggggcacttctctgcatcttgccattcctgtcaagatggcaaatacttgacgtcttttatcaaataactttacagaatgtaagaaaatattttggctgggctgaaattggagcatggaagaatggttgtctgtagaatgatgtggccccatgaacctgctttgcagagcactagtgtgtgattaaggtctttttcatgcatgccttactcccactaattactaaacatgtaacagcgtctgtacagcttgatgtgctttatttttcaggtgctttttgtggggataactggcatgtgaatcacttattccaggagcaggagtcacattgggcttcacttttgtacaatgtgttgttaatagagagtgagagcattttcttggagggtttggctttaggagcagtgtgatttagtttgcctgttgcattgatgtatgcaagttttcctttctgctattgtcctttctctgcttttgtgttacttttagaggttgcttagtgcattgtcagttctcttcagtcaagaagcaacagttctttgaccaaaatttcatggccacatcattaatctcccatttaatggatgtagttttatgtgtgtgtttgcacccttctatttcagagtaaaaggaatttacttaacttgtttataccacttgccatatttaagaggatcgtcagtggttctttatcttgtgagatgggatgtggtagagggttgccttcaggagagtaaaaaggaaaaggcattttgcattttataatggcaccatccagttgagcggtctacagctctgttttagcgttgttttctgatttgagactggtggaatttggatatgcagctctctacaaaatctgcagtgaatgttgctgggctggtgaagatgctttattatttttttaatcactcccctgccctcctgtctgctcctctatgtagggatacttagtttattatgggtctttgttcatgttgactattttacaagagtggttcttagttctggctgagaatagaatctgttgcagcacttaaatagaaaggccgaggcactgctggacctgctgaagaagactccctggggaggacacaagaagtcatagttttagaagaaccacaagtgatcacgtgggaaccccacgcttgagaactggatttcaggcttattccacttggagaggaatattagatttgtgttcttaataaatatgatggcagaattgggaaaggaatgatcgggtaccattaagtttggcccctggataataccataacaaaatgactttaccttggaagcatgagtgtctaaaagtacctcaggtgtactcaagggtatgcactaatggtactccatgttttctgttttttttggttgttgttgttgttttttttgttttgttttgttttgtttgctttttgagctcaagtattaatctcattctgaaagaattcgcaaattcaaaacagtgttcaataaatgtagcccacttctctttgccttttatgggatacaaataatgtttatgttgcgtgtgaaaggtataataattctgtttaattctgaagtgattctattaaataggcttgaggaaacataactgggattatgagtggtgttgggataagtgatctgtaatgtccctctaatgctaagattttgtggtttaagaatggtaatattcaatatttagatacctacaaatgaggagattcgtttgtgtggggccagggtaccattatagacacattaatagattgtatacttgcatttgtgggctgtgtgggtgtgtgggtagagagagagtgtactttatatgcttattaatgggtggcaatctaattgtaaaaatagcttttttttttttttcattttatccataaacttaatggaattctggtttaaaagaaactcagtgggaggccgaggtggcggatcatgaggtcaggagatcgcgaccatcctggctaacatggtgaaaccccatctctactaaaaaatacaaaaaaaaattagccgggcgtggtggcgggcgcctgtagtcccagctactcaggaggccgaggcaggagaatggcgtcaacccgggaggtggagcttgcagtgagccaagttcgcgccactgcactccagcctgggcgacagagcgagactccatctcaaaaaaaaaaaaaagaaactcagtgggatttttctgaggggaaagttgagtaaaattgatctaagaaaagtataaatgtgtttgagtagtcaaaaaaaactttgaagaatgttgagacttacctgatcaggaagtggatgtgctataatgtgtcaataattagaccaatgtgcagagaaattaagcagatagttcgcaaaggagaataaagagtctgtacatatattgatatgttagtgagaatttagtacatagtaaaggtggcattgctaatcagtggatagaaaaagaattatttaacatgatattagcagttgactatccatttggaaaaaaaaatgaatctctaccttaggtaaacagaaatgctaaaagaatgaaaggtgtaaacataaaatgttaaactgtaaaaacactagggtgattattttttataatgttgcagtgggcaagaccctttggtaccatcaaggaaaagaaggagcagatttaaccacatgaagttgcctcacctggtttcttcccttctccctcctcccatctgaaaaatccagaaatacttgcttagctgtgagggtaagtgggttaaattgagacagagatacttcctccaggagaatgaataagaagagaacatctctaaagatttatttcttgtttttgagtgaacagtaaccctaaaaacttgacatttatggtaaattttcaagggaaggggatgaaaaaatggcatgctttggagcgaaattgcaactggggatgcagcatagtatttccagaaggatccagaaacaaagtgtcaaaatctgtattgtaagaaggctggtgctcctgaaatctagcaggcaggtgcttactagaagtcacaagttgttcatttctgtcttcaacatcatttgatactatagacttattcataaggtcaattgcctagtcaggcttatgcagtgcagtggatagattctgtaatgttggaaagattctgtgggatggaaagattctgtgggatgcaaaaagaaactgtgtctctgatgttgccattttcaccccaggatgatttgctttacaacgtgctgtctgcaaataagtttgtggttaaaattttagtttactccccatgatgtgctattcatctagtttcttctcatcaggaattctggatttcttatttgcctcttaaaaagtaaaacttttaaaaaatttatgaaaatataacctcatttaacaagttcattgacttttgactaattgcctaaagacaatccactgcttaccgctattggagatacttaagaaaagcgcaggacatagcctggtatgaagggaatgactggtggaattaagaagtcaggtttctcactctgcaagttacaaacaaccactggcctcagtttcctcatatttatcaaacaagcagttaaatggattgatctttaatgtcccttcagtgtaaaaaagttcattatgctacaggtatttgtgctttgaaaatagctttaaagagggaatttcagattctggtttgatcacttaatctatttttaaagcaagtgtgtatgtctcctaggtgctgattcggagtagagttctaagtcctgccatggattgttttgacttattaaacaaattctcattttgtgtcacctatgtatagggacattttggagatctcattagttaatgttaaaatttatggcagactaaacctactgagaaacttgtgctgactttatcagctaattttgtgaatttgcaatttcagctaaaattaaactatatttttcagtagtcttttttttgtaatctgtttaaaatttttagtggtagattaagctaaagcaatatatgcgtatctgtttaagccaagtattttggaggtttttctgaattgtttaccaaggttaatttcttttgtgggggggggggggtcagaaccttaaaattacctgctgtaatttgttgtttgagatgtgttctttaactttgaaaagttagtgtttgtaaaaaaaaaatttttttagtgataccatcaggtcacttgagctcttttaggaaataattctgttaagtgaatttttttgtttgtttagattaaggtataagttctcttttgacactagtcgaatttttaggaaagatggaatttgctgagagaattcagtggctattgttacagtgacattaatatagttctacataaaattctacatgagatttttcatttctgtatttctaatgtgggtagatcttggtatattgtattattttaatatagctcaaaacatactacagcaccctatggtattttacagatttctaacaaaaaatttcttctcattgacctcttttacttttgaaatattaaacaagtggtttaaaaaataatttttgttttgaatggagtgtttttgtcttcttagtttaaatgaggaagcaatttctgttttatcttggtcactgatttagagcatggactgtgctcatcattcatttctaggaagaaattagagtattcatttcacagagagctacatattgttttcttcaccaccctcttggaggaaaggtagggttgataattacggtttgccctggccacatgctttcactcatgggtaggtgagctaaaacattcatatcaccatgatgcttccttttctttccgtcttaaatagacaggacaaatgaggaaaggcagcagatttgaggaagatgccaaacccatggcttgggaagcttgccagtgaagttgagcaggcagggcaatctagaactcaggcccctccagagggcaggtgcctgactttctcacttcagctgtgtttcttcaagtgtggcagagactcctgtgttaggagagcccacggggccattaacatgcggattccaggccttactacagactccaggatcagagcctcagggagttgggccagggagtgtgtatttttgctcaatttttattattgaagctttgaagcacacagggaaatagagcagtataatgaacacctgttaccattcacttggcttcagtaattttttttctaaagaaacagattctcactctgtttcccaggctggagtgcagtggcgtgagtatagccccctgcagccttgaacttctaggctcaagcagttcccttgcctatgcctcctgagtagctggggcttgaggcgtgtgccaccatgctttactcgtttaaaaagatttttgtaggccaggcgctgtggctcacgtctgtaatcccagcactttggaggctgaggtggatggatcacgaggtcaggagatcgagaccatcctggctaacatggtgtctctattaaaaatacaaaaattagccgggcgtggtggcacgcgcctgtagtcccagctactcaggaggctgaggcagcagaatcgcttgaacccgggaggcggaggttgcagtgagcccagatcgtgccactgcactgcagcctcagtgacagagcgagactccacctcacaaaaaaaaaaaattttttttgtagagatggggtcttgctatattgcccaggctggttttgaactcttggcctcaatcagtcctcctgccttgtcctcccaaggattataggcgtgagtcgctgtgcctggccagttgttaatatagatatatttatctgtatgtgtgtgtatttaacacatatcctatcctgatgttgcacctctaaatacttcacctcaaatatgaaatgtttagaatcattctacaaagctacaatattattattgcacctaagaaaattaagagtatttccataattatccttaattcgtaaaatcatctaatagctgttttgtactcagatttgcctagttgtccccagcaaatttgcttgtgggttttttctcccctccaatcagggacttgataaaaatttatgaattatattgctgtttctttagaatagtccctctctgttttttttttttttttctcatgacattgacttttttccagtgtcctgtccatttctcttgtctgctcatattttgcgtttcctgagtgtctcttgcaggtgtcgtttgcactctgtatttctagtaaacttgaagttgcatctaggggctgaattacattcaggcacaaatttttgtcagaagtactgctttcttcatgttggcatcatatcagtaggcgccccatacgtgttttgtcccactattagtgatgctaagttttatcccttggttaaggttgcgactgccagatttctttatataaaggtagtttttcccttggcaatcggtaggtaacttgtggggtcatatgttagcaaagtatcagtgtctcttttcctaaataccgtttaccttatggttttagtgtcttttgggaatccttgccggaatcaattattaagtagttgttgttggtgggtgtatgtgttttaaacaggctccctggtaattctaacctttaaggtttgatagccactgctgtcctattaatagaactaggagctgagttatcaggtctgttgaatgggttgccagtaaacagttaatgagtttaagcttcgtgttcattttagagaaactaagatcaataaagtgcctcctaaggccccctatgtcctagtttagttgttggagaggacatgtgtgtgatacttgcagtaaacttgaggtgagccctgctagtgtgttagaatgtatgacaaaaatccaaggagagtggaggaggcgtagagaaattactaaggaggaaaggaaactatattgaatattctgtttatatatatagtctcacttaattttcacaagcattttgtgcccattttacagatgaagaagtgagcttaaagtgataaagtaacctatggcactggtggaggaaacttttgaagccagagctcacagagctgtgggcgggacagaattagtttgctttacctctgggacgttgttgtctggcttattgaagatggaggaatgatattcttcaacctctggggcctcttggtatataagctgaggttctttgagacctctgatgtctagtctaatgtgttaatattaaactctgcagagcttagggtaggcttgtaagtcttgtagttgattgtaactgctgatgaatcaaacagctgagtaatattaatacctctgggtctgtgtcttaggacacagttttcagtacctcactccattctctttctcagggtagatgcaccttacaaccccgtgacttccacattacacaaaggaatatgtaggtttggcataccccacaggtcccatgtaaatactgcactcaaatatgttggttctctgttgacctgttggaaacattgagaacagcagttgtatcccaaggatataaagaagctgttttcttttcttttcttttattttcctttcttttcttttcctttcctttcttttcttttcttttttcttttttcttttctctttctttctttctttcttttctttctttctttctttcttttctttcttttctttctttctttttttttgggacagtttcactcttgttgcccaggctggagtgcggtggcgcgatctcggctcactgcaacctctgcctcctgagttcaagtgattcttctgcctcagcctcccacgtagctgggattacaggcatgagcca

SEQ ID NO: 128832 - DNA, 1011 bp, Homo sapiens
gcgccgcagcgccgccgccgacgggggggaccagccgctgcagcctcccgcggcccccggcgccggccgccaacccccgacgccctcggccgcgcggccggagccgccgccgccgcaggtggagcggccgtggctcgactgcctgtggatcgtgctggcgctgctggtgttcttcggggacgtgggcaccgacctgtggctggccctcgactactaccgcaagggggactacgtctacttcgggctgaccctcttcttcgtgctggtgccgtcgctgctggtgcagagcctgagcttccgctggttcgtgcaggactacacgggcggcgggctgggcgccgtggaggggctcaccagccggggcccccccatgatgggggccggctacgtccacggcgcggcccgcggtggcccaggcgtgagggtctcccccacgccgggggcgcagcgcctgtgtcgcctctccgtgtggatctggcagtcggtcatccacctgctgcagatggggcaggtgtggaggtaagagcactgcggggtgggggcgggccggccctgaggagcccccctccgccctcccggtgcttcgcggggcggcccctcgaaagggcccagcgcggggggctcgaaggagggaccggccgcgcgccgcccctggcgtctccaaaagaccggcgtttgatctggatccctggccacgcctttggcccggggaggccgagacctgccgttggcccgtcctcgtccccgcttcgcactcggcggggctcttgccccaacctgccctccccgtcccctctgcagagctccgttcccaagcgtcccttttccctgcctcccgaggtaaccagctgcgggcgccctgggctgcaccccagctcgcggccccggggagccttccctcctccagccgctgcattcgggtttgttcccaggtgagacatcctcccctcttcccccgttctccctctgcagtggcctgcgtggggccctgtggaaaaacccttgctgccg

SEQ ID NO: 128833 - DNA, 1082 bp, Homo sapiens
tcagtccggcattctcattcccatctgactgtagacctctaggctgtatcatccttttttacagttactaacccaccctgatttcaaataatttacataagtttatttaggtaataactggattttgagccaagaccttactgactagccaaaaactgatccccagaaatacttagacctttttattaagctttattaattgatgtcgaggtgttatttcatttttcttctagaattggtatgcacatttttttgttctttttttcatcccgtcaacacttttgagtgtgtgttatgtggcagatgcctttgttagatactagaagcaaagaaatcagcttcagtaagactaaaattgtatctggtgataaacacaatgttagagaaacattctgggtgcccatcattattagaccatgtttgcttaatactaatttgtcagttagaatatgtttccagttgtggatgtttcttttttgtctttcttttctttttgcccccaggcattgtctactctggactccatcactctgatgtaccctttcttttaccgtcctatgtttgaagtgatagaagatggctggcattccttccttcctgagcaagaatttgaactctattcttcagctgtgagttaacttttgagaactgtggattatgagaagtaacccaataccttatttgacttgtgaaaatgatcacttcttttgaagagtaataaggtgaagttgacttatccattcctaatcttaatatatttaaaaggattgaagccatgcagagtatgatctctgatcacaaaggaattagattaataatcagtaatactaagatatctaggaatacccccaagtatttctaaattaaacagaacgcttgtaaataatctgcatgtcaaagaaattagaaaacattttgaagtgagtgataatggttatgtaacatattgaaatttgtggaatacagacagctaaggcagtgtttagagataaacttacagctttaaaatttttactagaaaggaaagtctaaaattattgacctaagcaccaatttaagaagctagaaaaaaaaagcaaagt

SEQ ID NO: 128834 - DNA, 1733 bp, Homo sapiens
aggctgggcatggtggcttacgcctgtaatcccagcactttgggaggccaaggcgggcggatcatgaggtcaggagatcgagaccatcctggctaacacggtgaaaacccatgtctactaaaaatacaaaaaattagccaggtgtggtggcgggcgcctgtagtcccagctactcaggaggctgaggcaggagaatggtgtgaacccgggaggcagagcttgcagtgagccgagatcgcaccactgcactccagcctgggcgaaagggcaagactccatctcaaaaaaaaaaaaaaaaaaagactcatttatccatttacatttattctcagatgataaaatatatactgatactataactttcttatggtatcagttttctttattttcttgaataaaattacttctaccttcatttggtctttataatccactgtccacagcatcttcctttaaaccaatagtcccagaagagaccctctgaaattctaggactggatattaaaatgcctgaacctgttatctaaatcctttttaagaaacttaatgttccagctcttgaactacactgtggaacagtaatttgtgcccaatttagtggaagataatgaggctcactgtaaacactacattgtcctgcaaagtaattctgatgagagtttactgacttctagagccattctctttaaccgtctgcaggtctaaggattaactatatttgtgatttgtaataaaactgagttgtacaacactgcctgtgtttgtctggccaagacatttgcttcacttttaaaatgcacgttatctttggagaggtgaattattctacaaaatgcaccctaaatctcattgtttaaaaccttactgatctaataccatctacacaaaaaaatgttgtagttgcagaacttagtttataaaaacaaagaatgtgtatttcttcaatagccgggtatttggattgttctcttgataatatttgaatgtgactcttggatttaagtgcactattattcatggcttatacaataaaattgcactgtatggcaaatatgtctataatgtatgctttgctgaaacctcaagagtgctgtaaggtacaggtttccatattgtgaacctgtgtacgcacacacacatatacatacagtcttagggaaaaaaaaaagcagaacttttgtaagtctgtgtaacattttaatattgtttgtaatattcactaggtgataatttcccctgtaccctataactgtaatcattcaccttgggttggccggtttgtcaagcttggtttactgaatcaagaaagagtcttgtcgaatgtggtactgttcttagtgtgtaatatttgcgtatggtgttcctctgcctcagaggacagttgcacagatggctagtgttaaatttctatagacgatggtaataaaatctgaatatatttaagtgctaataaattaaatctgtgggcttatttgaatttttttttcaaatattggtgaaggtttggatggtgtttcaattaaatctatatattttttaccttacattttgaaaaaattgagatctgcaaaaaggctgcaaaatagtacactgatctccctagattgttcctatattgaatgattggtaaaattttccatatttgctttaataccacgtgtgtgtgtgtgtgtgtgtgtgtgtgtttgttacactgttattttgctgaaacatccgagttagctgcagacatt

SEQ ID NO: 128835 - DNA, 2875 bp, Homo sapiens
attagatcccagctggtgtcagcgttgtgcggtgtcagttctgaatctcagtttggcctttgtttggctggactctgtgtgagcaacactttatccctttatcacagggcctggctcacaggaggcccttgactggcttcctatcggcgaactcagcagtctctttagttcgattcctgaatctaaaagcatagctttaaaaaaataaaataaaataaaagcatagctttgctcattcgctgacaatcttagcgttcattttagctgaagagtttgttttgaagagctggagggataaaagttcacatctttaactctgctcttttctcacaaggtatttgaaaagaaaatgctgttcattaggatgctgaggcgagcggggcagagcccagcctgtggctgttggacgcctgtcctgccggtccgctttctgggcatctcccctcggcaaattccagcagatgctaacttccactctgcgtctttctctgacacagaccatccacgagtcttaattacaggttagtttttcttttcttttttctatttgcatggcttgattctttcctgtgctatgtgtctgtgcctttgcttttggaatgtgtaatatgctatctgaaccatactgcctgtctctgtagccgataatgcagcaaaaacaggcttggccagatgacagaatctggatctattctctatactatgaaaaggatttcagaatgaggtattttataatacaaaagttttaaattagagcagctgatcttattgatcagacactgtctttttcactattggcttttttgtttgtttcttagaattttgcaaatccaaatccttatttcatcactgttgccagcacttggttttgcctgccgtaatttttgttgttgttcgaaggaatctaggaaactgggggccaaatagctgctctggaacttggtttccttccatattaggatcagtctggggagtgaaggctagtggacaggagggtgctggggctagaacattgattctggtgttaggcacgctgttccttggccagagtcctgaacctaaactcagagtcattaatcccaaactgttattgcacatttgcatgttggaaatagagaaggtaagttagcgtctggtcaagggacttgttgctgcagtgttcattgttgtcctcgagcccatcatggcccttgagctcattgttgccattgaggtcatcattgccagtgactcgctccctgaacctcctcacctcaaatatgttcagcccctgattttgtatccttctcactccagactttactctgtcacttccagccagcccaaacctacctccagtttgatggacatgttttacttctttctctttcttgccaggctttcttcccttggttttacagcattatccttctcattttcgtgtgtctgtgtgtgtgtgtactctttgactgccttgtccacttctggtgctgaaataagtttcaagcttagtagatgtccctctctgcctttcctcggattcacccatcgtgttgtccgagtgtttgttttattccctctcacctcccctaatgatgcatctttcagggtgtcctggttttattcccaagttaacaaatggttacaggaagtcccacttttatatcttcctgcctcatcagtttctctcaaatgaaatggactgttgtccttacccaaatgtgctcctagcccactggcctcccgtttctatcagtggcatgtttaattcttcaaactagaagctgcactattcactttaactttctcagtggtgccttgttgattcagttgtctgcccctttttcaaatgacttcttggtttctccctgcctcttttccctttcatatcccagtccacttctaatggaggatgggattctgcctcatgtcaccagaggtggatatgaatctgttcatactggttttgaatgattttgtcacccatagcagataagcttcaaagttcatgaaaataatgaaggccaagattgagttcctgccccaagaaattccagacctgtgtctggctttcatgagatttttctcttctaatgcccttgcttctcctctttctcggaaccactccatgctggtaagtgttgtctctgaaacgaatgttacctgtattggtctctgtcctagcatgggggagatcattgcatttctaagcgctgcaccacgttcctgggaagattggaagtaagcagcagttatatcagtgcaacctaggacttacgtagttagctaagactgaaaactagtctcactcagttattacattctgggaataattgaactgtttagatttgcattaaaccttcacttttttttcttcttcatctaggggctcttggccagctgggagtggggcttgctaatcttttgaggtaagagccctaaaaacttgaaatttaaaatctgagttgttaagtatatggagctcattgggatgccttttaaacttcttttctctctcctcttgctccttaccattgttaagatatatctaaataactgctatatatagctatagatatagatatatagagatatagatatagatacagattttttttttttgagttggagcctcagtctgtcacccaggctgtagtgcagtggtgcaatcccggctcactataacctccacctcctgggttcaagtgattctcctgcctcagcctcccgagtagctgggactacaggcacataccaccacgcctggctaattttttttatttttggtagagatgggctctcgctatgttgcccaggctggtcttctaactcctggcctcaagtgatctgcccgcctcaagtgatctgcccacctcacctttccaaagtgctggga

SEQ ID NO: 128836 - DNA, 2520 bp, Homo sapiens
ctattccttttcaaatgtgcaccttggaagcagagtgaagccactctgtgtatacagggctgggaggaacagcacccactctggagcccgatgcctagctgcagccccatttcctccacttgttctctgatcctggcaagttgcttaacctctcggtgcctgtttccttatcagtaaaatgtgtttacctccaaggctgtgtgggaaagaaatggacttatgtccttaggacagggtctggcccaggcaggtcctataggagcatttgctgtcattacctggcgcggggtggttgtgacttgtgattcttccgtaagaaaaatgctgcctagtgcccagctgtcttagttattgcgtggctaccagtgaaattcacaagtcaacgggggaaaggggaaaggtccatttagttcacaacccttttcacgttcgtggtttcaatttatgttccttgcaggtccattcatttattctgatatcttggattacaagaatcttcgggagatcgtggtaaacaaccgcatcacctggctgtttcattacagcgctttgctcagcgcctttggagaagcaaatgtttccctggcgagagcagtgaatataactggtaagcatctggctctggctggatgtgatttatttgccagtttttctagttctttaagaagagatgttttcagattctgatagtgtctgttcatttcaggcctgcataacatcctggatgtcgctgcggaacacaatctgcaattgtttgtgcctagcacgattggggcttttggacccacctctccccggaacccaacccccgatctctgtattcagagacccaggaccatctatggggtgtccaaggtccacgcggagctcatgggagaagtaagcatcactcagctggattgctgaatgtgccctggctgtcacgatttgctgtttgctttctcattcgttttgcctccaaggcctggtgattcatccctggaggaactttacctcttcttggatcccagccccagagtcgcttacttaactcactgggtttgccatgtagcaggtgtctccagctcctgaaacctcctcagccatatgggaacactcagcacttcctgggtgccccgtgcccagccccgatctcttcatttgctgcttgtcttgtactccaccattctttctggctcctagtattggtagccattggtagtaactctaaaacctcaaacatcttgggtttgttttgtttgtttgtttgttttatgagacagaatcttgctctgtcacccaggctggagtgtggtggcgtgatctcagctcatagcagcctccgcctcctgggttcaagggatcctcatgcctcagcctccgaagtagctgggattataggcacgtgccaccacacccagctaaattttatatttttagtagaggcagtgttttgccttgttggccaggctggtctcaagcttctgacctcaagtgatccacccacttcagcatcccaaagtgctgggattataggtgtgaactactgcaaaatactctttatctttataactctagtagattcgagttgctgcctgctcctccagttctgtcatagccatggccctctcatccactgttctctcctctgcttttccccgtgctgcttgtgggaatgcactcaggctgaatcgttcagaatgatgatcagtggcgcctttccaaagagtggctggaaatgcctactgtagactaatgtgtcatttacagcattgatgtaccacctaaaagttgatttcttttaaaagataaaaacttaggagtctttattttctttaggagtatttaaatataactgcatggaatgagatttcagaaaaaggcagggtgttttttggttttttttgtttttgttttttttgcatctatctgatttaaaatatttgtgtttgaatacgttttctctttttcatggtattatcattaccggtatgggttagatttctgatgcctgagatatcctggaatcatttcagctgactcccagcctggaggaggaacaactggttaagtgttttctatttcttatgtctcttatatgttagataggctttccagccaggtgcggaggctcatgcctgtaactccagcactttgggaggctgaggcaggaggatcactccagccagagaccagcctggacaacacagtgggaccttgtctctatgaaaaataaacaaaaattacccaggcatgatggcccacacctgtagtcccagctactggggagtctgaggcaggagggcctcttgagcccggaaggccagggttgcagtgagctgagatcgtgccactgcactccagcctgggtgagtgacagagtgagaccctgtctcaaaaataaaaaacaacaacaaaaaaacacccaccaaaaaaaaaaaaaatagactgacttattgctaggtggagttgtcttcgtagtaaatgaatttgctatctttttagctgtatgctgaccagagtttttctgtaatatctccc

SEQ ID NO: 128837 - DNA, 1989 bp, Homo sapiens
tgagatggagtcttgctctgtcacccaggctggagtgcggtggcgtgatctcagctcactgcagtctccatctctcctgggtttgagcgattctcatgcttcagcctcccaagtagctgggattacagatgtgtgccatcacgcctggctaatttttgtatttttagtagagctggggtttcactgtgttggacaggctggtcttgaactcctgatctcaggtgatctgcctgcctcggcctcccaaagtgctaggactacaggcctgagttactgagcttgactggacttcttaatttttaagaatctgttataaaaagactctgagactagaacatttgagaactgctgccttgatccaagaggctcattcattgttttgttataacctacatacgggattccctttcagactatgcagtccagattttccatgatgccacaaagcatggcaaattcgagtgcaacctggaagcctgcacgagactgcccatgatgtacattgacgactgcctcagagccaccctggaggtcatggaggccccagctgagtccctttccatgaggacctacaatgtcagcgccatgagcttcacacccgaggagctggcccaggaggtcctcaagcacgtgccggaattccagatcacatacaacgtggatgccgttcgccaggccataggttcgtacccggtggcaaaggcctttactgtgagtccctggagaatgtaaaccttggaaggttgaagagagcatagatccttcccaagggtccagacaccttttggagaaggagcctagcccaagaaattgttgagcccaagctagcagatgctttgattttggggaatgatatctaaagtgggtgaaatcattccattccaaataaacagcttgttagcctttcatcatttttacagtttaaacataaagcaaggaaaaatagaagcaacagaggtagtatgaaaacagccccaggttttcaaatactgtaactttgccaatttgtggatggaagcacctctttgagtataaaacttcttatgaagttgtgtgagattttgataatgtgtgaaaattcacagtgcctgacgaaagatgggttaatagtcttcggccctaggagggtgactgtgcataatggcggttctgctttactcgaaggaatttcctgttttgtaccttgtacggtagacctttatatacaatggtcaagacctttttgcaaatccacaacctgaataacttaagctagtcttgcgtatcttttcctagcggatggttggccgatgaactttgatgacagcaatgctcggaaggactgggggtggaaacacgactttgatcttccagagttggtgactgccatgttgaacttccatggttctgaaagcagagttgcccaagccaactgaaagaatctggaagaggagctcctgtgtcctggtccactgtcaagggagaactgtcacaactccaaggttatagactccaaggagcctacattatttggaactgactcattggactaaattttggcagctcatattgaactgctagacaaagaatggagttaacatttaagcattttcagaatgttgtaggtatggtggtgggacttttcagtttttgctgtttgcctgaacttgtctaaacacattccacagaataaggcttaagtcatcattagtttccatttccttaattaggatgaagtgactatttctgggaagctgggagtatgtgacatttgtgtttaattaaattcaatttaaatattcctcttaagactcgattattctcttgactaaagaccaaagattacattttaaggactttcaaagaggtactcctcatttataagtattctttactatcccagcgaaagtaaaacatgtttggtgtattcatcccatgtctatcacattcaagatattttgacactgcttcaaaaattataatttctggtttttctgtaagatgctagat

SEQ ID NO: 128838 - DNA, 1012 bp, Homo sapiens
aatcaagaagttactaccacaatttggtgggaattttgaattttggagttttcctttgtactcaagcttcctcacgattcttccaggcagatcaaagccatgggttttgggatcccctaatcgcaaatccagttttgcttcttaaaatctaatcagtccttaagttattttttaaatcttcctttctactccccagttgaaatctccatttctacttctagaaatccagtcaaaccttatcgcctccatttagaactgatcgatagcaactggtgagcaggttaattataatcgcagaataaacgctgaagtctcaaagttcaccacttttgcaatgtttccaaacccctcgggaccatgccaggaggcgctcattgacccattccgagcaggtgtgggagtttgaaccaggggcagacaatcagatctgattcaaacaactcaatttggttgcttatctagaggttttcctatcttatgatatctgtcattttagataaaaaagagttcatcaattgagctgggaaatggcaaagttacattttattctgataaaagtttgctagttgttgttttatcagcttgggttgaaattgtgtctccgtcaaggtctgcaatgaccttttcagatattttatcaggtattaggtgggggagtcctttttttttttttccttctttgacctagaaaagaatgacctgacttccaagatcataaatcaaaccaggtaaagacaggcaataatacaggttgcccctcaaaattgagtaggcggggaaaacaaacaacaaataaaacctttccctagcatttggggagaacttaacttgacccgaaataaagaatgtagttcccacggagtgcacagatgtaggaaaatactgcttattttaaaaaagaaaatgctttccaggcaaaaatggcttcagagaaacacgtagtaattttttttcaagtagtataagggaaacttctttattttatgaaactcaatgtatatttattatagaa

SEQ ID NO: 128839 - DNA, 1219 bp, Homo sapiens
tattgattacagtttccttatcaagtccaatatgctggtggagggggtagcgaggggtacccagtttcacagggtgttgtctttagctgctctgtatgtgtgcattcccacgcaccgcttatttctggcatagaaaatgtattacgaatggaatgaaggaatgacaacttatgttcatttcttagctactgcatgaaaaaattgggagcgattcccttcaggtattccagggtggccttgccatcttgcatgggtgtgtttcactgccaactaagtctccttgctcccagtcactttgaaaaccacatgcgaactgctcacaccactggagcaaaagagcaaaaggcagagtccaaagacttcatttgggaaggccccccaggaggggtgagaaggaagacctttgcaataggataaatatccgcattccccagttcccctctctgggtctgtaaggcttggatctctgttcattttttctaggtccatggaaagaaattattccttagatttgatctagatgaagaaatggggccccctggcagcagcccaacaccagagcctccacaaaaagaagtgcagaaggaaggggctgcggacccaaagcaggtcggggagcccagcgggcagaagacccttgatggatcctcacggtctgcagagctcgtcccccagggcgaggatgattctgagtatttggagagagacgcccctgcaggagatgctgggaggtggctgcgtgtcagctttggtttgtttggcagcgtttgggtgaacgatttctccagagccaagaaagccaacaagaggggggactggagggacccttccccgaggtaatggtgtggccatctgattttcgtgggctctgatagtcatagggccctgcttggtggggtttgggacttcagcagtggggacatactgaggacgtccagtctgccccccagggccctgctgtcttggggagagaggccacctctgtatctacctgtgataggaagtagactgtggtctgcatgcaggagagggttgtgcaccaagaggtggctgggagaaggggagaattttcccagcaaatgtggcacttgaggggggactgtccctgaagaacattttattgcctgactcctgactagtgtgctttgaatttagggagaagattttcccagttttattttaagtatattgtttgtgtgtttattttttattgagatat

SEQ ID NO: 128840 - DNA, 1068 bp, Homo sapiens
tgggactacaggtgcgtgccaccacaccggctaacttttgtatttttaatagagacggggtttcaccatgttggacaggctggctggtctggaactcctggcctcaagcgatcgcctacctccgcctcccaaagtgctgggattacaggcgtgagccaccatgcttggccccagtttttataatctatgaatgttgagatcaacattttatgcataagactctatctaggtttaggatatgtcctcagtgtcaattcccagaggagtaattgctggtcagagggaatgcatattcttagggctgtacatttttctggccttaggaaagtgctagctgagctgaaatctcatgaatgttaggtcgtttgtgtacttcttatcaatgtaatgaagcttttgcacagaaagtctgtttgtttttgtgacatgtgttgccagtattgtttcaagtctgtcctctgtcctttgattgtgcttatgatgtctcttggcatttgggattttaaatttttatatcatcaacggtgggtatttttcttggttgcttgtaggtttccccttttgctaaaaaaaggccccttctgcccccagagaaagtcacatgccttctattttctgaagttttataacttgtaaaaatgtttagaagtgtagtctttatttgtgtggcctgacgtaggtaccataggatgctatgggctgtaaaaataactcggagtagcttctgtggtctggagattttgggctcacatgactggaagttcagaaggagggtgggctttggggctgccgttccaaggttctggcttcctgtttttgtgattctcctggctttgcactttccacgcattggttttctccttagaccagcagcaagaggctactgcagctccaggattttattcacaccaaaaaatccagaagaagagcagatcatttttagaagttcagatgaggaaactttccttagaacccccagcaaacctgtcatcatcaggagcctgccctttgctgagtcctggattagtcaccagctggaggcattgaaatgtgctccccgaaggaggc

SEQ ID NO: 128841 - DNA, 1061 bp, Homo sapiens
gggtgttcccgtccccctttcctcgagccttccccctgtagggcccgggtggacgcggccgtcctggctgacctgtccctgcccccgcaagccgccctgggcatgagcgacttttgcgtggttcccggtggttgcgctccccgtttcgtcccctccgtgagcatcggcgcttaccggtattttaacccgagggttacacatctgaggcaatgtgggtgggttacgcgggagaggacgagtgagttttttggtaagcggaatgaactatgcagataacatcacatgaaggccgtttctggaatgaagtctgactcctccagtttcaccacctcttccggagctctccccgccttgctgccttccatcgcttcatcctcggtgcttcctgagttttaaaatcgcctatctacgcttccaagttccaatgagttatctaacgtctatggattagctaggtggttggtggaaggtcagaacttggttttacttagatttttatctgcctcatgcctgtactatttgtttaatgaatgcataggaggtgtttttattccaacaagaaaattattcgtacgcgattattgaatgaatagacaaattcagccaagttcttctggtctggaccagcctggctgatttctgtaacttttttgggccaacaggacagtagcaaatgtgactcaggccgaggcttgataggtgcctgaacatcggagtctttctttcagtgtccatgtgcttcagtaaacacactagaaaataaatttctggtttttgtccccagtagactacaccctcatttggtgttatttttcacgtgctatctttaatacaggtacatccttcagtctatttgtagaacattcagttttcttcatcttttctttgccggtgctacattatttgaattattttgctacagaataacttctattatttgatatggcagatgtcactttttatatttagatatagcattcatttatttaacaaatatttgacgaccagttgtatatcagatagtgttctaggtgctggaggtacaacagtgaacaagctag

SEQ ID NO: 128842 - DNA, 1054 bp, Homo sapiens
aatttttaggtgcatatcagtaaatctacgggcatatgccgcctgcaagttgtgtggcatcacccaaaagccgagagtaatggaaagagcaggctgttagtaatcaggcagatctggctcctgtccaatctaaatcctgttatttagactaatatcttaagtctgttattaagtccgatttctgacgctattaagttaggtgaacaaccttggtaacttaacctctgaaccacagttacttcatctgtaaaatagggatgtatgtatggtaacgattttttaaccacaacttcccaactctaagatggtctgaaaagaattttttgagtgtttggctcagaatcacttggcagcaaaacctgacttgaagttgaggcttcattcatcccacttagtatattcaaatgttttgctaaagaaataattatgaggtgctacttcacactgactagggttgtatatgcattttattgcctattttctaaaacactaaaaatgctaaattctgccccaggtcttgccacagatgtttcagtggactatgggcctgtgagaccttaaagggttgattgagtaaggatcacaggtgatgtccgcattgtgcttggcatggagttaagtgcttgataaatggtggttatcaatctgattatgtaaatttatgtaaattcagttctcaagtttgtggtttttttcccctcctggagaaatctattctattttaaagtgaggaaggctccgtggagggctggtagctggtagctgttcacttgtggaactttcagcctgaggctggagccccttcctgggagtctggtcttgtcgtcttcctgaccacccccacacccttcctctaaattccctccatccctgtttttctcccgcttgcgagcttttgggagtgtgctgaatctcagactgcaatagataaacccaagagggacaggcaccagtagcctgagcttgctttctcccctggctcatgggaatcaagcagtagaaatttttagtgagtgttgttttccatagtatgcttactagttgtgtcttcctg

SEQ ID NO: 128843 - DNA, 1336 bp, Homo sapiens
aaaaatcgtctcttacagtactgccactatgttgctgggctggtcggaattggcctttcccgtcttttctcagcctcagagtttgaagaccccttagttggtgaagatacagaacgtgccaactctatgggcctgtttttgcagaaaacaaacatcatccgtgactatctggaagaccagcaaggaggaagagagttctggcctcaagaggtaacagattcagggtattttgggggaaaataactttagacattctctgaaaaatcctttaactcttgtggttgcgggtgacagaaaaacaagtcaggcctcccccaggcagcataaggggatgtggaaaataggatagcttgacatgagtttgcttcaggtagactggctgactcccaggattcacaccacgtaatcagtatattcaagccttgctgtccttgatttctttcagacggtctttctccaagtggtggatatggtaacaacccatgtgcactagcttaacaaaaagttcttaggaatggctttgttcggcctggcgcagtggctcatgcctgtaatcccaacagtttgagaggccaaggtgggcggatcacctgaggccaggagttcgagaccagcctggccaacatcgtgaaaccccgtgtttactaaaaaatacaaaaattagccgggcgtggtggcaagggcttgtaatcccagctacctgggaggctgaggcaggagaatcgcttgaacccaggaagcagagattgcggtgagctcagattgtgccactgcactccagcctgggcgacagagtgagactccctctcaaaagaagaggaagggcttggttcttctgctcagccctgaatcagttactgttgctacacagctgagttctctggcctcgcctggattacgtctacacagtacacacagaatggatttcccccaaagaaagaattctgcagcaggaaggggaaagggatggcaggtagacaaaaactccaggtgtctgtaataagggacagggtcgatctttaattaaaacatggacagggaacagaaagcttttgatactgattttgttcagaaggaaagtagaaaattttatgactgttccctgaatttattccagcatttaccttttgctttccataaaagtgtttcctgcagccaagtactttaaagttttaaaaagacgggtgaggctaagtgtggtgtctcatacttataatcccagtgctgaggccaggagttcaagaccagcctgagcaacacagcaagataccatctctataaaaaattgttagaaaatgattctgctgaaagagcaaaaataaaaattaaagaaagt

SEQ ID NO: 128844 - DNA, 1116 bp, Homo sapiens
aatgaacttgatcttcgtgaaagatgagtctgcagctaagagactttactgtatatcatagtgtttttttttgttttgttttgtttttgtttttgtgacggagtctcactctttcacccaggctggagtgcaatggcgagatcttgactcactgcaacctccgccccctaggttcaagcaattcttctgtctcaccctcctgagtagctgggattacaggcgcctgccaccgtacccggctagtttttgtatttttagtagacacagggtttcaccaccttggccaggctggtcttgaactcctgacctcgtgatccaccctcctcggcctcccaaagtgctgggattacaggcgtgagccacggcgcccagcctgtatcatagttcttatgcacaaagaccctttaatattgtttgtaaattctcccctatgcacacgctgacctgttccttaatcttcttatctgtctaggtttggagcaggtatgttaagaagttaggggattttgctaagccggagaatattgacttggccgtgcagtgcctgaatgaacttataaccaatgcactgcaccacatcccagatgtcatcacctacctttcgagactcagaaaccagagtgtgtttaacttctgtgctattccacaggtagggaagggggctcctctgggtggatacggggctaaagggagtggggtaggagtaagggtggattttgctgtgctatattcaaggatatgattccttaaaaagacgatgactccagtttattacgctgggagtttcatagcacccgcctttgcttccagccaccaaactcagctcagccttgaggttaagcctgctccttttcagaaccttctttctggatttactattttctacagctatcctaaactagttaggttcttttcctcacagttaagtcaaggtctttggcttagatttatggggagtgctgggtaaaacctgggtgaagctgttatcattaaaaagtcttcattaagcacctaattactgctgtccttttcctagacccggcataaaaagaacctggtccggtagacctagcctctcagtatgctaggaacttacactttttagttgcctttacc

SEQ ID NO: 128845 - DNA, 7848 bp, Homo sapiens
aacaactacaatagaaaattcttcccatatattattttgaaatacatatttccgatccgataatccattgctctagcatggaaaatgttggatttacttgtgtttgctttttccaaataaaatggaacttttgtggctacattatagaattgttttagactgcttaattctgtgtgttgttgagaaagggaggagtggggaaggtaaaaatcttgacatactttcttcgtgggtattttttcttgagcgattccatcttagttgattagcagttagcaattgcccattcaacagaaggttttcttacctttttgtgataatgatagctaacgacatcatttcttcttttttccctctcttcttgttgtctctaggtgatggccattgccactttggctgcctgttataataaccagcaggtgttcaaaggggcagtgaagattcggaaagggcaagcagtgaccctgatgatggatgccaccaatatgccagctgtcaaagccatcatatatcagtatatggaagaggtgggtttttatttaactacttggataatttgtagctacttttatgatttagtaatgtcactgtttaaccaggtttggatattagatgatcctaacaattcactatcctgtggcctaaagagacaggaattgatatcctttataaggaaaaaagtctattcacaggagccgagcagattgctcactgctgtgtagtaccctggtgagaggagataaatggagcaaggctgtaggttggagcccctcagtagaatcatagattttgagctgcaagatgatgcaggaggccaaccaagcttcttgttgctggtgaggaatgtgaggttgaagcttgtctgtgctgatgcagtgcgtgattgagtggatctctggctcccgtccatgtgtcctgacacccagtctggtactttcattatgccacaggcctcaattgaaaaatcacagtagggaatttaggccaaggaaagccatcaagttgcaattatttcctaaattttctttggaaaatttcatttcaaataccaaaaccatcctataaaaagaaaacttaccttcttaggtcaaatctctaatatttgactaggttcaaaaagtttatttctggccaggcacagtagcttactcctgaaatcccagcactttgggagaccaaggtgggaggatcacttgaggccaggaattcaagaccagcccgggcgacatagcaagaccccatttctacaaaaaatttaaaaattgtcatggtggtgcacgcctgtggtcccagctactcaggaggctgaggcaggtggatcacatgagcctgagaggtcgaggctacagtaagctgtgtgatttcatcattgcactctagcctgggtgatagagtgagactttgtctcaaaaaaaaaaaaaaaaaaaaaaaaagtcttagagaccagaagtctttgtaatctctaataatctctaggccctagagcagtggtttgtaaatggaggtgatttgctcccctccccccagaggacattggacaatgtctggagacatttttgattgtcctaaccggcaggaatcgggtgctactggcatctggtgagtagaggcccaggatgatgctgtgatcctcaggtgtgatcctgttgagaatgaaacactgtagactttatgaaaacatacaagaccctcatcatttttcctttgcctgagctccctccccagaggttacctctgttcatggttttgtgcatccgtctagtccccctgttacgcgtttacaggaatatggtttgcaacagtgttttcatctaaatagaattatacaaaatagcgatttctgatttctcttgcatattgcacattcttcttatacttcctccctacctttatctgacacagaaatgctgtatgtccagaacttctatcagaggcacctatggaagtctaagggaagaccacatcgcttttaaaaaccctaaaattttgtagtcactagatgaaaatattcagccagtgacccaaaaaattgctaccaatgagactctccattttgccatgtagccagaacttactttgatctatgtgcctggggtagtgaccaagtaggtgggtaggagtaatctcagggaaacttgaggccccagcctcatggctagggtcataatttgaacccaggtctgtctgacatcagaatccatgatgttaaccccaattctaaggggttcaactaccctttctaaatggaatcctgctatattaagcactatttattcattttatataaactagaaacattttatgtagtaagtagttgagagtgttttggttttgcagtttgatcactagttttagaaaccagtttttaaacactttgtggccaattccattactatattaaaattcagatttatttggtttttccttaactattgggattaaatcctggttgtaattcatagtttgagggcgagggtgggcagtctacagttggctgagccctgtttttgtgaataaatgttatcagaacacagccacacccatttgcttctttgtcttctgtggctgcttttgcaatgtgacggccgagttgaggagctgcaacaggcgatgacttgtaaagctgaaaatattttttggcccttgaataagaggtttgctgacttctgacttagggtatcagttgttctgttatcccagtaaaactcaaggcattaggggagaaatgttaatattaatacttaagttgatttgatttagggaaatctttgaagatttctaagtcttaagcagtagaacctgttaatggttttagtttcagcagtaaggacattttacaagtaaagttttaaatgaaaacattttgtatgaagccacaagtcgtctggcctcttgctggtgtccagatattaacactgatcctatttctccttgctgaccaagtctgtcctttgtagtaagaaaggaagaaacgttgactctgtccgatctctggacttagtgttgtagcgagcatgcacctggaagggacttgccagaggacctcctcatgcttctccagtgcttagtgggggcttggagtgcagccccaggtcttcacgagcagttggccacactgcagggccctcaccccactctggagcagcctctgcttcaaaccagcctggatgcttgtcagctggggagaagatcaacctgctattttgggatagaaataaatgctcagccaaacggccagaaacccccattcccctctctgccaaagtgaattccttggcagggagaatcttgttcgtgtctctgcacacttcctgtgccctcctgtggttaagtcagagaatcatccggctctttgagccccaggtgcctagctgctcaaggatggtccccagccagcagctgccaggaatcacctgggagcccattaagacatccagcccccacccaaacgtatcgaatcagaatctgcctttttttcccaaatgatgtttttgctttaatggaagtttagatgttcatagacaagagttttaaatgatgatcaagctgattccatattcgcagttgtaagtagaactgctgagacgtggaagtaccacatggactcacagaggagctgctgtatgtagcacagcattgcacaagagcttatttcagtctagtaaacatttataggagcctgtgtcatttaatcatcaagcctcgcactgtggctcacacctgtaatcccaaaactttgggaggctgaggcaggcagatcacttgaggtaaggagttcgagaccagcctggccaatatggcaaaaccctgtctctactaaaaatacaacatttagccaggtgtggtggtgcacacttgtcatcccagctattccggagcctgagacatgagcatcgcttgaactcgggaggtggaggttgtagtgagctgagatggcaccactgcactccagcctgggcaacagggtgaaggccctttctcaaacccctcaagtatttggcttcaactttatgccgggcatgtagatgaaaagtcggctatgacctgtccttgacaagcagatgtaactccttgattgaggctagtaggtttttaagacctgaataattgagtttgcagaaacctactgtgtgccttcaggtaaatggagagtggggtttggtctagcaacgaagcatctagaaggtccctttggccttaccggctctgttttaggtaagtccacgtctgagtaccagtgactgcagctcttccagttgtgctgtcatgcttatatgttagaaatgatcatcaaaggactcaaaagttttgccactaattgtattaccggggactgtcacaaccaagatttctcttaatttattcaccttacttatctcctggaagggcatattgaagtgctcttggagttctctaaaagggtttttgttggttgtgtatattcacttgggtgccagcgattgattccaaataagtaaatcttttttcccaaaaggatgtaagatggcttatggttataagtacaacaggctaacaaagtacaagtagatgagaaagtaaaatgaagaaataaagtcataggagccacagaattaacccaggaatgaataagtgtgtagtttggtgctgatgttatcatcctttatttgtacattgcttgtacagttgctctgagaaggtaagtcttaaattttcaaaagtgaaatgtcaccgagcatggtggctgatgcctctaatctcagcactttgggaggctgaggcaggcggatcacttgaggtcaggagtgcgaaaccagcctgacttatgtgatgaaaccctgtctctactaaaaaaaaaaaaaaaaaaaaaaaatacaaaagttagttgggcatggtggcaggtgcctgtaatcccacctacttgggaggctgaggcaggagaatcgcatgaacctgggaagtggaggctgcagtgagccaagattgcaccactgcactctagcctgggtgacagagcgagacaccatcttaaaaaaaaaaaaaaatctacaatataccaaaaccattacttacctgagaaactattctcagggtcattgtagtgaatgcctattttatggcttttgatggcatcagggcactcaggtcatttacaagagtagtgtgtgagaccctgtgtgtcactgccactcatcttggccttcggccactgctgtagcaaccagtttccaagtagggctggaccttgccttctgctccagagacctctcgcttcctgcccttgggcttctgacgagctgcaggaactgcctggcacgtgggtccccacaacccagaggaggtgagggccacctctctgctcctcagggccacctttcataaggctccttgaaggtccctcaagatcaagccaactcaacacatccttgataggccttcctgccttctgtttcacttctccactcgtttccaaataaatggctgcatgcaagcttttgcctcaggttctgcttttaggaggaaggctaagacaagcagtaaagcaacatgggcaggcagaaggatgacttctaatagaattatctcatcactatatattttactttatggatgcttgtattgaaaagtcttggctgggtggagtggctcacgcctgtaatcccagccctttgggaggccgaggtgggtggatcacttgaggtctggagtttgagaccagcctgaccaacactggtaaaaccttgtctctattaaaaatgcaaaaattagccagggatgcacgcttgctgtgtgccagcacagggctaggctggagataaaaaggtgagtaagtaggtgcggtgtagtcagggtgaaaactacagatggtccatttccacgtaagtggaaaggtaaaggtatgtacaatagggtggctcctggctgaacctggagctgcagacaggttttctagaaggcataatcctgaagttgagacttgggggcctaggtaggagccagttgaagggacgtgggaggcgcattccagagagaaggagtggtatgagactggaacagaggtgtgcagcagcatcgcatgggcgaaacaacagtagacagttgttcttttgtttttgtttgttttttgagacagggtcttgttctgtcatccaggctggagtgcagtggcatgatctcggatcactgcaacctccacctcccaggctcaagtgatcttcccaccccagtccccaagtagctgggggaccacaggtgcatgccacgatgcccggctaatttttgtacattttgtagaaacagggttttactgtgttgtccaggctggtcttaaacgcctgagcttaagcagtctacgtgcctcagcctcctgaagtgctgggattccaaacatgagccactgtgcctggcccggcaactgttactagactgtagagagggaggtgggcaagggctggtgacactagacaggtgcagtaggtctggaccatgggtggccttgcgctacacattacagagctcaggctttttttctccaggtgagagggctggtgccactgaggcatcaagcagaggtttgagatctccttggtgacagtgtagagcagacaggtagatttgggaatttaagcttagactcacgttggagactgagatagctcatctgagaggcactcagggcctaatctcaggcagtaattttagggatgtaggggaagagatggattctgcacatacttgggaggcttgtggaggagtggggagggaggcacagggaggactccagggtggttcatacggctccctgcttctgttcctgtccccctttgtcaagctgtggtctgtactgcgtgttccatcttgtttctaagctgcttttgcccagtctttccagcatttccctttcgtcatgttagtctgtgcctgtctacgtgaactatggtgacgtttattgggcctggcactgtgaggtgctggggatgtgaagatcattgtggctcagccgctgctctcgagggcctctgggtgcagtatgcacacctgtgcctcctgtttgctcaggaagacaggctttgagatgagctggggctgacatccccaccttatcattgggatggctttgggtaagttatgttcatgttctctgagcctccctttcctcattggtaaaatgggtataaaatacctgccagtggagggttgttgtaagtagccatggaaaatgtaaagcacatagcacttatcattttttcctgtgtctttaacagatttatcatagaatccccgactcagacccatcttctagcaaaacaaggcagatcatctccaccatccggacgcagaatcttcccaactgtcagctgatttcccgaagccactactcccccatctacctgtcgtttgtcatgcttttggctgccctgagctggcagtacctgaccactctctcccaggtaacagaagactatgttcagactggagaacactgatcccaaatttgtccatagctgaagtccaccataaagtggatttactttttttctttaaggatggatgttgtgttctctttatttttttcctactactttaatccctaaaagaacgctgtgtggctgggacctttaggaaagtgaaatgcaggtgagaagaacctaaacatgaaaggaaagggtgcctcatcccagcaacctgtccttgtgggtgatgatcactgtgctgcttgtggctcatggcagagcattcagtgccacggtttaggtgaagtcgctgcatatgtgactgtcatgagatcctacttagtatgatcctggctagaatgataattaaaagtatttaatttgaagcaccatttgaatgttcgtaatagtagaa

SEQ ID NO: 128846 - DNA, 1859 bp, Homo sapiens
gttgccaactcctggaacactgactggggtgacaatggtgagtggctgcccccttcctgccaagaacagtgaattgtgagccacaccccgtggccatctcggctttctctgttctacccaccgcacagccttaaaccctggacctacggccaggctgtgagctcctcctaagtgccaggcagtcaggagttcccttttgctgtgagggcagactctgagcagcttcagagccaacgcctgcaacagttcccacagcatcgcgccagatcctgtgatgggaagggtgaccgggcagggggcttgcccgtggaggtgtgccccacggctccagaagccttgtggtgttgaggactgtgctagtgggccaacagcaggagtggccagggatgagtgacttaaggtcttttaaggatgagtctgactatattggttgacccttgtcacactttaaaagcaccttactttttattcccaggcttctttaaaatactcagaggacaggatcactgtggaatcgaatcagaagtggtggctggaattccacgcaccgatcagtactgggaaaagatctaatctgccgtgggcctgtcgtgccagtcctgggggcgagatcggggtagaaatgcattttattctttaagttcacgtaagatacaagtttcagacagggtctgaaggactggattggccaaacatcagacctgtcttccaaggagaccaagtcctggctacatcccagcctgtggttacagtgcagacaggccatgtgagccaccgctgccagcacagagcgtccttccccctgtagactagtgccgtagggagtacctgctgccccagctgactgtggccccctccgtgatccatccatctccagggagcaagacagagacgcaggaatggaaagcggagttcctaacaggatgaaagttcccccatcagttcccccagtacctccaagcaagtagctttccacatttgtcacagaaatcagaggagagacggtgttgggagccctttggagaacgccagtctcccaggccccctgcatctatcgagtttgcaatgtcacaacctctctgatcttgtgctcagcatgattctttaatagaagttttattttttcgtgcactctgctaatcatgtgggtgagccagtggaacagcgggagacctgtgctagttttacagattgcctccttatgacgcggctcaaaaggaaaccaagtggtcaggagttgtttctgacccactgatctctactaccacaaggaaaatagtttaggagaaaccagcttttactgtttttgaaaaattacagcttcaccctgtcaagttaacaaggaatgcctgtgccaataaaagttttctccaacttgaagtctactctgatgggatctcagatcctttgtcactgcctatagacttgtagctgctgtctctctttgtccctgcagagaatcacgtcctggaactgcatgttcttgcgactcttgggacttcatcttaacttctcgctgccccagccatgttttcaaccatggcatccctcccccaattagttccctgtcatcctcgtcaaccttctctgtaagtgcctggtaagcttgcccttgcttaagaactcaaaacatagctgtgctctatttttttgttgttgttgtgactgacagagtgagattccgtctcccaggctggagtgcagtggcgccttctcagctcactgcaacctgcagcctcctagattcaagcgattctcctgcttcagccttccgagtagctgggatgacaggcactcaccaatatgcctgggtaatttttgtatttttaagtacatacaggatttcaccatgttggcca

SEQ ID NO: 128847 - DNA, 1859 bp, Homo sapiens
tatggacatgaacaggagagcctcctgtcttctcccggatctttgtgggcaggggtggggctggcggttattccctgcaagctgtgcttatctagggagcgtcccttggagggtttggggtctgggaggtctgctcgcaccacttgctgcagctgggggtgggtccacgagtggcctcgggcacttgggtagcacacagtggtctggagagctggtggtgcttctctcagaggttttcattagaggctgtcttttcagctgtaatggtggctatcctgctgaagcttggaacttctggacaagaaaaggcctggtttctggtggcctctatgaatcccatgtaggtaagtgtgtccccttggccactttctggccagatggattgtttgagcaattaaccatcatggctttatttgcctttataaactgggggttgagacagaggggctgctgagaggtgctagccaggtgcacaggcctctggcaggacctgcctggcgtccatgctgcaggcacgaggcttgccttgccccaggtcttctccgtgggggctgtaggttgactccgctttctcccgcgtcccatcagggtgcagaccgtactccatccctccctgtgagcaccacgtcaacggctcccggcccccatgcacgggggagggagatacccccaagtgtagcaagatctgtgagcctggctacagcccgacctacaaacaggacaagcactacggtaaggggcctggggcctggccacggcgcacgtggaggctggggagctgctgcatccctcctcacgctgcagcgaagaggtcagggctgaggagccttggggtcccggaactctaggatagaggagggggagtgatgccctcttgccaggagaagcagcacactctccactttctgcctgttccaccctgaactcagcctcagcccttccaaactggaagggaccaaagccctccttttacaagggagtggcgtgtcctggagtcttgaggtatcctggcctcttccggggcctcgtgctcattgctccgttctcccatttctgagcttccagccccagccctgtccttagttcttcaggggagccttccttgagctcccctggcagggcaagtccccttagatgcagtcttcccctggaggccaccagaaatcagtgactggctgaccgtggcgtgccacgaggcacggtcactgccctccccaaccccgagctcggttcattttccaggatacaattcctacagcgtctccaatagcgagaaggacatcatggccgagatctacaaaaacggccccgtggagggagctttctctgtgtattcggacttcctgctctacaagtcaggtgcgtgctgatggctgatggcaatagagggtgggggtcgggaggggagcctgggtgccaggatggttcatgttgaccaatagggctggattgggcaggcaggtgaggggctggggaagagggctgtgtggggccttccatataggctcactcctctgtggaccagcctggcacctgactgtctttgtccaggtgttgtgccaacacacacaattccagaggcctctcccagagcctctgggctagttccttcccatccattagcgtccagctcatacatgttctctgtgggaacgcccccctccctggtggctggccacgcctgccctcgccttcctggctttgcattgctttaccagcatgtttctgttataatggcaggccgttcgtgtttgcactggctgacacattttcttcatctttctctttgcaaaggcctagatcgtgcctcacaccagtggatgaacacacagggaggaccttgccctgggtagtgccat

SEQ ID NO: 128848 - DNA, 1025 bp, Homo sapiens
ccgcctccaggaaaaaaaaaaaaaaccacacacacacatacaaactaatactacacattttgcagatttcagaaatgaacccagtttccaggcagaggttcacgggggtgcttctcttgctttaaaagctgagttgggcaaatcgttgaggcaggagagtggggcaagtggctcatcacgcctctaatcccagcactttgggaggccaaggtgggcaaatcacttgaacccgggagttcaagaccagtctggccaacgtagcaagaccccatttctaccaaagaaaataaaagctgagtttgagccccaggagcgtcccctggtgttgagagatcagttgcctacaaggtctgaggtgcccctgtggccctttgaggggactgctgcagagggcccagcccggacatggcagcctcacccggtggggctcgttcctgcaggccttcggggctgtggaagccatctctgaccggatctgcatccacaccaatgcgcacgtcagcgtggaggtgtcggcggaggacctgctcacatgctgtggcagcatgtgtggggacgggtgagtcaggctgtgcttccacagcgggtttagtgctgagagaccctgggccccagcttctcagtggaggggactttgaggacttcctgggactgctgcgagtcagaagtgtttcggggagactccgagagtctggcaggcagggcctggcaaggctgctgcttcctgggaggtgcctgaaccaaggctggcccggcagagctgtctgaggggtggcatcccagcaaaacagtcagtttcagaaaatgtggtggaatgtctggcccctggtctggtttgtgtcatcgcatgttcctttttcctgcttggggaaccagtttggggcatttccttatgtgtagttagcggggatggctccaccttaacaacaaggtggtggcacagaactttctgctccagctgcctgcagcctcgccttggttccgcagtagcggtgttcactggcggctgcagatccgaaatgcct

SEQ ID NO: 128849 - DNA, 1345 bp, Homo sapiens
ggtggatcatgcctgtaatcccagcactttgggaggccaaggcaggcagatcatttgaagccaggagtttaagaccagcctggccaacatggtgaaaccctgtctttactaaaaatacaaaaattagccgggtgtggtggtgcatgcctgtaatcccagctactcaggaggctgaggcacgagaatcgattgaactcaggaggcagaggttgcagtgggcagagatctcgccactgcactccagcctggatgacacagtgaaattctgtccactcccaccctcccgtcccacccaaaaaaaaaatcaaaaggtgcattgagcaacagaatttccttttgttttatgaaattaccaaggacacctgtctgcagccttcttcggcatgtcttgtgctcatttccttgttaggggagtgtggcccagccaaagtggcctttgcagggattggggagggagttgtgggatcagagcttgtaatgaagaccttcctttatccagagttatgtttaccgaggacctgaagctgcctgcaagcttcgatgcacgggaacaatggccacagtgtcccaccatcaaagagatcagagaccagggctcctgtggctcctgctgggtaaggccctgctggctggcggggaagcgctggagagaaagtgggagcaacactggagagtcttgggggattcggggtggggacaactctgacaaggcaagttatagaaactttctgagtcccagtttccatcagtacaaaaatcacaatccctctggccatgaatgatggcgaggattaggtggagtggcgggcagagcatccagcagattgcaagtccacgtgtacaggtggcgaagcagctccctttccctgacatgctggcccgtccgcaaataccaggagctctcactgctactctgcttcaagaaagcatccctttagtgtcagtgagctgtcttaattttgtcatttaattgtggtaaaatacacgtaacagaaatgtaataatcttagcaatcttcttttgttttctttttctttcttttttttttttttttttttttggagatggagtcttgctctgtcacccaggctggagtgcagtggtgggatattggctcactgcaacctctgcctcctgggttcaagcaattctcctgcctcagtctccccagtagctaagactacaggcatgtgccaccacgcccagctaatttttgtatttttagtagagatggggttttgccatgttggacagcctggtctcaaacgcctcacctgttgatctgccttcctcggcctcgcaaaatgctgggattacaggcgtgagccaccgtgcccagcaacta

SEQ ID NO: 128850 - DNA, 1813 bp, Homo sapiens
ctgtcgaaactaggactcctggattgtaacttttcttacatttccctgtcccctgggtcctccacttagggtgtaatcacacagacaggctcttaactgtttcatatcactcacttgggaaagtgtctcaagctgttctacaaatccatgcaaaggccgtttaaaaatagcagcgaaggccctggactcggtctcgtccagcacagccccttggctctctctctgggctctggccgcctggcccccggggacccacacgaggtcatggcgtgcttcgggcaggggggcggggatcccatagacacctcagctccttaagagttctccgcctgggccaggacgagcatgggggtccccactgatgcccgagacggtgcccctgtgtgtgtgagccctcgacccacataacagagaggtgtcctgatgccctctgtcctctccaggtggatctaggatccggcttccaacatgtggcagctctgggcctccctctgctgcctgctggtgttggccaatgcccggagcaggccctctttccatcccctgtcggatgagctggtcaactatgtcaacaaacggaataccacgtggcaggtaggctgtggggctgcgtcctatgtatgtcccctcccaggtcggtctgtgcacactgactccaggaatgggaagccagccctcactgtggcccacagaacattgtcctggactgttgaaaaatggccctgaccctgagtcatgtcggctctggaccacgcctccctcctttgtcccataccccacgtgtgtgcatgagtgtgtgtgcatgtgtatgaatatatggttgtgtgcacgtggaggtgtgtgggggagtaagtgagcttcggaagtgttcaaaaccagctagcccctgtgacgcccgccgtggcacagtggcagtttatcagtcccgcccctgattccctttgtctctgcccagccctgaccctcggactgagaaccaagaatgaggagtgagccatgttgagggctggagagggtctctgattgtcagcaaatgggagcagatcaggggagacacccactctgcccgtgtgtcactctgggctgttccccagtgccccccaacccttgggcccttgaattgggtagggtctctggttttccctgggttgggcttcgtgtgtgggcagcgtgcccatccaccgccatcccgggagacccttcagtcagtgggtgactctcttccaggccgggcacaacttctacaacgtggacatgagctacttgaagaggctatgtggtaccttcctgggtgggcccaagccaccccagaggtgagtgcctgctcctctgcaccgctgtaatgtgagtggcaggcgttggtttggggcagtgggaagtgggagagtgaaggcctctctggcgtccgcagggctcatgctgcccagggctgccgacaccgcttgaggtacagtacttgtttcttttcatttttatattactttctctttttattttattttttccttctcaagttattagtagagaagatgctggtgcttttttttggtttttgagagagtctcactctgtcacccaggctggagtgcagtggcacgatcttggctcactgcaaactctgtctcccgggttcaagcgattctcatgccacagcctcctgagtagctggggccacaggcttgcaccaccgtgcacggctaatatttgtatttttagtagagactgggtttcgccatactggccaggctcgtctcgaactcttggcctcagcaagtcatctgcccaactcggcatcccagagtgctgggattac

SEQ ID NO: 128851 - DNA, 1045 bp, Homo sapiens
aatgtaagcacttgacttttgtttttgttttgttttgttttgtttttttgagacggagtttccctcttgttgcccaaggtggagtgcaatggtgcgatctcagcccactgcagcctccacctcctgggttcaagcaattgtcctgcttcagcctcccgagtagttgggattataggtgcacaaccaccacgcctggctaattttttgtatttttagtagaaatgggatttcaccatgttagccaggctggtctcgaactcctgacctcaggtgatccacctccttggcctcccaaagtgctgggattacaggtgtgtgccactgtgcccggccaactttcaattctttagagctgactatgagaggagccagcagtatagccacagcaccaacgaatgaggaagagcaaaatactgcatgacagctttgctaagaattctttcactttttttgtctatcagccaggagctagcaacttggcttatttggaaattttaagtgtacatatcctgtctccttaaatcctttacagatttaaagtgcagtctacctgagggctctgtgaccatgtaagaaagctttttctttctttttttttctctgagacagagtgttgctctgtcgcccaggctggagtgcagtggtgtgatcttggctcactgcaacctctgcctcctgggttcaagcaattttcctgcctcagcttcctgagtagctgggactacaggcagcaccaccatgcccggctgagttttgtatttttagtagagacagggtttcaccatgttggccaggctggtcttgaactcctgacctcgtgatccgcctgcctcagcctcccaaagtgctgggattacatgcgtgagccattgtgtccggcctttttttttttttttttttttttttgagacagagtctcgctctgttgcccaggctggagtgcagtggtgtgacctcagcttactgcaacctccgcttcctggattcaagtgattctcctgcctcagcctcccaagtaggtgggattacaggcacccaccaccgt

SEQ ID NO: 128852 - DNA, 1032 bp, Homo sapiens
aacttctttggtctggtcatcaagataatctagcatcaccagcaagcatgcatggagaaggatgggcccaatgtggccaagatggtaacgggaccagtagagagccctgtagaagacatctagatattctgccctaagagcccggagggccgggctgtctcatgaccctctgacgtgctgacctggactctggcagaatgtgcacacacacagtcacacagcttcctggcttgcgcaagtcccaggagggcggtgccagccacaggcttttcccattcgagggttggaagcgtatcatcaaaccacatcagagtgctgggggccacctgccacccattcccaacccactcagccttcctggtgtttgggacatgctttgctttggcagtcaagacagcagaacaaatcaacttttaaggccttgtcactgatagtacaatttccattatttttcatccaaattaggatacttctgaaaatagaaatgatgactctgggatgcaaacgttggctgtcctatgtataaggagatggcttttcacgctcccagtgactgaggaagtttctcccagatggcgctgctctgagcctggtgcagggtaggcactttcaaaagagtgtctccttgtatcttccatcagccttgcgagatgggtatctgttcccagggccccaagggaggaaaacaggacctagctggatccaagagctaggcctttctttttttttttttttttgagatggagtctgactctgtcgcccaggctggagtgcagtggcgtgatctcggctcactgcaaactccgcctcccgggttcacgccattctcctgcctcagcctcccgagtagctgggactacaggcgcctgccaccatgcctggctatttttttgtatttttagtagaaacggggtttcaccgtgttatccaggatggtctcgatctcctgacctcgtgattcgcccacctcagcctcccaaagtactgggattacaggcgtgagccagcatgcccggcccagagctaggcctt

SEQ ID NO: 128853 - DNA, 1018 bp, Homo sapiens
ccgagacgggttcctctgcgccctcagtcgggcccaggcgcggccccgcggcgtccctgggggccggcggggagccgggaccctcgggactgtccctgacgggcgggctggggtgggagtccgcgcgctccgaagcgtcggcgagaaaagcagaaaacagctccgcccgccagccctctgccctccgctcccctccccgggctgtgcgccggaccccggccctcggagcggggacgcggccaggaccgccgagggaggcgcctgcgaggaagagctcggccgggtccggagactgctgcctgggaccgcgctcccagcgcctgggcctcggtgtctccgggccaaactgccgacataatcgcatctgccggcatctattttcggtttatttccccctcattgcgaaggatttgcctggccaactttctgcgcaagatcccacgcaattcctgggaccccagaagacaggtcctgttgaagaacaggaatctggcactgggtgggctggggaggaagccgcacggtgttaaatccataaacaggaagagaaaccagacagcgaaaccaagaggcgaatgggcgattggatgccggtggggagaaggccgggggcgcaccctgctcctggactccagtaaagggaggccgggcagagtccctggggcgccacctccccctcggttagtagccctggaggccggggggagttggcctctggggagcagtgggtgctgggtgtggggcgttgcaggcaggctggggtgggcgacccaggtggaagtgaattgcacttggcttcctggtgggcctctgtcacccccttcccaggcgctgagaaagccagcaggctggcaaagaaaaggaccctagcgcaggccccacactcctcctcctaacggacgagagaccccccaaacccactggagaagtgacgctgtggggttcaaatgcagacctggcacctttttgtagcctggaaaaacattcccactgcctgctgccggaggagaggatagct

SEQ ID NO: 128854 - DNA, 1468 bp, Homo sapiens
ggctgcattgatggccagattgtctgctgcctttgcacatctagtgctggtttcagaaatttaatgaaacttttctttttccttcgacctcctgaatcatgtggttctgcaaatgaataccttcaactaggatttagaccactaagaacttgcacagaaaaacacgcattgaatgtgtgtcgaacctctacattgtgaagttgcactatgtaccatactctaaaatgaaataagaactctttatgtctgtgagagagtgtgtgtgtgtgtgtgcgtgcgtgtgtgcttgtgggggttgggtagtgtgtgtgtattttctctggctttaaaattttaaaacaaacaaacaaaaaagccatagagagcagaacttgccgagggtcatttattgcccaagtttacaagagtagcgatacaagtttttgcaaattgaatttgcctcagatatatctgtcctaatgcttatatttgcacaagtatgtaaaatatcgtgttgaggatcattctttgttggaaacactgctcttgctgaactgtcttgaccattgactatgacacagtttcttatttatgtaaatacttgcatcacagtggccgacaggcattggatgcagaacctagagccagttttcaggaacaattgtaaacctgacatggtactgtgcatctattcataaaacactcaaaactgtgaaaatatggtttacatttaattgtacataaaggtaaagggagaactcaattcagtaccagttagtttgtacattttagggggcttttcacattaactgcccatttgtgtaatttatagtttgacatgatgtgtttgttttaaaaaaaaatgcatagtataaacccattaaggatctgggaaaagagaagaagtttaatatagaactaagcttttaaagtttgtttttgtttttaattctggtctcggtgcaaatgttagttatgccttattcatatcacagttagatcaccatgctgcaacatggtttatattcatgctgccctagaaacttttgtaattatttgttgcaaatttgtgactgtccttattaactttcttttatgtaagtaatttgtaaaagtttcttaaaatttttgcttttgcttatttaattttgaataaaagctaaattcctaatactttttcttaaattgtaggtcagtgttataaaaacaagtcagtagaagaaccaaactgcatatgttaaagaacagatgagttttgcttatggtttggtggcattagatatatgctatggtttccaaaaactttggccatttttattttttgagaaaaaaaaagcaatttattgagggtttaggcctcggaaccatccctaaagcactatttttcaaccttttaaaaatccatgtccctttagggtaaggctaaaattctttctttgatgcctcaccatttgagacttctcttggttacacagactggactgtttct

SEQ ID NO: 128855 - DNA, 3851 bp, Homo sapiens
ggtactttgtcttgtgcagttggccgaaagtattgtgtgagttgaaattttgagttgattgatagaatctgtgccttaggcatacttggttaatggaatcacttgctaaaggttcttctttgtaaagttaataaccatatttcagttttgtgtaaatttatgtcttcacttattggatttgatgacaaaatcacttgagtatatggctaaattacatgactatatgtattaatacttacaaacatgtaggcaatagaatcacattctaaaagtattacagatatgatatttataaacgagtcctctttggtcctcggaatgtctagtaatcttttctcatcatgtcttcatctatataatgattttcttgtccattctggaaaaccttctcaaatttgttttatatggcaaattttcctcttcttataataattctgttttctgtgacttctaatgaaattttaagttctgttaaaattatcacagtaaagttccttgactttaaaagcttgcttttaaaatggagctggccaaaaagcaggcagagactttaaaagcgtctctgcctgctttttggccagctccgtttttcatcactgacgcttataattgttatcattccttgtttaccagagcctgtcatttgttttcttgaattttgtgagggtgcagagcagatgctttaaaaaaaaaaaaaaaaaagatttaacaaggcataagtttgtttcttgctcctatcaatgtatgttagcaggggcctgaatcatgtatagtcatttcaggaccaaaattcttcaattgtgtggctcctctaccttttttaaaagtttatttttattgtggtaaaatatacatagaatttaccattttaaccatctttgagtgcacacagtggcattaagtacattcacattgttatgcaaaaaacagatgctctttaaactttagttttcatttcaaatctttcaaaagtaaaaagtttgcttttttgtctctggtgtgctgtagtcttatttttatatttcgaaatgttttcagagtccctttgttgtttttaaatgagtcatccttgaagtatgaaaggctgagtcaggcctggtattttttcagatgagtttgtgcatatgagacagagcacgacctggcaagtagcaagtgggatgtaagtgtgcattaaagaaatcagtataagatggatgagttaaacttagatcttcccacctgtgttctctgagactactcttctatctcaggctggaagcctgatgcaattaattttacatttgcagtttggtgacccagtagtctaaagaatacactgaggggttccagaggtagccatagccttgggccttgccagcagaagctcatcattgtgtaattgactctctgacatactggctttatatgctaacttatttgttgtagctttttgtttgtttttgtgttttgacccagttccctagtaaaagatgtaactgtgcctggactcctcctgttactactttctgtcatgtcatctacaccctaactacttatcttttctttttttgtagcaactatcatccacttttttgttccactgctttcaaaaaccattgatccataaagacaaatggaattccaaattagacctctgaaccagaactcactctcaatcttactcttcccacttgagggctgttgtagggttctgcaatattgcactgctaagtcagcaaggttaggcataggtcaggccttgttgtctttctttagtctggtcagccctatatgagacagaaatgtgtattaaagcataggaataatactctctgggacgtcagcactgaaacaggtattgccctgttcttctgatccctttttccatttgtgtcggttggcatatggcatatggacgggggattagacacagaagtcttactgactattgtatttctaggttgagaatgaagatgagattaagaatctcagagagcttcatgatttggtttactctcaagcctgcagctggtttcagaatttaagagacagatttcgaagccaaattcttcagcatttcggatcaatgcccgagagggaggaaaaccttcaggtatggtggcttttctgttcttccaaaagtcacttttttataaacccaaatttgcacacttctacatttgttttctcattgtcctttctgcactactttttctttgactgtcccctcccccgcaccagccccacctcatctttgcaatcatgagttctctagagcagtggtctccactacattccgtacagatagaggctggaaatacgtgtcagctgagatgcctgtaggagagagtgccagaaagggagcaagtccttaagaggatttttaggagtgggtaaggaattaaaaacgggatgttactatctagaaactgtgactgtgggacaactaaccatgcctttgagcccatcgcctgttgctgttattctttgacagcagagagacttaccattttctatacatttgaaacatcttttctcacctttctttgtatctcccaacatttgacccaaccacttcaattcatttttgtctcttcatgtttaatacctcgcttctcatgaaactattattcttttagtcttgcaggtacttagggtttacacttaagcttagtctaatgaatgtgtatctggcactttctgtgcaagcaaaactgcaggaggcataaaagaagggtctggctcctggaaaatctgatcatagacttactaaagcactacgttttaggcatcgtagcattttgaattgaactaaatgtttttgatcagaaggtgatagattttacaaaggaatggctgtcagtaaatatgtgaagatggagagataatagatctcattgtaatgcacactgcctcattcccgttttcaagggttggtctacatttgtctgaatcccaattgaatccttcacctgaacttgaaacaccaacattaggccatctccaaatttagtattcattctgtttagcatattatcagttgccatctatttgttttaactgattacttgaatctgattaaacatcacagaaatgggctttgataagaacaatattgaataagaaattttaaataacaaaacagcttatagaaaaattcagcataacttttccatcaccttcaccacccttgccttttattatcctgtcctgtatcactgctttctgttagcagtgttgtgtgagttaggatttgggcaggaaagcaaaagcaaccacccgtcattttcccagaatgaagggtttgacgtaggatgtagactttgtatagtagttgggagagctgtgggagtgaaggtcagggatgtcacctacagaagtcagggaatctgccaccagagatcctgcatcagaaacagccaacagcgtgcttctgaagaactagtggggaagtggctataattcttaggaatcccagcaagtctgcaccactgtctcagtctacagcagtggagaaaggggtttccaggagctctctggaaagttcctgcccacactttgcaacaatcttcagaggataatggcttctcttccagcttccacacccaacaagagtgcctttcatcggccaactctaacctggaaccctatggcagaggggattttagaagacagtttgtaatgtctgtggaatgcagatgaagaggtagcaatgcttagttgacagcggacaatacacaaatatagaaaccgaatctgattctagaggggcctactgagatcagcactgatgtcgtagctccttttgtcattctgaagctttatattttaagtccgataaatagcaatttaaggttcagtgaaggtgg

SEQ ID NO: 128856 - DNA, 1050 bp, Homo sapiens
gggagttattgactcagctctgtgggctgaagcagtattttgggcgggggaggaatttcctacagtgccatcaggcagtggaatgggaaatagagagggggcgctggtgacagtgacattggtggtgatggcggctctcatgtgtcgtggtagggcaagaggaaggttgagggtcagtagcctagattagcaggggattttctgtcacatggaggcccggaagggggctttccaaactttgagatctgagattgaaattggaagaggggtgttcagggccaaatcctcaattaatgaagatactgactgggagcacaactgagttggtgtcgggagggtgaaaatctcggaggcaactttgggattcggtaaggcaggccactctgcaaagaacacagcagctgatggagctgggtaggcagggccaggcattgcttgttgtcccttttctgtttttctttcccgtttttctccctttcttttccctaaatgtctttccctcttgtgcagtcacttgggtctctttaaattttattaacgggtttttaatttctttatttcttttactctcttttaattgaacacactaaaaaacaaaattataatttgtatatgctgttttatttaacaactttttgtttccattgattttcaaaatataaattgaacattttgtatgtcactttctaagaaaagctgtgcttgtagactcctttatcaacatgtgcccatcagatgtcttcagtgagccaggtgccttccacagaagaaagatttccactctttatagaaatagatattgatttgtcttctcacagaattgatattttattgtgtggtttataaaatgatatgacaattatgaacctttctgatcagtgctgaagcatctagatttaagaaaactgcatttctgcttttgaaaatttaaacatggtgacacaaccagccagcccacggaagagtggtagactcaaaggacagaggagggagacacacagagagctgcgcattggagagaagagaagcgacagggtgtccagctgctta

SEQ ID NO: 128857 - DNA, 1047 bp, Homo sapiens
taaatagttgttatactgtattgtctagggaataatgacaagaaaaaagtcgatatatgttcaggcttttttttagaatattttctatccccagttggatgaacccacggatgcagagcctgtggatacggagggccaactgtgctggcaaaaatcatttacttgtcacagtgttggaatcaagttagtgctattaaatgaacattaaaatgagcattataaggcattgaaatttcatttcagtttgattcttggtgagaggaataaaggatagtaaagaaatacagttacctttgtttattgtatttttgtagagtgaagaaataccagaggtcacttcagagcctgtcaaaggaagcttaaaccgtgctcagtcagcacagtctataaattcaacagaaatgcctgccagagaggactgtttaaaaagagtgtcctcagaacctgttctgtcagttcaagaaaaaggtgttctgctgaaaagaaagttgtctcttttagaacaggatgtgattgtaaatgaagatggaagaaataagctgaaaaaacaaggaggtaaaaattttgctctacacttatataaaataaatttatttagtcagaatagtctttaaagtttttcctaaggaagaaaaccccatgtctttgttttaatagaaactcccaatgaagtctgtatgttttccttagcttatggtgatattccagaagaattaatcgatgtctcagatttcgagtgttctctctgcatgaggtaagcatataaaactttatagaagatgaatattttatgttagtatacataaaataccgtgtagataaaggtaataatagacaatgtaaagtaacacaatgctggaataaaaatcaaaagacatgaattttagtcctgggtttacctttcatgccttgggcaaataactgaatctctgaacctcaggtttcctaatttagaaagtgggatcaagctttgcatggcctacatctcattgttgtgagaatcacatggcttcagtataaaaggaatctgggaaattgtaaagtact

SEQ ID NO: 128858 - DNA, 1039 bp, Homo sapiens
cccgagcggccgctcgcttcctgccgcgcgctttccgggaattggctctcgggccgggcccgccgcggggaaacgactgccggggcggggagagaatcccccgcgagggcaactaggccgggcaggcggcgtctcccttcctcacccacaaaagtcaccgggacaattgggaaccgcgggagggcagaattgcataagctgggggcggggggcgttgtgtaacgggtgacgtccggtgggcgtggcgggagctccgcgcgggcgcccggccccgggaggccctgcaggccgccgggcttggggcttggggcggagctgcccagggtggtcccttgctacctggaaatgcctgaactggttcctcttgaaagtttcagctggcctgtttcagatcctgcttatttcctatgtactttgcagtgcacctagcttatggtaaagatgagaggggctgcctgatccatagttctctgccacgcttctcctggcctttccacttaggatcaggctgtggggaaaggccttataggtcttgagtgcatttcttagtctccaagaagcagcctcggcctcctaacctaggttagcactttcttcttaaggtggttttaggcgctgaaagggggcagtttcaagcttctcttacgtaaaaggaagagttgttctatataaatcagtagttctctaccagggggattttatctcccctctctcagggggcattatttagaacaatatctggagagatttttggttgccacctcttgtgggggtggtgctggtaccgacatctagtgggagaggctggggtgctgctcagacatcctactaggcacagcaggattcccacaacaaagaattatcaggccccaagtgccactgttgataaaccttgtgttacgcgtatttcaagatcttagtgtctatccattggcatgaaatgataggggaataatccccaagaaaacagacatctagaatagcaactgactttaggtattacaggtaaatttatagactgtgtaactgaaaggatcat

SEQ ID NO: 128859 - DNA, 1010 bp, Homo sapiens
aaaggagctagttgctaaccagttaccttttcaaacagatggatgttatcgttttgcagctgaaattgctggaaaaagcatcaagcaaatgaataactaaaaattaccaagcgcctgcctctgcatacggtactaattgaatgaaaataatgtttcttaggtttgatttcataatcaaggtaaaatattaggaaaatgattgtttaaaaattatttttccttctcaaagccgcagatagtctacccatttaatgaaccacaatacaaaggaagaaagtaatgtactgagagagaaataatagcacctggcttgttagttctttcattagatgaattatctgtgtttttcccgaatctttctctcccctgtaactttcagcatgctcattttaaggattacagaaatagacatgacttgtttattggagaataacataagagtatgcttgaattcactttaattacttatttcataccctggtgcttgtcagattcctttttttccaaactattgaagtagatatgattggatctcttctatttttaagcagtaaattaccagtttatttgcactcacaaattacattagcacatcaagggatggtcttgattattgaacaaaattttgttatatttacctctgatatttggagttggaaaatgagagaaaatattcgtccagggagtggataacaataaggttatgatagtatggtacttttattataagtgcagaacagtagcttactcgaagagaaagtggtgtattctctcatggtgaggtggaagatggaaataattgaaacatgaacatgtttctgctttcaaagaatatttgttgatatttttaatagcaacaaaaaggtagccaagagaggcaagaagtagcaactgtctgggcccatgtctttgtcttctctgttccctttaacacagagctagtgaagtaggtgagcttgataaatgttagagagttttagtgtttagagaaataatgtgtttataagaaa

SEQ ID NO: 128860 - DNA, 1027 bp, Homo sapiens
gcatggtggcaggcgcctgtactcccagctactcgggaggctgaggcaggagaatggcatgaacctaggaggcggagcttgcagtgagccgagatcacgccactgcactccagcctgggcgacagagcgagactccgtctcaaaaaaaaaaaaaaaaaaaaaaaaaaaaaattcctacatagtttacagatcactttaagtgatcggataggcagggatctgagccactgtttcaattttacagatgaggaaattagcgttgtttcttataatatgaatcctcgttattaccgcaagtaatccattttgaatgaaaacacaaattgccaggaaaaaatggctgagacaatctcttcttgggcaactttcaaggaatgctcccgatctaaccttaaacaaaaggaaagggcaaaccaatgttatcttttaggtcagaaaaataaacagacttttctgttttcttccctcttttgtaagcagtgacacttgagaagtttctcaccagcaggtttctgcccaagcctgagaattatctgactgacatgagcctaaacaagagtggggacaatctgaggacgcctccctggtgctctaaacagcatgttgtgagcggatggaaatgaaggctacagtttttagggaaaaatcttcctgctcattttttgatgacattgcatcgtatccctgacccctgaaaatgttgagaagagtagaaaaggatgagatttgtcggtatccgcttgctttccgcatgacttggatgatttccaaggaacctcaggggtcaaatttcttaactgcaaaggggtgggactggcgaaggcgcaatcagcagtcccatctgcaaagcctactcttgctgtgtggtttaacctgcattatggccctgggagattcacaggtgtctttctctgccttctgtaggaggctcagtaaagttgcctcaagtcaaacatttaagaagtgatacctggccctgcaaggtgcctcacacctgtaatcccagcactttggaacgctgaggtgg

SEQ ID NO: 128861 - DNA, 3346 bp, Homo sapiens
ttaatgtgctcttgtccaggtatttgattgaaccctgtgggccaggaaaatccaaactcacctacatgtgcagagttgacttaaggtatgttctgattctgatttttttatatggtgagggtcatgaaggaaattctgactttttgtctaatgcaaagaatgccttaaacaaacacgtcattttttcttggtgacttcatgaagaatggtgtttagaaagtagcatttcatgtttgttggtctttcagcgaccacttcgtaatttggttcccttagaaaatgtggttctaaagcaaagcaaatatggtagctcggccatgaattcaaaggcatgggaaatgatagattttatgcatttgaactagcaaacagatgtttctcattttatttccatgctttctaacttaaataattcatcagcttttctttcttttctctgataggggccacatgccagaatggtacacaaaatcttttggacatttgtgtgcagctgaagttgtaaagatccgggattccttcagtaaccagaacactgaaaccaaagacaccaaatctaggtgatcactgaagcaacgcaaccgcttccaccaccatggtgtttgtttctagaacttttgccagtccttgaagaatgggttctgtgtctaatcctgaaacaaagaaaactacaagctggagtgtaggaattgactatagcaatttgatacatttttaaagctgcttcctgtttgttgagggtctgtattcatagaccttgactggaatatgtaagactgtgcaaaaaaaaaaaaaaaatttatgtgtattcttattcaaattgcttctgagaagcaaaactctttaaatacattatggaagataatgaagatacttcattctcttgtgatatcagtgtatgcgtacctgtgtcgctttatttgcagtgtgttgagggactggtgtatccactggaatagttggtactcttggatgtgttttctcaccaagatgagcaaagaaaggtttgcacagaggagtgtgaatgtgtgtttgttgctggctgaatggcaatagatgtctaaggtggattcagtgtctggcacactgagacacctccaagaaggagattgatgcatcaggttcagtttaacctggaatatctgactacccctgaatccacccagaaagggggcccaacacccttgtccatttatgggtattttttttcgaagttattaagcatattccttttccacgaacctcttctgtactttgattgtaataggttggctcttacacccattccaaatgcagtttatttttagacccgattgcaaatagtgatgtagttttaaccagtatggattagttcagggatgaactgctccctctagccttactggctctgatccacagggttttgttttgttttgttttgttttttgtttaagtcgagatataaaaactgaacacgataacacttactcttaaatcaagcatcaacactttttccctgttagaattctttgcatttttgtgtttgtaacagaaacgccttaagacactatgtttgggaatataggaaactatgtgtgtcccaaggaaatccctgtaaatttaactcacctacaaaaggctttttccccgcctttggttgttaacggcattcctgaaagccacatgtgtttattcattgggcttgttcttatcagcaaataggttttctggttttatgactttttgtcttattttatttttcctacatttctttttttttttttttcctttagaatgccctggaaatatatttaagtggtaatgaaaaatagtaatcatagtaaaacgcaacaagaagaaaaccaacccaaaccagtgaagttttttagaacctttagaagggtggtctttattcaggttttactgtaatggtaaggattgactcaagagacagtattagtaaatttattgtgtatggatcaaaagtgaataatgtatgaatgagagctgtaagaaggatttttattttgttataatttagttaccattttcagtgttatttcaaaggttctttgaagaattttggggcagggcatcagattagagttttaaaatttgagtattttggatatcagtgttcctcatgaagatatacatggatattcaattttgatggcttccagatttgtaagattgtatgttgtatataccattctattaagaaacatgtccactgtgctttcaaacatagataaagcatgataaagattattatttaagatatacttgtatttatacctcagatattcttttgggttttgtacctcaaggcttttttcttcttattgtaaatacactttacgtgaatacagtctaagtgaagaaaataaataaaaggaagaggtttataacttgctctatatctgtacagattataatcaataagtgcactattattaaatgtttaaagtaagggaaaagtctgggctgccttccttaatattgcatctcactcccacccttaaaaccacagattgcaaagcatagcattttagcatcaactacaatcaaaagagcgatttgctgaaggaaaaatcggactgcaaatcattccaaggccaaactgcaactgagccacccactcccaaacaggaaaccctggtgaaggttcaggaagcacggagattctctccaacaaaggtccagttaggaaacgacgctgagaggatgacgacaacgtgcaacagcagaaagatgcttgcaagcagagtcagggtcaccagtgaatgccacaaaagttctctttcccactgtttaatttgacaagagaagaatttgaaggatatgaacattttcaagaactctgctgaggtcacttagagcgccatcacaacttatttgtgtgactaattgcctagattgtaagctctttgagggcagggcttgtctcttacacatctttataatcccctgcagcggctttcagtattttgtacttgtaggcacctaataaatttattatttgctatactgaactgattggattagcttctgttactgcaaagggaagagcatctaggatcccgatcatcttaaagcctccttttcattcactgctgattttcagatgacagagactggaaatttccaacttcatgggactttttttttttttttttttttttttttttttgagatggagtctctgtctgtcgccgaggctggagtgcagtggcgcgatctcggctcactgcaaggtccacctcccgggttaacgccattctcccacctcagcctccccagcagctgggactacaggtgcacgcggccacgcccggctaacttttgtatttttagtagagatggg

SEQ ID NO: 128862 - DNA, 1394 bp, Homo sapiens
aaacctcttgagggcagaggcatcttgtaaggctcagcaggataggtccatcggaggtatatgttgatgccgcctctaccatcttgaaaataaacaaacagtgggagtaggctgggtggccttgccggctttggaaatgagtgcaaatgtctgatgtttttgtttttatttatttatattttttgagatggagtcttgctctgtcacccaggctggagtgcagtggcatgatctcggctcactgcaacctctgcctcccggtttcaagctattctcttgcctcagcctcccgagtagctggcgctacaggtgcccaccaccacgccatgctaatttttgtatttttagtagagacggggtttcaccatattggccaggctggtctcgaactcctgaccttgtgactgcccaccttggcctcccaaagtgctgggattataggcgtgagccaccatgccctgccagtgactgatatttctttattgcatgcactctgatataggtcccagaaaaaaaaaaacaaatgtcatcatttttttcttttttcttttgagatggagtttcattctcatcacccaggctggagtgcagtggtgtgatctcagctcactgcaaagtgcctcctaggttcaagtgattctccttcctcagcctcctgagtagctggacttacaggtgcctgccaccacgcctggctaatttccatatttttagtagagacagggtttcaccatgttggccaggctggtcttgaactcctgacctcagatgatccacccgcctcggcttcccaaagtgctgggattacaggaatgagccactgcacccggctcaaatgtcatcattttgactcgagttgacaacagctttttttcactttctggcttgctcttaaatatgcttggggacagcagcctatttaagtcatagatttattagcccccaatatttctttatatactgattatatagtattatttatatcatttaatcaattaacgttgattatatgtaactaaaattgttagtctaactaacaattcgacttcaaaaactaggtgtgtatggattgccttggcactgaaaaatacatcctctttccaggtgagcgaaggaccccctctgaggctttggaggtcagtcattgaagtccctgctgtgccagaggaaatcttaaagcgcctacttaaagaacagcacctctgggatgtagacctgttggattcaaaagtgatcgaaattctggacagccaaactgaaatttaccagtatgtccaaaacagtatggcacctcatcctgctcgagactacgttgttttaaggtgagcgcttcccagttgtttttttgtgacaaggatgactccatatatgaaccaagcctatatgtcactgat

SEQ ID NO: 128863 - DNA, 2036 bp, Homo sapiens
agaacagtgttatctgagctggtcagataaagatcaggtacgaagatctctttctgtctccaccttgtctacagaaatttcagttgcttcacacccctcttggagggccgttggatttaaaatttcacaggtgtctgtgtgttttatcttgctgtaaaatgaataaataatctttttctgttattcatctcagtctctgccagaaatacttgggagaacaatacccatgcccttcttacttttatgtaaagcttaaagaaaacagttgtcgaaattaatgatcaagatcaggattatggcttttacagccttgtgtttttcttggctcagtgtggtattacagcaacgtaatttaaaagcagcctctcttagcgctcaaattgtctctaggattggcacagtggactttattttatgagaaatggagctggtctggattatttcattggttgtttcatcctttcatattttataaaaacacaggtcacattttcctcaccgaggtatttgttatgtgctgtaaccatggagctgtttaatcagtttgtcctatggagctacatttgagtgacttgatttttccaccacatgctcttttaaagagttatgtattcaaggagacctgaagatcgggatcagcattttctacctgtagattgtttatgggtttatttgcatttttatatatttgcatattcatatgcatttttatagcctctcgagcatgctttctaaaacttaagaaattactaattcagtgtgttttatttattaattgaactgaactgaatattttcagttcagttcaattcagaactgaatattttagcagcttttcccacttcaagaaggaacaaatcagttaaactcatgcaaatctccagagatactgaacattttgtactcaaggctgagagatctctgttcttacgttcttgtacatatctcagataagatttttcatcaacactaaacaaaagtgtatagtgttttcagtaattgagattgataaattagggatttttttttttcatgcttaggaaagaaaaaactgttctgtaaactaaaagagcaggcatcctctagagccgaactctgaggtggatttaagagtgtttgggtattgtgggtgtttaaaaattttttcactccttcatgaggcaggaaatacttgaggatagtgacgccggtggcaattcataacttttaccgtattaacctctagtgcactttctacaagtgcttgttcagtactgggctgaggtatttgatgccgatatttgctctgggacatttccttgcaatgtccatgcaaattcaccaagctgatggagaaagtgctggtgtcgtgcagatgtgcccaaggaccagcgcctgcaggccatcaaggctgccatcatgctgctgcctgacgagaaccgggaggttctgcagaccctgctttatttcctgagcgatgtcacagcagccgtaaaagaaaaccagatgaccccaaccaacctggccgtgtgcttagcgccttccctcttccatctcaacaccctgaagagagagaattcctctcccaggtacgggctgcatgggaggtgcatgcacacagggggcagcctacattcttcctaggactctccgtagctgtggttttgtgggactctttcctgaaacaagcaagaaggttagaccgctatattagtccattctcacaccgctaataaagacatacctgagactggtctgttggcgtgcatgagaaaatagtctcactggacttaacccccacagacaaaatccatcgaactgatccttttcctcagctctaaaggaacttgaaaagtatttcttagctagaggcctggggcctagttatgctagtgcaggttaggttgcttctgaaagtcatataatgtttaaatgtatgtttaaatagttccttttgagacagagtcttgctctgttgcccaggctggagggcaatggcacgatctcagctcactgcaacctctgccttccaggttcaagccattctcctgcctcag

SEQ ID NO: 128864 - DNA, 1049 bp, Homo sapiens
taacatgccatggctgctggtgagcattcaaaaggcaaagcagtctgtcttctctggagttcctctgtgcttagagtaatattttccctgctggctatttaaaactgcatattttagattctcatttcggagtggcccacccccatcccaccaaaccctcaagaatctgaaagtccataatacttcttgagttctggtcagtgtttccagtgactcaaaaccaactgtaaaagcctcacatggtgggatctgtggagcagggaggaatcctacacaaggttcttttcctgtttggccttgccctttcgggtcctgttcagagaggtcatttggagagctggaatttctgcttgacagcctgaaatgcatgacatgggtttcctgctgttgcatatagtgctggggtggacctggtttcaggacaccagggagcctggggtcggctcacaaaacccccattgttccttttccatcttcctttagaaacctaaagatgtaatgttctccgggtcatcagcagcagattttattttgacttcaggtcattcactgttgagctctggagttggctcccattgtgttaggctctcattgctgttttcccatcatgtgttatctgcgccttttaaccctaaatgctttcgatctcatcaagaactcagaagtgattcttacccttttttcaagacaaaagggaccttgtttttcacactctatcagatgcacctaattagggtattacatgttgttttctgcttgttccttcctataccgccattctgtaaggaaatccatcagcttccttaagactgtagaccccaattctccaggttcaaggtggaaggacgctcctaactgaggaaacggacctgtcaacccccactcttagaagatctagaacagcactgtccaggagaactgtctggatgataggaatgttctttatctgcacaggccaatacagtaggtactgagcacaaaagatgaaggagcacctgaagtgtggccagtaccactggggaactgaatttgtcattttgtttaattta

SEQ ID NO: 128865 - DNA, 2320 bp, Homo sapiens
cctgttaaattctttaaatacatctttgttatttaaagaacaaaacaaaacaccgggcactgtggctcatgcctgtaatcccaacactttgggaagcccacgtgggaggatcgcttgaggccaggagtttgagaccagcctaggcagcatagtaagactactgctctctacaaaaaatttaaaaaagaaaaagaatatgtaagtggggctgggcacagtagcttatccctgtcaccgcagcactttgggaggctcaggtgggaggatcacttgaggtcagcagttcagaatcagcctgggcaatacagcctgtacaacagagtgagaccctatttttaaaaaaaaaaaaaaaaaaactttaaaattaaaatcatgaagtacaagggggaaattgatactactggcatattatgagcagcctcctgctcatgccctgctccctgctggctgccagccccagtgtgtgaatggctcctttctgtctttgcagagtgacgattcagacgaggatgagccttgtgccatcagtggcaaatggactttccaaagggacagcaagaggtggtcccggcttgaagagtttgatgtcttttctccaaaacaagacctggtccctgggtccccagacgactcccacccgaaggacggccccagccccggaggcacgctgatggacctcagcgagcgccaggaggtgtcttccgtccgcagcctcagcagcactggcagcctccccagccacgcgccccccagcgaggatgctgccaccccccggactaactccgtcatcagcgtttgctcctccagcaacttggcaggcaatgacgactctttcggcagcctgccctctcccaaggaactgtccagcttcagcttcagcatgaaaggccacgaaaaaactgccaagtccaagacgcgcagtctgctgaaacggatggagagcctgaagctcaagagctcccatcacagcaagcacaaagcgccctcaaagctggggttgatcatcagcgggcccatcttgcaagaggggatggatgaggagaagctgaagcagctcaactgcgtggagatctccgccctcaatggcaaccgcatcaacgtccccatggtacgaaagaggagcgtttccaactccacgcagaccagcagcagcagcagccagtcggagaccagcagcgcggtcagcacgcccagccctgttacgaggacccggagcctcagtgcgtgcaacaagcgggtgggcatgtacttagagggcttcgatcctttcaatcagtcaacatttaacaacgtggtggagcagaactttaagaaccgcgagagctacccagaggacacggtgttctacatccctgaagatcacaagcctggcactttccccaaagctctcaccaatggcagtttctccccctcggggaataacggctctgtgaactggaggacgggaagcttccacggccctggccacatcagcctcaggagggaaaacagtagcgacagccccaaggaactgaagagacgcaattcttccagctccatgagcagccgcctgagcatctacgacaacgtgccgggctccatcctctactccagttcaggggacctggcggatctggagaacgaggacatcttccccgagctggacgacatcctctaccacgtgaaggggatgcagcggatagtcaatcagtggtcggagaagttttctgatgagggagattcggactcagccctggactcggtctctccctgcccgtcctctccaaaacagatacacctggatgtggacaacgaccgaaccacacccagcgacctggacagcacaggcaactccctgaatgaaccggaagagccctccgagatcccggaaagaagggattctggggttggggcttccctaaccaggtccaacaggtaagaacttttctcctgcctccgggtgtggggcactgggggtcagaaagacattgcctgtgcttgttctgtgggaagaaatgggattaagtctggcattcttagccatgtccattcctaaggaaggtgtcaaaccaggaagcaccaaaattcaaagaaatcgataggattgaatgggtatagagttccggttggggaagatgaaaaaagttctggagatggttggcagagatggtcacacaatgagaatgaacttggtgccactcaactgcacatttaaaaatggtgaaaatggtgcactttatattgtgtatattttcccataatggggattaaagcatgggatagaaatcaagtcctatcagttcctaagataagatgccagcaagcagcccattgctaatgt

SEQ ID NO: 128866 - DNA, 1308 bp, Homo sapiens
ttatttatttatttatttattttgagaaggagtctcactctgtcgcccaggctggagtgcagtggcgctatcttggctcactgcaatctccgcctcccgggttcacgccattctcctgcctcagcctcctgagtagctgggactacaggcgcccaccaccaggcccggcttgtttttttgtatttttagtagagacggggtttcaccgtgttagccaggatggtctcgctctcctgacctcgtgatccacccgcctaggcctcccaaagtgctgggattacaggcgtgagccaccacgcccggccaaggtatttttaaatgactcactttttaaataagtttctaatactcctctaggtattaggtattactgagtttcaagaaactccttaaatatatgaattgtttaaaaacaggtgtttatccactcattagagagtggttgcctatctttgctaacgttatttctttgctctataggcgtctaaatactttaaacaaatgtgcggtgatgaagctagaaattagtcctcatcggaaacgagtgagtatacaaattgcataatagaatgagggggaaaaggggcaaacaaaaaagtgaatgatgtgttttgtaataggttttgtttctccaactcttagtttgttgttccgtaagcatctacatcttgaatgatatcgcctagacttgatagccttatgtagttgaagccaatagttgcaactagtccattacattattttatctattgtttttgacctgatcacatcagctattattttgcctaattactaactcaatgcctattacataataaagggatcatgcttaaggaatcccagtggatttttgcattgctcatagaggaaataaactgaggtttatttccaactcttctgtcttcccaaatataacaataactgtgcttcaaagctgtagagatgaaagcgaaggccgatttgtgcaatattgaagaataataagagatttggagggaggaaaggaattggaagaggaagaggagaaggcaggagatcccacacagtttagtcaaatggtggtacacaaccgagctggatggtattttcttctgcgtgtgagttgtgaagactttttatgagatcttaggagaagaggtgggtgtagtactgggagtaagtgtcacaaattagagtaaacaggaatgagtctggtcaaagaacatatttctgacttccgggttcaaattttaattatgccagaatccctgagctgcaaaaagttgccttcttggggagtcaaagcttttaaacaaatgaactggaacc

SEQ ID NO: 128867 - DNA, 1066 bp, Homo sapiens
cattttaaagtgtgcagactttttcttagttatttgttttcttttcttccccatcaacagagagaacttttctgaacctaggcgctctgggctatctttatttattctataaacaggctaccacctaaggtatgaaggcaaaatcgggcttatcaggcaggcaaaaatgctttctattctgttgcatcaacattgttaggcaaacagcaagaacaggatcaggaagataaagccctgaggaggtctcacggttcccaggaatttgtgtgaattaaatgatctgatcttatgaaaatgtagaattgcaattcgtaggaaaaactagaaaactggtgatagcagatggcaaacagacacattacaggttcatttgaggaagactaagtgatgatcatctgggagatggcaggaaaattggggccttgaagggctgtcattcatagttgtacataccgtttagttcagcatatttaaagtgtttcttttttcaactgttgcattatttctccatgaggttttgggttttttttttttttgtaagtattttattttcaacgaaactaaatttccctaattttaaattgatattgctgtttggcagaggtgaaagtattggtatcaaaatgacaataggatggctgttgcaaaaagagtcttacctgagtgcttaattttgaacccggtaagatttggatccttgaagttacagtacgcaaattctttaaatgatcatttgccgtgactatagcacacattatattgtcctataacaggaagctgttctaaatattggatattaaagagggcttcaatttccattctgtgcaaggactctaaaattttagacaggctgtccaagattatgattcatcggagataactaaaactaattttttaaatttgagttttgatttcaaatacaagacactgtttattttgccaaaaactctacttggttctttgttgctgttttgctgtttctatttctatgaaaggagacatcacaaacttttcttttctttctttcttttttttttttttttttttgagatggagtctggctctt

SEQ ID NO: 128868 - DNA, 1167 bp, Homo sapiens
atctcggcctcccaaagtgctgggattacaggagtgagccaccacaccccatctcagtatttttttcaacttggaaaaacatcatgaaggtagaatgacacccagtatttctttcctctttgtaggcaaggaaagcagtggtagttctgttttctgcctttctcatataatacagtgttatatgaagcagccaaagtaagcagtggtttggggcagatagatgggatatttagcatagtgtatggactagactagttctcatggtttaagagaggaaaaaacaaacagtcctcttaaccacagaaacgctgtcacttttgtagtccaattaaatgactgatagaaacgtacagggtgtgtacccattttctgaaagaaacctaattccaagaacttcactgtggagtgtaatatcattactatatcatcgggaatgaaaccagatgcagtttcgggaggggaaggagtctgcatctggaatatgaactactccagacatttttttaatgttttcatgcttagctgtggagcagaattaatctgttttcaatccatcactgctgatcatgcatatgcatgaggtcacttctgagatgcatcttaggaaatatttaagcattacatcatttcacgcagttagagagtgggcactctggacagcagcaatagcttaggaattcttgggtcataaaaatatcactgcagcatttcaggccaaagggtcatgattaaattcttgaatgctttttcagaatatcagtttgaaatgttgttttccatttctgggaaaaaaagtatcctctgtactttgcaatttacactggctctgagtaccttttgagaagccacctttctctgaagcgaataagtctgtgctgctagatctttggtgaaaagaaaagcctagaagaagcagactctgccacatatgctagttgggcttcagttttctctcctgcatagaataacatcttataggaaatgcagtgatggatgtcagagcgctttaaaaattaaattatcaggccccaatttgagtatgtgcagaaaggcctagggttggattttcttttttaaaaaaggaaattcttcagagttcacagtaatagtcatcaactggtttgtaatggaaaaccccagggctcttgtccacatgtccacataaat

SEQ ID NO: 128869 - DNA, 2552 bp, Homo sapiens
tggaggtactttgtggccttttgttgaagtgaaaagtagtacaataggccggccaggcttcaaatgagttattaaatctctcttcaactttctcatgatgccttattttcataaccgtttgtaatcagagcacttcagaagcagcacaaaatgagaaacttactctcaggaccccatttctattttttgtaaagggaaaatacatcctcatgtacacgtgaaaaaactggaaacgatgcatacaaaatgtaaaccattcgaattaagcgtgtatgtctgtttgcttatctgtattttctatggcagtcatgttttgcttgtatcataaaacgaaagcttattcaggaaaaataagcatggcgaggtacacatggctaattttgtctttcttctgttctgttctagaaattgaagccaaggaagcttgtgattggctacgggcaactggtttcccccagtatgcacagctttatgaaggtaagctgggaatgccactttttaaaagttggcataatcataatcccttgttcgcgagtattactgatctatgacttattttcagcagttttatcgtttaaatgttttatttttaaaaaaaatgttgtaagcatgcaagacccccaccgctgaaaacaaaagctagcaccttggtaacacgcccatgccactcccccatctgctgcctgccactccctacccaaagtaatcagcatgctgaagactatcattttcttgctttctttttgtataattctactccatttcctgaaaagtacatttttacaaagtaatttttacgtttataaaaagggtagtgtgtcgtatgtaatttcatggggtttttatttttcacttaatattgtattgttaagattcttctatactgtatgggcctgttatgcatttgctttggctgctgtgtaatacaccattgtgtattacacaagaaaccactgtttattcatatccacactctggttggtgggtattttggctttctctgttttgcttttataagctgtgctgttgtgaacattcttgcatctatcttttgtggtacatgcataatgattcatcttgcttctatccctaggaacagaattactgggtaataaagaatatgtatgttcaattttaaaatgcaagcttttcgaaagtgcccgtaccaattttcactcttaccaatctgtgtatccacattccctcaacgcttgatattgtcagactttaatttttgccaaccaaatggatataaaatgatatagagattttgactgccatttccctaatccttcatggtaatgagcatttattcatgtcactcggccacatttgtttgctcacattatgcttctcttaatgatttataagggctctttttattctaaatactaatctttcattggtcacgtgttgcagatatctttcccaccatttgtaattaggcatttcacttttctctaggttgtcttttaatgaatattatgttttctgtggcattcagtttttcaattgagaaaaatggttcaaaaaaaaaaataggatctgtgctgaattcttaacatctcattttcttatcagtgccctggggattgcttggatactgaggtcattctctcagcttctgcgtaccctggggagtgcttgtgctccctgcatgtcaagataaataggctgttcatttatttatttatttgttttgagacggagtctcgctctgtcgccctggctggagttcagtggtgtgattttggctcactgcaacctctgcctcccgggttcaagcgattcacctgcctcagcctcctgagtagctgggattatgggcatgtgccaccatgcccggccaatttttgtgtttttagtagagccggggttttaccatgttggccaagctggtcgtgaactcccgacctcaggtgatccacccaccttggcctcccaaagtgctgggattacagacatgagcaaccacgcctggcctaggcagttcatttaaatgggagtttcattatactctatatgaagtcaatttaaaataattacagctatgaactaatgcattccattttatgggtaactttcaaacagaggttgggtgaatagcaaagtgattcccaagttagaatacccggtcttccttatgtagcctagactgattgtgatattttttccaagaagatggattctgaattgttttattgttagaccgtgtaaaatatcttactgtttcttcattccagagaatatctccaatttcttttgattaacttgcatgcttattttggtggagttacttgtctttcctttagagagaagttttaacctgttaacatttagaagggctttggggaaagggggaccagcattctattggattttcaattcatagctctactggagataaggaaagacaactgcattggcagtaacaccaaagtggctgtccttttgttctcctatttagaaactaagttttcttcaattatgctcgtttttggcattgatttgctgccaggtagcactttcttgtgatatatatgtttgctaag

SEQ ID NO: 128870 - DNA, 1026 bp, Homo sapiens
atttattaagttgtcatcacatcacagggaaaatgggtcctttttcccctcctttctataatttctaggaatgttctttaatagaaagctgtatatgtatgtctccaaatctcaagcagaagaataagagaaaaaaaaatgaacaaaacttaaaaaggaagctccccaaagcttccattccttactaggactgaaaaccagtatggtgatttacaagtgagggcactgttgaaataggcaagaagggcctaacctggggatgagagctgggtagctttagccccttcagcaaatcacctcaattctgtaccagcttcctcatttgtaaagagaaaagatgaaaagcttcaagaggtatttcagcgcccaagtcacggattctttggaagacaacatgctgctgtaaacatgaaagatcaataaggaaagtaaaactcttaagagccttctatgcattgaagtgttttcttcctctcaagttgaaatttagagggctatagacacgcacagaagcaaacgtcattggttttgtgttgtctatgatatgaatacaggcttcatgggacaaatcaagaagtcgatctcttaaaaagcaaattaggccaggtttggtggctcatgcctgtaatcccagcactttgggaggccaaggcggatggctcacttgaggtcaggagtttgagaccagcctggccaacatggcgaaaccccgtctctactaaaaatacgaaaattacccgggtgtggtcgtgagcacctgtaatcccagctacttggaagggtgaggaaggagaatggcttgaacccaggaggcagaggttgctgtgagttgagattgtgctactgcactccagcgtgggtgacacagtgagactctgtctcaaaaaaaaaaaggaaaaaagaaaggcaaattggaaatgttagcttttaaaataaaagtaattaaaactttcgtaaatttacaaaactggggatctcttgtagcagtttctagtggtccagttttttgagggaagaagaatgttt

SEQ ID NO: 128871 - DNA, 1055 bp, Homo sapiens
gagtgttggggtagtttagcaagccccgtggcttgcaaacgtgcttcttgctaggaaacacacacacacacacacacacacacacacacacacagttttggtttttttcccggagatgggtcgctgaatcgtgtccctgaaatgcccccttggggatgcccacccccttgacccggacaaggaggccgaggagcgagttcctgggccggagagaggaaggaagctcgcctcccgacccgactattttcgtaacaaggcgacagcttcttggaagcctgcccccactccatgtcgctgtccccacctccagagtcctggggcgagcctttgatccctccgaaggaggtgcacccctcctctctgcagcaccctgctgcgtgtagtttgctgcgtccgcgagcgtccttcagcgcacagcccctggggcgaggaaagtgagaggggacacggggtcaggctggtggggtctcatcctggtcagcagcctgctagctgggcgaacttgggcagtgacaggacctcgctgtgcctccttcatctgcaccaaaggggtgataactgtattacctccgcgcggggaggttgtgaggatcaaatgagctcatgcaagtaaagtgattagcaggttgcctgttcccgatgttcaataaatacccagtgtgtgctaatcaccgcagaaggaaacccctgcttgcagtcattaatctgcacttaaagaaagcttcgtcccactccccaccttttcccatccccagtcttgttttgagtgagtctttttacacccaatatggatgagcaaatggattcattctcaggattcagaggttgtttcggcgattactggtgacatagaggaatgcagcctaggctggtggcattgatgatgtatttggaaaaaacattgcagctcgggagaaggcagaatactgagtctcagattacattttttttttcctccaaaattctgtttgctgaagggatgagggaaaataatagtccagcagactgcagccctctgaatgtaaatctatcagcagctccaagaggttgactaa

SEQ ID NO: 128872 - DNA, 1178 bp, Homo sapiens
ggcgcttcccgctgggaacgtggaggcccgtgggggaaacattccagccttcggcggaggaggcgcggggcggggcgggggggaggagggaaccgagggggcgggacagaggagaggcggggcctgggcggggcggggctagagggcggcctgaggctgcggccacgaggaagaggggcggggggcggagcctgggaatggggcggggccggagaacagcccgtcgctaaggcctgcgacccagacagcggggaggaggcggtgccgcccgctctggccccgcccctcggggggtgggcccagcgggagggcccggctggcggagcgcgcgggagacagttcgctccgactgcccgagcgagggcgcttcgctcccagccaggacatggccgcacctctccgcatcaggagcgccggctcacggacttctcgcccaactccctgagcgctccctcgtttcgatctttagaaaaccccgctttctttctggggccgtgacgaggggcagggagcggcgagcaaggatgcgttgaggaccgcgagggcgcgcgtctcgggtgccgccgtgggtcccgacgcggaagccgagccgcctccgcctgcctcgacttccccacagcgcttccgccgccgcctgccgtgcttgatgtgcagaaagaagccggacaccatgatcctaacacgtaagctagacttgcgtcttgccgtcgggctggccgcgggagcgggctgcggaggggacccgccgcgagaaagtgtcaccccgccttgtcaagtcggtgcctgttctgtgctctttaaacgctttctgcagagtctccggattttcttggaggtggtgtggggatagcaggactcgcagtttggggagggagtttgaattttggaggagtgactcttgattaccttttgcctggggaccgcgggccagcgcaccaggcgggctccggatcggtcgcaacccgtgaagggaagccctggttcactttcctccttgagccgggcgggggctcgcggctctggctcgaggggcgcggcgacaccgccttctaccttcctttcctctggggactgctctgcgctcgtactgatctcctgtcattcaccagcttagtccaaaatcaaagtgaactccgggagagtttactgtttgggaacattttagaccctagtggcgc

SEQ ID NO: 128873 - DNA, 1109 bp, Homo sapiens
ttatccaaggtggtactggccacatttccagtgcttggtggccacgagtggctgtggctaccctcttggccattgcaggctttggagatatctatggggtgcctctggtgtgagcttgctggtgagagccagggattgtggtccctgtttccctttccactgtcaccacccatggctggtgaggttttcctctcttctctggtgtcaatgccacataataaaatctgtctgcagacagtattctctctctctctttctggaccttggaattacattccccttatagggtttatgaagggttttagtgattgctgaaacaatgaattatactgacaggtcaagtgtcttttgaatgcctttgagaaaggcaaaagtcataaataggtagcaaataatgaatttgcaggtacacaaaaactaacttaagatgcagttatgtttagagaagtaccaggatttagcagatcagaagctgtgggctgtgggatcagaagaaggtttcagattactggtggagtggagggagaggcgtgggcccgagaggtgagtggaagggtggcacaggggacaagaaccaagcagggttagagtgatgctgacctcacctagagatgaagatgaagtcgccaagtgtggggggaagttgaaggagtatccttgggccactaactccgtttccaccctttcttcaccaaaatgttcccctaaacattcattggcctgaggaaaaatctggaagagggattaaatgataagcttgctccacactgtagtatgtgtttgggggagtgctgggggattatattgggggtgagatagataacgaggtagaaaagtagaaatgggtttccatcagctccacaagaaaattcaaaagaaaggtgagaaaggaaattacaaatgactggtaatagcaaagaaagtggagttcctgaggcctcttcgtagccacatgatttataggaagccaaagataaattgggggtttgcttacattgctattaaacccttattggccaggcacagtggctcatgcctgtaatcccagcactttgggaggtggaggcgggtggatcacctgaggtcagcagttcaagaccagcctggcc

SEQ ID NO: 128874 - DNA, 1019 bp, Homo sapiens
gggctaacggggacatctcgttacgtgagttagaggtagggtagacggtttgaaaatggatacatagtgtttgatgcatttttgttgattagcataatttttaggaatctcagttgaaaatttttcttccttgtctgtttgtattcaaataccgtgtcacactcttgtgtatgatttgtaatccatttagtgcggaccaaaggtttaacatgttgctttggtggctttagtgctgcttatttctctaatttttaaattcagcatttaaaattttgtcatactgcttcagtcacttcatcgcttaagaggcaattcattttctttaaaaataaataggtttatttgtatccattataaataattttggatcctatatatattgatggaaaattttgctcaaataaaaccttcaggtttataaaagattcccacattattactactcttggttatagcttgtccatcgcattataaattcttgactactttctcattgtagggaagttctgattttgcatgttatatgtcatctgtgcagagtaatttatttcacaaaacactccacatctttttccagtgttaaagcaaccttgttttataatgtattttacacacacacacacacacacacacacacacacacacactcttactgaaacacatctaattgaatgttgactaagttttctaatgttgcttgctggaaattggttgaaagattgtattctttggtttgaaataagttgcaactgtatttatagcatatgaagctacataaattcagatagaggcctatgtcatttttttccctgtgtgaatcaaaagagcttggaagaagaaattggaaatgactttaaaaacatgtgattgtttggatttaattaagcggatgctacgatttatattttgttgttacatttcaatgtagttgaactaatgataactaccatttatttaatatttgctaactattttacatgtattatttcatttaagcatcatcacaagcttagcatgat

SEQ ID NO: 128875 - DNA, 1112 bp, Homo sapiens
cattttgtaataaaatgcggaactaataaaactcactttagatttgaaagctagagctagcgcagagaagattgacggtgatggtaaaagtgaaaatcctgctacatgaggattactggaagtaatttgccaagtttagcttggaaaatgaaaaataataggcttattattgttccctttgaattataaaaatgtgttctatggttaaggctttttctttgtagctccagagagcaaaactagatcccgtggatggtaaatatatgcattcaatgtaagaaagaagaattttgaaatatcattgttttgaagtgcaattggctgcttagtgggatagcaggatagcaagctaatttgtactggaagtgttcacctttagtgctcagctgtcaagactgtacatgccatattttgtgggaggtttaattaaatttaattaaaatggattttttttcttaagcaagtattggaagagtacattaaaagaagtataagccatttatgtatatcctaaaaccagaaaaaaaccacaaacccttattttattagagatctttcttaaaatgaggatgtagtttttggaaggaaaaatcaggaaaggaaataagaggagtagcaccttagtaagcagatgtgctgaattaaatctcatgatagatagtgtcagttgtttgtcctctgtattgcaggggcagtattttgtgagaatatgttgtttaaacaggtacttaaaggcagtgtaatcaaacacagcagcttaactgttttaatatttctgtgggaatttgaaatatttagatgtttaattgatgttaaacttgttaaagatttccttaagattcttaattgtcaacgtcataaaagtatttttatggttaatttgagtaattagagaaccaatgtgttggcgtgtagttagttataaaattatcagtctcagcacaacattgacttaaaggcagggtgatccagaaggataggggtgtttgttttgttgtttcttcccccgcttttttgtattataaaagcgagaaaagattctgcttacatgtaggaattgtcttacaattctcttatctgttttgattaatttggtcattgatcatgcatta

SEQ ID NO: 128876 - DNA, 1036 bp, Homo sapiens
aggttataattttttcaaagtcacacagctagtaactgttcagggttgcgatttgtgactccagagctattagaatttaatgctttccttaagtgcacatattcattattgtctctattctgtaaactgtaattgtgtcttgcttttgtgttcctaaccaagattattagtgtcttagggcagtgatctctccgccagcatatcctaaacttgtatgatcatgaaaagcttttattcaggaatgtgtctcataatggggactggtgaattgaatacagctggctaaaatcacgtggaaaagagcctatcacccttttgtttccttacagagaggtcacacctctcatgggtttagagtgtgaaattaacaaataaggtaaacttgggtcccttgtacatcacttaaagcacttgtaagtatattacttttttggggtttggtactacaacccttatcatttcctcttacctttgataatatttcttcatagcccttaatttttaagtttccttaaatttcttggctacctgaacaaggtatttcacctctttgcaagactggggaagtgtcatgccttttacatgttctttttctggtttggctaacgtgagacatttttcaggcttgagtgaatccatgaccagtttggtataaatgatgccctcaagttactgctgagctatgtagtttaattttcttattttttacattgaaggcatatgacgtaactttagtgtgttaactttcttcctaggtgtctcttcctcagataggataatcccaccatttttactgtttacagcaaacgttcattatatatgtgacattgtagcattccttgaattcttttctatattctataatttttcctttaaagtccagctatagtctcttcatctttttaatttcaagcttacagaaaattgaaactagtacagtggacacctgtgctaccctttaccaaaattcactaattagtaatgttttgccactttgcattttgctctcttttaagtataggtaaaagaaatcagt

SEQ ID NO: 128877 - DNA, 1050 bp, Homo sapiens
aaattggtctttgcattttactaaacattattggaatatttaatttatgtgtatagggaatgctgcaaaatgtttttattccctagagtaagagttggcaaaatttttatttaaagggctaggctttgtgatacatgtagttgctgtcttgttgttacaactttgcccttatagcacataagcaatatgtaaatgaataaatgtggctgtgtcgcaataaaactgtagttatgaacatcagaatttgaattttatgtaattttcatgtcagagaatcctttttttaaaaaaaaatattttaaaaactatgcttttcttacagtctgtacaaaaactggccagtgcttgtcctagggttgtctgttttaataactgctttgtagatgcttcagtactgatgtgtttctactatggcccattattcttatcaggcaagctaatgaagaatatcaaatactggcgaactcctggcgctattcatctgctttttgtaacaagctcttcttcagtatggtggactatgatgaggggacagacgtttttcagcaggtaaagagttatatcgtattcatatatttaacatagttgtttgtggtcgatacatttttgtttgtcacataaaaatacaattcattcatcgtctgaacctgggaggcggaggttgcagtgagccgagattgtgccactgcattccaggtggaggacagagcaagacttttacacacacacacacacacacacacacacacacacacacaaatacaattcattcaataggttagtaaatacaataagtagttataatacattttgtgatgtgattaacataattatggctaaacttatttttatcattgtacaggtttttgccattatgataaattcattttaacttttgcaacatagaggaaatgtgttttttcagcatgcagtcgcagtttacatgcattggtcttattctggcatttaattataggtggtagtgtattatagatagtattttgcacagatttgtgacattttatataaaatttattgcaagttttactt

SEQ ID NO: 128878 - DNA, 1069 bp, Homo sapiens
cttttgtatccttgttttctcctttaaaaaattgtgcaaactagaatatttagactcccagtcgtgcattgctcgttcttgtctttggtgtttttggtgtttttattgttatttttggtacaaatgcctatcagagccaggaagctgaagtaaggagtgattgggcaagttataggatagcaggaagtacaggtactgttttaacctagagaacacatttagtctaaaggagtcccagttcattaactttaaaatattttgtgatttaaacaaaacatgctgacacctcagttatactgattgaactgtgacttctggtttatgcattctctccccaccctctctgcaataccttggatcttcaatattagttttccaactacagctttgtctgatatattcagcaggtatataatctttgcgagttattcctggctatgtctttttgtgatttcttccatctctaaacatcttctgaatttactgtgtcgtaaactttgctgaaagtatttaggtacttacggagatttaagtaccgtaatccaagaatgtagggttttggttatccaaactaatagaagaatgatgtttagaggatatagaagatgattatcatgtcctttaaaatatcactagaacatcaagtgtctcatctgtgcttctgactggctcaggtgagcacatagtatcagattgcctgtcaccaggccagatgctttacatatgttatccgatgtaattattaacatatttctttaacagagctggcataccaattttatagatacggaatctgagatgcagggagaataagtaacttactcaaagtcccatagttaataagtgaaattttttaaaatgtgtgagctgatacatgatttttaaaagatactttcatgatgaccattgtcttttagaaatgcattattctggtattctctggtttacatattgaaacactgcaccctgtttttcagtgtatagtctttgctatgacttctggccagatgtggaaccatatccgtggacctccatatgctcataagaacccacacaatggacaagtggt

SEQ ID NO: 128879 - DNA, 1044 bp, Homo sapiens
ttaaaaattcttaaacagttggatagataatttgttcccttaacagaaagtttattattgatgctctgtcaacagggcctgtgttttgaattgtatttttcaaaagtggtattcactgcagtcctctgggctatttatttctactacacattgaccttaacatcaacagtgtacacttgggggaaacactgtttagaatggcgcatagtttgtggcagtcaacagaatcaatatataacagacctatatgagctctgaaattctgattctatctttaatagcttaattttccaactgcattgagcaaattgggcctgacaagcttagtaaaagacaggagtattttgttgggtattcatttagttcttaggtttttttttttttgaaaaattagtggtatttgtaaggctagtgactctgctcatattaattgtgaaatcaaacatgtctaggaaaacctgaagatattgacaaagtgtttcttcattgagcttaaatgtaaatgaatacagagaatataaagaaaattaatagtgcaggcagtgtgatgcggtgctgctttgcaagtttatttgtttgtcactattaagatactatgtaatggcacaagtcaagtactaatggtccacttaacagcatgaaaatcaacacaaaagcagtcattattgtgtagctaaagggaaactatacaaacatatggttacataggacataaaaacaatttttgttgttaaaaaagcaataatctttaacaatatgcatttaatgaaataaagcttatgcgtaggctgtaactcccaccgtgaacaaatgcgttattttcaagatttggattttagctactgcttgaggattgctatgggtttgccagatatagtccaaaaattttcactgcattacaattcagttgtgagtaaaactaagcgttatattctgcatgcacatgcagaacattttattgcaaaatgacctgctgatttagtctaaaatttatcatcgaggcattttttttttctatttcttaggcagccataccatattgta

SEQ ID NO: 128880 - DNA, 1010 bp, Homo sapiens
atggcctgaacccgggaggcggagcttgcagtgagccgagatcgtgccactgcactgcagcctgggtgacagagcaagactccgtctcaaaaaaaacaaaaaacaaaaaaatggtaagacaagagtaattgacatacattaaggatatacagaaatcttgatgttagtatttggaattgagattcttccctcttatttatttatgcctttatttttccatctgattaacatatttgttaggtactctgtttccagtagtagtacagatacatcatgcagctcatcatctagtggggatacataatatgatatcggttagcctcaagtctcagtcttcagagcctcgcttcttattgagttacatgatatttgaggctgcaattgttttagaattttgcctcagcaccatggtcattttatggctgtgacactgcatctgatgtctttcaaactctgccttaatctttatattcctttttattttttcatatttgtgtctgtctagttagctttggtagaactccatcttcagcatctgttgttgccgctcattccttctttccacctggttttaatttttagtgtcaccatttaaactacatgcattcttgatcctaacgtctgactgaatcttgattgccagcccagactgctcttacacttcccttcaactgttgctgcctatctatgatcctgccaattaattacaacgaagaaccttgtgatttgtacccttacttcatgacaaagcacttcacacgtggcagatactaaataaatgatactgcatagataaataaatctttctttgcaaataggaactcagattgtatctttagcctttcaaaatgttaagtatatcagaaaaaaattgttttccctgctaacatttgtttgtaattaaaaccacatgcacagagggattatggaactgcataatgagaatgtgttttaatatgtcaaacttcatctaatacagttaattattctctgagtatcaagaagaaata

SEQ ID NO: 128881 - DNA, 1115 bp, Homo sapiens
cttccttttgtagactctttttgtttactctggcatttactcttaaaagacttttcataggtacttcagatggaagagactctaatgttaccaaagccagaatcttctgtttgagtaagaaacccttttgtaaacattggtattaaataatagttgttgagccacttcttaaacaatttagatagggaacttgctttctcatgagacagccaattttagctttagaatgctttatttgttgagaaagtgtttcatatatggagctgaaaactgtttctttgaaatgcttaatagtgctttctttcctccctctggaatctcatggtataaataccttccaaggttctcatatcagctgaacaaatatttgaggtgggtgttcacactgtactctctttctaggcaacctgtttccagctctttcagcagtcatcatgccacagattggtagtgtctccctatcctggtttctgttctctgctttgctctccagtttgtcggtgtcaccattaatacctgcagcgttcaagttgaatactattctccagatgcattctgaacagggaggagtggaagtattacctttttttctgtgtaccagacttatattacttaaaataacaaattgaaacaaacaaacaacatcaacaacaaaaaatacaactaacttctctttagcttttctaatagcttcatcagactagaaactcatggtccacttggtttcagcattgctaggcatagttgacagtgattgagagtttcagaaagatgagctgaaattgtttacgtgcatgatgccaagaagtatactgtcccagtttactaattaaacaaacaaaaaacaccacacagtcgtgcaatggaggtagtagtgaggctatcttcttattgtttgtttaacttagactctgctgtagggaaaaactgctgagattctttcatgttgattccccaaatgattacagaatctcattttagttgcatagcttgctattattagggaagaaagtatctttctaaactctttatgaattcaagaatgttatagagaaagtatcaggggacattagtataggtataaactttaaagagatatgtaacttgagcctaat

SEQ ID NO: 128882 - DNA, 1066 bp, Homo sapiens
ttttcccccaggataaaaattaaaatggacacacacacagagattatacttttcatatatacgtgatgtgacagctacaaaagtaattacagcatagatttatgtattttctgtattcacattaaaagctattcagttgaattttaaaatgctgaaggatgtaatactttttcattttgaacttttaattgcatttagttaaacacaagaaaattctatgaaagtaattatacatttcagtttttctttgttactgaacaaaatgaaatctgtaagtctagaaatatgttatcaataaaacacaaattactaaaattacttaagcagttcagtcacaggacagactttttaaagtttatgtttagaagaaacttcatctaggttatatttttgttgtctcaacatttatttggaaaatatagtagaatgagaagctctctaattggtatagtatttttgtatatatatacaaatatatagtatagtatactactatcctaatagtatagtattatatttttgttgtctcaacatttatttggaaaatatagtagaatgagaagctctccttttaacagttttgatcacaaagtataaagtgtttgctgaaacacaattgattcccattagctgtctcactagtgtctggggcttagggttgttttacgttatcctaggatcctgggagttttccatacctgcagtctatgtttttgttggctgactttctacggaggggcagctatcgtgaattatttcagcatagtctgcttagggtttccttagtattgatgggttttgtttctttcttttttttttttttcctttacctacaacacctagactaccagtcttattgacagggtaataaaggtaaagctcatcaggagagctatttctccattttactatcaggacagataactttttatgaagaagggactgaataagaccaagcatggggtcacagttaaccaaaaatctgtggactgaatctagtctctggttaggagctgctagcccaccatttggttcttccatctccaaaaggctcagtttctctctt

SEQ ID NO: 128883 - DNA, 1054 bp, Homo sapiens
gcactcctgtgatcttccagccactcgagacactgaggcatgagaaccgcttgaacctgggaggcagaggttgcagtgaatcaagatcgtgccactgcactgcagcctgggctacaaagtgaaactgtgtctctaaaaattaaaaaaaaaaaattaaaaagtcatagtaaaataatctgcaattctatttgaattattagtttaaatatgtgtatttaaatgtgtagataaaaatttatacatgcatataaaagatattgcagaaaaaatgattaaaggggaaacttagtaactccttgttaaggatccatatcagtcacatctatctgctctagaaaactgagttttaagcagtagaaatctcctacatatgaacagttttagtgaaacaagtttttaatttttatcatgttgttattaacaatgtcccatgtctgtggattcggggtaatgtatacaagtagatggtccaaaacactttaagaataatggatttaatttaaagtctacagactaccatactgatgatacaaaacagtcattctcttagaatattcttttcaggctactgcctacatgattgaaaggcaggaatttcatagaaatttcagtgtttttcaagctgtgtagcatggatctctaaaagtttagtgctagtctatggtatgtgtatggtgggaggggcttttctcttgtatatgttaggctcccaaacataggtttttctttattttccttttttctagaaagggttccaaagctaaaacaaatacaatagtttgaaaaaccgtttgtatagagaggtcatggaagcataaatgccttactagagaagtcaggcatttatccttatccagaagttggataatatggtcatgaagacagattcaaatatgaacattataatttattactaattagaatttcaataatatggttataaaaacaagactcagagaggaaatgttctgtgcagaattttctctgacctcctccacttgctggtatattgcccaatactgtcctttgagcttttgttgatagagacatcctg

SEQ ID NO: 128884 - DNA, 1045 bp, Homo sapiens
gtatctcatgtggctgccgtggttcctttaataattattaacccctccctgcactgagttcctctgccttcccatatacaagtacttgagtagcattattttgttccactgcataggatcaagtaattatcttctgtcttacttgatcacacatttcaagcctcatttctgatagagcacaacccaatggggctactaaaaaggagcaaagggaatgaaaagagtgctttattcttctgaaaaataaaaaaggagatggaaggaaaagaaaagaaagacgtgttagataaaatgacagatttgggaagtatagagtaaataattttgtaattaattataggtttttataaacaaagttgttactatgctgtatctgggtcctggtatgtgtcatacagggatattctataattttcaaaaatgttttttttattttatgatactcacagactcattttttgctttattttctcccaatattcatttgaagttcagctgcatgagtgttgtctgaaatgaaatgtcagaggctacacttggatgctattaaatgtttgtgttgtttcacaattcatattcaaaacttagaagatattcctgtagagttgcataaaaattgacacatttgcagaccatattttgacaaagccgtaccttatgtactccatgattgccagaattgcagttaaacttggtttggtttatatattggaaaaaattttaaaaatcatagttccttattatagaatcatatagatctgtttgattttccttattttcttctgctttaatctttctctattttacaaataacttcaaatatttttcaaattgtttagaattctctgaagtgaataaaaggtgtattgtgcaaattatgtgttcttaaaagatgtttagatatttcttaagagattaacactaatttctacttatatatttaaataaattttatttaaatatctttgtcttttattctaaacgtactttaattggctcagattaagtatttaaattttataagcatgtttagattgtactaact

SEQ ID NO: 128885 - DNA, 1509 bp, Homo sapiens
ccttgcaaagttgtcttgtgttgtcaagactcaaaaagaacatgccacgtgttagcagaaaggtacagatgtaaacaaaagcttcataaatgttatttaaattgatttaccatcttacaaaattaaattttgtttcataaattaaagctttgcttagggaagtttaaaaaaataacatagttatcttttacttttatatgtacaagtatctctgctgatgtttcatcagaaattttatgattcatgatttgtgtatactctttttggttgttcaatatgatgaaattgtaaattaacaaaagaccaagtgattaaattatacggttagagaaaaaatatttttaggacattcaaatgacccacttcacgcatttgtttcagtccattcccttgtatttcccctacattaccattttaaatgctgatttaactgctgttctagccagcaatgaaaggaatgtctatgtaaatttaaaccacaaattaaagctttcagcatcttctctcaccctgaccctgttcccaacctaagcctcatctggttaaaggcactagtttagaaaaattgccctgatgtaaaaattacaattagttgaatacaattatgacattttaatgttatatttacatgtgctaatttagaatggaataacaaacatattgtattttccttatgttctatgttcagcacataataattttctttctttttcagctttttaattaaatgaagccaagtgggatttgcataaagtgaatgtttaccatgaagataaactgttcctgactttatactattttgaattcattcatttcattgtgatcagctagcttattcttgtgtactttttttaaactgtgggttttcctagtaaatttaatttacagaaatcaatggtagcatttagtaatctacaaaggaaatatcaaagtgtttttcaagcctgttatattcagtgtgtgccacaggattgaaataaatgacaatgtaattatgaattcatgttttagagctgtttactcattagtaaaggaccgcaatgttagtaaagaaaacctatgaaatgtatgttaaagattcttagtattgtacagggataaagcaaatgcatgaaaatatgtcatgtactgaaaattaaacttacttcagtttcagttataaaggacgtgcactgttacgaatagtgttttgttattaattataactagataaaggtatataggacagggaactggatgaatggtacctacaatttggatgcctaaccaaggactagagctccttcttgagatctaaatctaaagtaaatgtgcattaaagcagtgtgcttcaaaggcatcagacgatgaaagcaacataccacaactaggagttatttctcaaacttaaatgtcctctgggaatccagacttaaaaataagagcaaacttaacacactatccattttcgagcaaacctaacccactatatccattttgctcatgtgttttatgcaaccagctttccat

SEQ ID NO: 128886 - DNA, 1035 bp, Homo sapiens
cgtgattttttttgtcgcatcagtatatttaatagtcatgtaaatgactaggaaaattaaggagattttccttgcaaggctcgaagaatgtgaacggcgtagatgaaaataatttagaaaacagagagctatgctgtttctaatgcaatttttataggctttgttcttaatacgcagtggtgatctgatgtaagtgcatcatttcctttggtggaggttgtcaatgcaattaggttacggaatctgctttatggactatctagcagcagatcacaagcacataacataaagtccttttacacatgaatattcaaaatactaggaaataccctcaaatctccaccccctcccccttcacaaatacacatccacttttgtggcttggcaaggagcatagcgtttttcatgatggcagaacttttaattaaccatagttggtctaggaacagatcagcaaggtagggaattcaagtagtattttcttttctttcttaaaattaattttacttttacagttgagagatgttatcttgcagtttttaaaaagaccacgttcagaaagctagaactttggctccacgacttgctacttgtgtcattatggagaaattacttgacctgtcaatgcctgtttcctcacctgtgaaatgaggctaatagtctcctggggtgttatgagagttaaatgagttaacacagtatatttaaaacaatggtactactaaagaacattaaataaatttattttttggctgagcgtggtggctcacgcctgtaatcccagcactttgggaggtcgaggcaagcagatcacctgaggtcaggagttcgagacaagcctggccaacatggcgaaacctcgtctctactaaaaatacaaaaatcagccgggtgtggtgttgggcgcttgtaatcccagctactggcaaggctgaggtaggagaatcacttgaacctgggagacagaggttgcagtgagccgaaatcacacctctgcaccccagcctgggtgacaagagcgaaactccatctcaa

SEQ ID NO: 128887 - DNA, 1121 bp, Homo sapiens
taaagtatttttaaattaagttatgtactgttgtagacataatgctgttgcacacttaataggctaattgtagcataaacataacttttatatgcactgggaaaccagaatatttatgtggctcgctttattgcaatatttgttttattgtggtggtgtggaactgaaccttcagtgtatccgaagtatgcctgtaaatggagaaaagtcccagttttttatagtgagggaagttacatagacatgaaattgaagataagctaattctatgtggaatagcattgttgtatgagaagctaaatagctgatcccctctcttagtttcttcaagtgcacgagagtctggatgccttataatggcctgaccatctaatagagtcacatacaatgatttgagtagagattacttttcagttttagtaaatatttgggtttaatgtgacttcttaattgattctcacatataatgctatatataggattatacatacataatttggggctggactattttataagtgctaagtaatatgtagctgtcctcttacagattgaatatgtaatttatctctagtaatttttgagaaatgaatgctattttctacccaaagattaaaggaaacatttgggatcattaaacaatgatattaaccctataaaataattttatatatttatggctcagtgtaatattttgatatgtgtatatattgttgagtgattaaatcaagctcatgaaggtatccatcatcttgcattctttttttttttttttttttttttttttttgagatggagtttcgctcttgttgcccaggctgaagtagaatggcacgatctcagctcactgcaacctccacctcccatgttcaagtgattctcttgccttagcctcctgagtagctgggattacaagcatgcgccagcacgcctggctaatttttgtatttttagtagagacggggtttctccatgttggtcaggctggtctcgaactcccgatctcaggtgatccgcccacctcggcctcccgaagtgttgggattataggcatgagccactgtgcctggccccattatcatatttttaaccttaaatttttaaagcttctttgaggaaga

SEQ ID NO: 128888 - DNA, 1097 bp, Homo sapiens
tgggtctctgaatgactatataaagcagagctccttgatcccactcccagcccctgtcctagtacgttctcttggggctcttatgtgagaaagaaagacacacacttgtgttgtgttggagccattacatttgaggaagttagcctaccctgtctaatacagtagagaagggattaattggtgaaggtcttgatcattgagaagggagatgatcgtttttggataaaggtgaattaactgtcagctagacatgtctcttaagtcctcccagtatgaaagttcacctaactgcctgcctgtacgttcaacctcaccacacacactaagacccacagaatataaggagctttagattaatagctaattggctgcttgacattattaatgtaactgattgatccctgtgatttagccccagtcttctatccgaatcccctgtttcagattcctatcttagaaggtcacttaaaggatcccagtgaccttatgtcaattccccagggactacatttcttcttcctgaatggaggctcctcttatctacttactcttctttgaatagtgggcttcagtcaatttgcctgctgcttgaacctctttgtaatctcctctattcctggctgaggttcatagtctgggtcttgaagttggttaaggattgtgccaaatgaatcatatgctgcatctcccatacctttcctgtctggcttcttgttccctccatttgctgcctgctcctgcagtcctccgtgtagtgctctcctgcagtcttactcatttgaacctcttccaagtgatatttatgtttttctttttcttgcaagaacttatggctcaaggaattcatgattgaatggaagagacaaatacgtaaacagataattgcaacctggtgtgactggaggaaaggagtacaagtgatgtaatagggatatataaaggaaatcactaggatttatccagatactgtgttggctcacagggaagctgtgtggtcagagtctaaggtatgctatcacaagggatgtgattaattaggaatcgatgtggagcagtcagtagcttatacagtagagagggtgtggcagcagaagttt

SEQ ID NO: 128889 - DNA, 1060 bp, Homo sapiens
agcctataagagtacatagtaggcattcagcaagcgctggtgttccttctaaaagtaccactggctccataatttaatgttctttaagactgaagcttaagaaataaaccaaaaaaaaatcacaaatcacttctccaaagtgccagtttaaaatccttaagctcttaatgatattttttgtagaatctttcgaatattaatttattttatttatgtgaataatttatttataaagtgattaacgtttttcagaagacgatattttcacacttcctcatttactctgtttattcactttcaacataattaaaagtatcttctagagggaggtattacttcacatcatccaaatgtatttgctttcttaactttaggttgctattggcagaacagacattgaagacttagacctttatgccacatctcgggagaggcgatttcgtttatttgcttctatagaatgtgaagggcagttattcatgactccgtatgattttattttggctgttacaacagatgagcccaaaggtaagtacacttttgaaattatcttaataattgtataatttttttatctctagcttgtgaatggatggagcagtataagttttttagaagaactgagtaatgtggtatttcacatgatattgtgctattcagtgttacagactgatatttcttacaaactcttactcacatctcttctcttttcagaaactttcaattgctccatctttctcagcttaacaccatcttacttttgatactctttataaaagactcatattctgcctcttcattcttatatcaaacctgaacagagtagttcagaggactggctttgaggttagccctgggcaagaattctacctgtatctcttctgcgtttgtcatagctcctgcagtgtaaatatattaatagtttcattgtctctcaccttttcatatgttagaataatggttctcaaaatttttggaagtatgtacattcttgcaaatctcttaatatctaacttaacagaagacagctgtattctcatgtgtgcttttttatttgatc

SEQ ID NO: 128890 - DNA, 1023 bp, Homo sapiens
tgcatttaaaacatagtatgtgacacttggctacctggctgtattttttttcctcccggcaaacagatcaaactactatcaaatcctcaaagaagttggttttattgtagacaacttctcaggtattccagctatggagaattcttgggatttctcaacaaagtaaactgagaagtagtagtagagatctaccaaacaatgacaaggaggttatatgctggaaatgattaggaaaatctaaactatattacttaaatgtgaatagaatatttagtcgattactaaagaatgtcaacaattttagataatttaaagtacagatgaccctacatgctggagtttttaagacatgtgaataattagtcactttagaaacagattttaatgcattaaaaggggacatgtgcaggggaaatcaggtgtggtctttgttactccattttaatcattaaaagagaagaagatgtggtccatggagaaaggaaataaagatttaacaaatgttatgaaggacaaaattgccatctttatgaaagattaggaagagggctatgaggaattaaaggaatatgaaaatttagtatatgggtgaatgagacttttggtcagcaaccacagaagactgatcctttgtagagaagtatttgttttctgtcttatgttttctatggagtactataagagttctggacaaaaagctaaaaacgatgtgcctatctacagctatttttcttgaataaaaaataggattatttaaactcttttttcacatttcctaggatgatgtgtaggagagttatagtcctttgaattttatgctttttgtacctgagtttatgaaatgagttaatggccaactggagaaggaaggaaggaaggaaggaagggaaggagagaaaaggaagatctataaagctatattaaaggaaggtggatgattttcataggccattatactttataaggactataaccaagcagttttaagaaaatacttagaacttagtttattgagtgggaaag

SEQ ID NO: 128891 - DNA, 1063 bp, Homo sapiens
caggaagttactgaatttttttaaaaattccagatatcggccgggcgcggtggctcacgcctgtaatcccagcactttgggaggccgaggcgggcggatcacgaggtcaggagatcgagaccatcctggctaacacggtgaaaccccgtctctactaaaaatacaaaaaattagccgggcgtggtagcgggcgcctgtagtcccagctactcgggaggctgaggcaggagaatggcgtgaacccgggaggcggagcttgcagtgagccgagatggcgccactgcactccagcctgggcgacagagcgagactccgtctcaaaaaaaaaaaaaaaaaaaaaaaaaaaaaattccagatatctggattgattgttatctcttgtatattcagaagaaagtatgttgccaattccttgtctcaataagctgcagtgatagtaacaagtagtttaagtatcattgctattctgcaaggtacttttgttatccccatgttatagatgaggaaactaaacccctgaaaggctaggttatttgccctgggtgctacagtcattaagtagtaaagcgatcgtgtgttcttttcattctcatttacagggaggaactttattaatctttgcatcatcatacaattatttccatataaccttttctaggacagtgagtatttgctcatctcctgttacgattactctttctttatctttttccttctttattacatttttgtcatagattcatggataatctccaaacagaagttctagaaatagaattcctttcctactcaaatggaatgaataccatcagtgaagaagattttgctcatattcttttacgatatacaaatgtggaaaatacatcagtatttttagaaaatgtgcgttacagtatacctgaagaaaaggtatctaatcctcatatttagttggttatgttactgttttgcaatacgtgcctctaaaacacattgcccttttgttagttctttggcttctctgtggattaaaagatatcttggatgtgtttcattctgtgtcctaaatgctctggctacactt

SEQ ID NO: 128892 - DNA, 1051 bp, Homo sapiens
gattctcattgattttttttttctacattacctcatcaatcctcagagcaaccttccaggcttgactttcttcagcatattttagaatagtggaagctgaggctttcagatacttagaccgttgtccaaggattcaaatccaaggctttctaagacaatgatattcttaccacactctacttatgtctttcccctccttccgcctacttaactcttccccttccttccatctctcatctccttctctccagaagaataacagctactaatatttgaatagccctttacatttctaaattgctttcattttcatttgtttacctagcagatatttattgagcatctactatttacttggctttattccaaccactggggttaaagtggcaacataagcaaaatccttctctcatggaaatgtatgttagtggagagacaaacaagtaaaaaaagacatactttcagatactgataaatgttatgaaagggagcaagagtcatggggactggaaaagaaggtagactgttaggaagagctttgctgaagagtgaagaggtaacttctggggagagactgtgaagaatgagctatgcgaagttctgggtaaagtcttctagacagaggtaacagcaaatgccaagggcctgaggacagagaagcttagtttatttgagaaaatgccaaaaggtaaagtaagtggacaggaaaattgtaggcgatgagtaaggagaggtagatatgggtcaaatcttttaagactctgtaggctaaggtaagaagtttagttattcaaagagtgactgtaagagtgatgggaagccactatagtatttaaactttaaagcaggagtcagcaaactactgcacctatttttgtaagtaaaattgtattggaacacagccattctcattcatttaatatactgtctgcagctgtttttacactataatggtaaagttgaggcaacagagaccatgtagccagtaaaaatgaaaatattgactctctggccctttacagaaaaagtttgtgaaccttgctttagcata

SEQ ID NO: 128893 - DNA, 1084 bp, Homo sapiens
ccccctagaggggcggaaggtccccgggaccgctgtggagaggggaggccgaggccggcgaggcgcgccgggggctgaagggctgagctgggcccggccccgagctgcgccagacccgcgcgggggtgctggccttggcggcggagctggatcccttgctggttggcgtcaatgcacttgttaaaaatttgtgacagcgctcaggggcgtttttgctgcctttatgatttgaggattgccagttggacacttttctagtttaaaaggatgtggaggaggtgagctactagaaagtatttttgaggacatgtgcaacacactaaaccataatttaggtgtttgaacagtagggagagaaaaaaagaggtgatcgtctgaggtttttacatccagagagcgaagtggctccagtccgagttcgaggttcctgaattggtgggtaggatacttttaatgctgaagattaaaattttttaaaaagttgattattatgcacaagtagggagtacaatgatgtcgcttaatgtaagctggtttctaccttcaggggttttatgaaaactgatctgggttatcagaaaaagatgttaaaacagaaaatgacctttctgccagtgacttgtgaatgctttctgtgtttggtgctccacctaacaaagtgtctgtttttgccctaccaagtgctagctttgggtgggacgagggaaaagatgaaatagtggcctattatattgagccttcacaagctcagcattttcaaagcctcaagattcagacataaaatcttgtctgaagccatcttacctcaaaatgttgcgccttgtgagaaagtgtcataataatacatcaaaataatcactgatgtaagttgtaagagaaccgagacttttatttcatatagttttaaaatttgctgttattacttgaagggatttagaaacaagcttaatagtccaaaaaaaaaaccttgagtctgttgttgggaaaagatgaggctgtacaggcattatcatgaggatgcatttaggtatgcagtcgtcaagtcatctaaaatatataggaaaggacgtgtagtaaattttgt

SEQ ID NO: 128894 - DNA, 1053 bp, Homo sapiens
agtattaatcacatctcagactgccctgccctttgaagattctttttctcttggaagttgccatttacaagcagattttccaaatttcttccataaaacattggccaaggttgggaccagagtgtgggggtcgagggctgggaactggatcaggtagcaaatggaatagaagaaacaaggtgatttaccctggtcctccttccacatctgctctcagctagggatgaccctgaatataaattattctgtgccctttgctgaatgaactgcaatttaggagtagtgcttatcctggtatccttggaaactggagataatgattctcattacagttagtttctatatttaacaacgtggatgtatgtggctctctaggcactttttcagttagcataatttttgcttagtgtttgtattttataaaaataacctctctttttggaatatgtgtatatgtaaaatatatgggatgtacatatattgtgtgagagtcaagtatttttggttaagtcagcttcctattctgccaaagaaaagatcacaaaagacagttatacttctaatcatttggaccacgtttatctcgtttgttgattaacgaggctcttctatttgtattcctccccctccatcctttccttctcttaccactccttttccctctcccctgtccctcctgtccctctctccactcctggcttcttttgtgttttaactctctttgctctctttagatattaggttggtttccgtcaagtaagataaactcaaaggtaacatttgtacggggaactttaggatgcactatgagagggaatgagggaggtctgcagcctcaggcatgctccattcagcgagcacacgacgtggtttatgttttacagatcccttatggctgctgctgtgttaacttcgcttgttgaagaaggttcactgaagtttccccttttaagtgctaacatttaaattgttttaactatttcataccgttttctttatttcagatttactgaaaagtttcaatagtacaagaaacttccacatacacttgtg

SEQ ID NO: 128895 - DNA, 1090 bp, Homo sapiens
agctgctgcctggcagccggtcaccacagaacactggaaccaccactgctcccccagcctggtaacagcgggtccagtgttccagcctgggcagtgtccagctggcagggctgaggtggttgcgcccacatctcaggctgcatggtccagcgagctcaggtgtttgatcttttttcgttaccatggtgagaagtgtgctagcggggaaaaaagacaaatgtatcccatagatgagtatatatgggggcgaggggttctccatgaaatggtcctcattgatttttttgtttcatttgtttttatgttttatcttgatggagaatttgtgattttccttctcagaaaaatagagctatacttacatttcataatttatactgctgatttatgccactgcgttttgacagttgtatcatatcacccagccttctcttctccaggaagtggtgtattcatgggtcccctgagattccagcactgcttatgatgagtgtagaaattctgtcttgtctgtcttgcagaatgacagattagaatatggcatagattcttaatgctgtctgttgggaaaacaatattctaaagatgattagaaagacagttttaatattatgtggaattctgttattacatattaccatttagaaatactacagagaatttataatgaaagcataaaataattgaatgaggtttttaatagtccattagaaaattgttgaaaattttttcctaattcctttaagggaattttattataattgtcttgattgttgtttcaatcaaatggcagtagtgaaaagggcgaaattatcaaggcagggggtaggaggaggaggcgctgggtaggatgctctgatttcttaagaagaataggatagctgtaaagaaaccagacatgattgcttgagaattttcctttcaaaatgataatatcacactttatatcatttatgtagcatttttcctaatttgactttttatctggccatgacttttaaattcagttataaatattaattgcctgaagtgttataaaatccatttttatttgagagatactcacaagcaaaattatatgctgcatttc

SEQ ID NO: 128896 - DNA, 1087 bp, Homo sapiens
ctagagcagatttttttttattttttattgtggtaaaatattgataacataaaaattttccattttaaccatttttaagtatacagattagtgtcattaagtacattcaaaatgctgtgcgatcatcactactgtccattttccaactttgtcatcttcccaaactgcttcgctgtgcagtttaacactaaccctcattcttccctcccccaccctctggcagccaccattctactttctgcctccgtgagtccaactgtccaggtagctcctatgagtggaatcatacaatatttgtccttttgaatctagtttatttcacttatgtaatatcttcagagttcacctgtgttgtagcatgtgtcagaatttcattttttcaaagttcacctgtgttgtagtatgtgtcagaatttcattttttcaaaggctgaataatatttcgtggcatgtatatatcagatattgtttatccattaatgggggtttgagttgtttctacctttttggctattctgaataatgctgctgtgaacagtatacagaaatacctgtttgagtccctgctttaaattcttttggtagatacctaagagtggaattggtcagtcatatggtaattctgtgtttaattttttgaggacaccatacggtttttctggagcaggtgatttttgatgcaggtgtcacccagagaagcctgtatatgcccttgtaaacatgtccaaatttgaaggtctctagaggtatccatgagatgtatcagtgtcactgcagcaattttttttttttttttttttaccatcttgccatttcatggttcagcagaaaagctgatgggcaggggattgtgaagaatcccatgttgcccatatggtggccttcattactgggtagtgtgttccttatgagagtgctggtcatcgggcatgcccagggcagaaaactcgagggcctctagcttactgcatataggcaggaattcaacaacagtttttgagtagccagagtccagagcacagaaatgacagatggaaattaaatcttgaaagaacatattagcagatggaaatggtacgcaaactga

SEQ ID NO: 128897 - DNA, 2038 bp, Homo sapiens
agtttggtgatgaatttatcctccatatttgatgaacagaccttaataatgcgccaaattctattctaggtgcttttaccttctagtttaattctcaaaagagctcggtgagataaacattgagataatgttcagagaatctaaataacttgttcaacgtaaaacatcacacaggattcaaacctcagtgagggtcatggaaaagacacaagtaaatgaaaatacaggttgtgtgagatgctaagagacgaataatgtattgccatagtgtctgactagacaggaaaagctggtatttaaactgcaccctgaaggaagagaaagaaggagccaagcgtggagtcaggtgtggagcttttcagactgggcaaagacgctaaggtttggtgtgtttttgaaacaggagctcagtgtggctgcagcttagtgagcaaagggactagtgaccagaagtggtcttggaggacagagaggaagagccagatcatgcttgaccactgaggctgaagtgaggagattggactttattttactgtaaattgagtgcagagccttgggagggttcttagtgagatgatatcactgaattgcattttaaatgagatcatggttttcttattgcaaaatgaattttcagggaattgtgtggggatccattgaggtagtcgattgccttgccccgtgtttgtggttagtagactgttaggaatatcaggactggcttgtatgttaactgagaaagtacaaactgaaaaccctgtgtttggaattcaagttttgcaccatcgaagacttattgctaacctttgcttctattttgaagctacttatctgtccttgacaaagcagttcctgcttatttactgatcagtttgttgttagaatgacttttgccttaggtcttcaaaagtcaagattttttcaccgagaatacatcacggtaggatttaagataattttatagccagagaaaccttcaagataaagtgcaaattttagtttaaacagtaaaattaaagcgccgctcagctgagtgccgtgatcaagatcacacatattgggaggattgggctggagtccaggtctcctaccacccagttcactgccagtgcagaggatcaagggagggtacaatgttagcttggttaagacacaagaaagcccagagtgacagaagcatcatgcacaagaggaaagacgtgtgaggtgagtttggagagaaaggcaggcgttttgagttatcaataaaatcacaatgacatataaggacaacaaagaaaaaaaaagaaacagtttgacttaaagtataataaaaaatataatatgtaaaaatatataagtagataggttataaagaaaataaattcaaaaatgtattaggaagaaaagggtaccattgcaattaaactgaaaatgttaacgtgaataacatatttttcttgcatgtcattaaataaggtctggaaggggtgtcacttttgacctctaatacactaaaaatgaaccagagatttttggaaagtagctaaaaggacaaaggatttggcttcaaggggttcccctggccaattttgtcaaagaattctctatgaatttgacagactttttccaaaagaagagcataattaattctgttagagtaatttgagtacagaaaattagcttagggagggtgttggtgaccttgacacgggtgattgcagtggaatgctggggaattagaccaattggagttggatgaggaggtaaaaggaggttgggggtagagagagtgattttggatgattgttaaattttcctgtgaaaaggccagaaagtgggatggcagctagagacatgaagtcaggggacagactttgttgggacaggagatgttaaagcatattgtaaagatattaaagcataaagtatttttgtcataatcttttgaatgtgagctacttctgtgaattaactgaaaatgttttcataactacatccttgttttttcagttagtttttacttctaactaaaatgatatcataaatgctaagcttc

SEQ ID NO: 128898 - DNA, 1037 bp, Homo sapiens
ataatttaatatgattaaaatttcatggggtattaggttttgtgttctgctttgttttttagatgtattttgaagatggatcatcattgtccatggtgagttggctgtatatttaaacaagtttgtgtcccttgtaaatgttaataaattaaatcacttatccatgtaaatcttttcacacatgaaatattacttgagttgacatagcaggaacttttggatttagtttctaatatttgtttaacttaaaagagcctttatttaggggagtttccatgaaatacttttaaaaccagtaggttaacaacctaaaagttaatatcgcatgttagctcagaacaaaggattttgtttgtatgcatgtgcatgaacagagattccagaatacttcacagaaatacacacaaagatgtacaagtaaattatacatagtacctcactggaaggtttttataaagaattaagtcatcaaaagctttttaacaatttattttacacagaatttgacattaaggagtagaatacaactacacagatatacaaatgcacacataaatttaaacaagattttccacatagaattcattaatatttgctaatatttctcagtcacgaaatcaggtaatttaacagaggattatttgaaagatctgattagtaaggttaattttccttccttttcctataatttttcatctcagtgtaggcatatctctgacagtcatgcccaggttgctggccaggttggatttgggcgtgagtaatgcttattcttcaagctttctttcagggatggctctacagaaaggtagacatgcccacaggtccacagtaggtatagggtgaaatatatgtagggaatggttttcttagcagcaggaaagattcccaggggaatgtaggattatggtatcctgtatctttcaccagtatacctctttcttttctccacctcgattttctcctttaaagcgttcaggctagtcaacccatacaagaatggcactcttcttaaaggtctcaataaataacgcccc

SEQ ID NO: 128899 - DNA, 1072 bp, Homo sapiens
aatgaggttggtagaggaagaatttggaaacgttgatgtaagctgatgtgagcagtgtgggtcaatatatctttcattattatgtttctctacttcctcagatgtctatttctgtttttagtgttttgtgtgtgtgggagagagatagtggttgtaactgacactgtataacgggtgtgtgtgtgtttctatatcaccatcttatatatacccttattatgtacaaggcacctttggaagtctaccaagggattccttattcatagatgaataagaagtttctgcctatttgttcaaaagcaaccaaaaatgctaacttatgtgctttcattaaggtatgagcaatcctgcattaaccatggaaaatgagacttaactcttcaagcaagataaattcatactttataaaagtacgataattttccctttattgttttatatttttaacagtcttctaattttattagggcaaatagtttccataaacatttttaataatttgtgagtgattcatatagaagatcttttacctgacttgtgagattgcattagccatgctggggcttctgagtgcagacctagcttcagtattagctggtatttgtgttaacttgattaattatataaataagttgatgaacaagagtcattttatattaatgcattaagtggtagggatcaatcctaaaatactgaactatatgtaaaaattatcttgtcattttataggaagttagaataattatttttaatttttcttcatctttcagaatatacagtggtcatatccttgaccatccattaggaaactctaagtcgaagtgcaatataattatatctcattaatgtactcattagcacactgtcattcccatttttgggtcatagtagggccttatagcatgtgttaaccttaaaataataggtgttccaaatcattttctttaagccttatttttttttaaacctgcagttccaaatcagtttctttaaaatatgatctgtttgtaagcctgcagtcaataaaaagctacaataaggaacccctttggaacaaacaactatataataa

SEQ ID NO: 128900 - DNA, 1108 bp, Homo sapiens
cagtttggctttctaaaaatctctttttagattatttctcctgttgaacatagtaaaactattgaatttctcttaagaattcctaataggtcaatagatttaccctccagtgatatctatattatttctttctcgtctcatcaaaatgatgacaggtaaactatatttttccttaaacacctattacagttaaattatgcaaatcattaaataaaaatcatacaacttttggaaagttagttcaacatgaactaaaatggcatgctatttggaaatttagtttgagataaactaaagtgtgttgatgccagaatgttcagcttcagtaaatataataagctcttgtgccttgtatgcactatttaaaaaaagttttttttatttgagtccagtataattcatgtaaatgttaacaattagaataatactctgtatgcttttttgatactgattttgagaatttaaagcagattaccttttaaaactggaccaactaagtaattggtatttaatcaaagagaaaatggtaataaacttttcaaaatctttgttaaaccaaacattcaacacaaaataaactagaaggccagaggataatggaataaaagatcattgcaattacttatccttcctaaaaatatagttttatattaattgtgcttatggaagaaacaatgtcagccaagtccattttatagtttgagtgcaattctttgaacaatagaaatatctgcagtctttcacagatttgtattatgctgaagagtttcatctgacaatctgcttcaagaaatctcagaaaatatgataacattttaactttcattttagagcacgttttggtcatttttaaaaatacctaaagtgccagaccggaacctatagctactgctagaagtcttaaaaaaaccaacagcagcacaggatgtattaagaattatatgaagtcaggtttgtttttttttttttttttttttcaaagcacagtactgttagctgtttttgtggacaggattcgattaagtattccctcttgtcaaactggaagctaggggaaaaagagggatttttatcctttactcttctagagtactgttaatgccccttt

SEQ ID NO: 128901 - DNA, 2256 bp, Homo sapiens
atggaatagttatttttccatgatgaaaaattcttataaaaatggtctaaatggaaaagacatgcatttatacactttttttgtagtctctttctttggtttctgagctctgtacttttgaggacattagtcttactcattgaactgaaatgcgtagcctcaaaggaacaccatagaaaagagccatcattattgtcagtgaacagtcagtacttacattgctgaaatataaattacaagtggttccttttggttaaaattatcttttttttttcttcaaaattcctttttagatgttctttgaagatcatattgatgatgccaaatattgtggtcatttgtatggccttggttctggttcatcctatgtacagaatggcacagggaatgcatatgaagaggaagccaacaagcagtcatgacatgaaatagtccttttatttttatttcgagctacacacatgcttgtatataggttttatctctggttgaatccctcgaacaatagacagtacctttcccccccctttcatggcccattttattgtctgcctttcagtactaagtatgaccgttcctatctcagatcttaataaaaagaaaaaaaaaaacgcattcaggttaaatttggccttaatttaatatacttgttagcaagcgtgtgtgacagagagtggggaaagctacatcattgaatattttgataaactttaccgacttgagtttggtttatttttcccttttcctaaattaactagcactgactgtaatttatttccctgtttcacgtctctcccttccattctgcaggagttttagctatttgagatcgtggaccatcagttttgcactttagagagtgtttctgactctaaacctgttttatcagaaaatttgttttttcttgatcttagctggaaaaatctgccaactttacacagtatttacttggttttgacccacagaatatagcacgttgtgcaaactgtcgattcagcgaaacttaaaaaagacaagaaactactgaggagcttagtaactgctgtttctgtacgtagtgtttaatcttccaagcacatctagtgtctgtcagtttctaattggcatgtgtaggctgctctgtgactgaagaattttcaaaccagctttacacccttcaggaaaaatcccttgtgattggatgtttactatctgccaggaaactggtactcaagatgttgaagctacagttattttatgatagcacacttcccttgatctgcttatttttattccatcaccatttaccctttttttttttttaaattttgtagccattcttatgatgctcttgatttgttggttacacaaatcaattttattaaaaatccaaagataagtctttaggtatattttgtaccaaattaaattagaagacaaaaattgtgctttcatagttgctacaaaggtaaataatggagagatttggtacaaaacaacaaaatatatatatattctcatatatatatatatagctgataaaattacctgaggagtgtaatgcttatttttttgtgtatatctttgcaatctattttatatatattgacaaaagagactgtgaaatacttagccatgcagaatatgtgaccagaccagagcatgtgtaggaagactttacggtaatcattaactctaccccgaaatgatggactacaagttataatgtgtgttacctacacttcaatcagtaatattagcaaatctccaaatgttagtcacattggtttgtctcccttgtacattctttattcatgatattacagtgctgtaactgggtggtcctttttaaacaaaacattatttgcaaaacagagggtattatttgtttttaaagcttttgtaaataaaggcttcaaaatgttttcttataaatgttgatgactggtgattttcttttggaaatacttatttgggggatattgttcatttttatttgggcaactcaacagaattcagtaacttccttcattaaccctagatgattattagtccattaattgaaaaatcagtctgagttttctgcatttcaagtgttggcttattcttgttctttatgagtacctcaactagctaattaaggactgacttctgtttctcctttccaggaatgcatttattccgaaggatatacttcacaaagtaaatacatttggtataactgtggctttttaaaaaatctaacacaatgtagtaagtttctaactggcttctttt

SEQ ID NO: 128902 - DNA, 1030 bp, Homo sapiens
tcaagaaagattattttatgtttgtagcagtagacttctgtgtaatttgaggggacttccaggaagtgaacttgcagtagggtatcccttgcttgagaaattcagcccaccctgtgaaagcactgcatgctgaggcctacatgttttcatctgactttttttttaattgacatgtctgtataatgatagttttcaggaacagggaaccaaattattgctcatcatgtggttgttactgggaagtttctaagtacagatattctgaatgtgtcctgagtaagctgctgtgttaaaattcaggttaacgacaaaggtgctttttgacctatagtcagccatgctgttctattcagttctagttctgttctcctaagcagctgctaacgatacctaatcctcgtgctatttttagcgcagaagcaactgctgtgcaaagccttgtttcaagctgtgatgcacagaagggccattttgccggtggaggccttaacaagttagagaagaatttttgttttgttgttggtgtttctttccttcacgctctacttattctcccctccctttactctccttgcctgtcctcccactttctttccttctgttactgtctttctctttctttctttccactctttccactctcatctttcttttttaatcttaggagtattaacataggtggattatagcagaccactctaaggagttgtgtgcatatactcgtcttaactaagaaaaccatagtgaagcatttagcatactcttaatgattattcataatggctttgttttgtaaaaattaagtgaaaactacaaatggatggtgggaagtttaagaaaatatgaaaaaaatggtgttatactagcttttcagttttataattattactggattgatagactatgagtgtacttgataaatattaccctatatgtggtctgcttccttcccatatctaggagagtatttacctgtcatatgccctaaaacatgatgaaaatacattttcccaattaggatcttgttttc

SEQ ID NO: 128903 - DNA, 1299 bp, Homo sapiens
aggctcatttgtgaaaggaggcatctccttctttaagatgaagtgtagtttaactcatccgcatgagacattttccactgggtctccttactggtgctgctgagagcacgggagatgggcatatgccccacagctatggctgcagctccatctgggagcattacagtggctgctgagactgagagtctctgaaaaaacttgtctgtcactttgcgacggtagcccctggtgaataggagacccttttccaaacccagttaaatgtatttaagtatgaaaggctaatagagttaatagaaaaaagattaaaattgcacctttggactctctgaatgattttttattcgaaacacttttctgaaataatgacctttgtatttaaattgcatttttcttgcatatatataaagcattgaaacaggtggactcaagccattcctctgtctcttttctggcactgtagttatagatgtaagcagaagaacagcttgtttgaagtaatggcatgtttgaatgttgtctttctctttcttctgccagggaggacatgtatgcccaggactctatagagctactaacaacatctggtatccagtttaaaaaacatgaggaggaaggaattgaaacccagtactttgcagaacttcttatgacttctggagtggtcctctgtgaaggggtcaaatggttgtcatttcataggtaaaacgactacattgaaaatggcatttgtttttccatctcatacttgctccacacttacttgggtcactatgttagcaatttcaggtttaattctggaaagagttgactgccatatagagttgtctcctaactcttaggaggctaatgttggtctgcttaaaggttaatttaaaatatgggatccatttttgcctgtgagaagcatgttgcatagtggaaacagtacaggttctctaaaaagtgaaagaccctggtttaaatccagcggcgccatttggaattggtgttacccagggttttcttttactatttctacaccttagtttttaatgttctacgggggaaaccattcacttacatttacacaacgttattgagtatttaccatatggcaggcactgagatgagattctaggaactaaggtgtgaataaaacagatgaaaattattttcctcatggagtttatattctcatgggggtgggcagacagtttttaaaaatggagttcacgttgtgatttgttagatagtgataagtactatctcaaaacagcaaagaaaatgctagggatgggtgtggagatggattttaat

SEQ ID NO: 128904 - DNA, 1010 bp, Homo sapiens
gaatggcatggaatagcgtctaaggcattggtagcaattagctttggcgatgaggcaagctgtctttgtagtctaagtaagaaagatcttcacatacgtagatgtaaagaaagacaggaatattaatctgatgtttctttgtaaagcaggtatggggtgaagccatatgctgcaagtagacaggtgaagggtgttattggaaacttaagagaaaaaggtctaaactacttgtatacctataccttggcaaatggccaagaatgatgtgcacctggagaagaatctgttttttatccctttcattgcttatagttgctaaggcatgcctcagtgtgagcactgggacctgatgaatgagattctaattttttgaggtacatatttttagcataggaaagctgtggtttcactggaaaaaaaaaaaaaaaaagaaactacttcattgggtttattctgttacccttcctaaaggattttccaggggagactgacttttacgtgattgttgtggtttccttctcttttaaaatatttccattgttttgtaatttttcagacatttagaaataaattgatttctaaaggactaaccataacgatactttttggcccaagtgaagtgaaccccatggtttagatttgtcaagtgtttaataggaattccttttgccaagaggtagaaaccagtattcttacaatttaaaaagtaaataaaaaaacactttttcacgtattctcaaaaatgtatctgtattttggtaacttttttgttttaatatttcagatacagatatattttggaaacttttaatatttcagatacacatatttgtggttggaaatatatttgaggttggagatggctttctttttggcttaagtgaaatcttgaagaattggtttatatttagatttcctggcttgattttataaggcagtcttttaggaataggattgttggcagaagaaattattgctattacagtacagtcctttatacagtgttgctt

SEQ ID NO: 128905 - DNA, 1022 bp, Homo sapiens
ggaaagtacagggcgttttcccctcttttgaaccagttcttcaagaaacttggttttagcattggaatactgtgagcatcatttcatgtatcctttgggagacaggaatttatgattttcccccctttcttggttatagagtaagtatttggttaaatttatcacatgtatctcgtatagtaactttttggatatatttaaggaaaggttattaagtttatagagttttatggttctaaaaagtgatgttctttctagttaaaatatactttgtaattgaatataaatgtgtagaatatcatctgtaggattctttgatttgcatcaaaaattaaaaatgtgtggattgtagttttgactgtttagtacataatgaatcttaaaactattttacaggacaccgagtttccaggtgtggttgcaagacccattggagaattcaggagcaatgctgactatcaataccaactattgcggtgtaatgtagacttgttaaagataattcagctaggactgacatttatgaatgagcaaggagaataccctccaggaacttcaacttggcagtttaattttaaatttaatttgacgtaagtgggaaataactgtataacccagacttttttttttttttctttaatcttaggaattgattttcctcaagtatggtgacatgctaggtgaatttggtgtagttatcctggaaatatataaaacgtaacatttcaaaagcgtggttttcttttttactatgggaccaaaaaaaatactttgatgttaaagatgttatatttaaaatatgactgcagctttttttgtatttggaagactgggtattgaaagtacttctgatagaaaaaataatcctacattagttttactttcaaaaattttgtgtgcaatttgaaatatagccttttataatatttatccttcttgtgaagatttttgttgcattcatattccagtttatgagtagattacatgtcaaatgcagtaagacgttttctggaaccttgggt

SEQ ID NO: 128906 - DNA, 2379 bp, Homo sapiens
gcgctccaccacccgcgccgccgtcacttgcgtgccccgcccccgggggcgctctccgccccctctgcgtgtcgcgtcatcatctagcgcccccgtcaggacgtgcgaaaagcgacggcgcagcacggtgcggcgcagctcctgctcgcctttcccttcgctgggcgagaggtgtctatggggcacccgctgccgccgccgctaccgccaccgccaccgccaccgccgccgagtgctgtctctatggcgaggaggaggaggaggagcgcgagctcagcgacacaagtagatcttgcatccgctgcagccttacggggggaggggcgggttagggaagtagaaagggggcggggacgatgaacctgagagggtgcgcgatggcgccagctggagtgcggctggcggaggaaggagcctggcggcgggttgggggctgggtaactggggctgggggtttgtcaaggggttggcgcgtagtgatgacgcaaaggctttgtacctggggcttcgcagtgggacggaaattgggagtggagggcggtggcctagatcctcacctcttcgtattgtttcacgcggcagtgcttgggagtcagtgtagctccagtcagtgttatcagcaccttcgcactggcgctttgccagggaagagagttatctatggcttgaatacctcggtgccgtcctctcgtttctctgggaaactgcagtacggagatgctttctccagtaatgagaaggcctttggtgtctcttcggggcttctgggactgcagtagagagagaggtggaggaaaacaatgttagactacagggtctttccaagtctttgtgtttttgtgcttatgtgtgtgtgtgtgcctatcggggtgggagagttataaaggaggggtgtcctggatctcctttagtttctctacttggagaattggaagttacatttgtgactcttcagagtttagaagacagtcataagaccctctttttactcttgttttttttttttccaatttgtatgaaaaatgcagaaggatttgaaatttccctgcccaagaatcaacaggaactctgtttatagaccagaaatgtgacatctatctttggtaaccatgcaatatgctctaagttttagacgttctattgtgttctttttccgttctgcaactgcgaacattcagataattttcatggccgttacttttttctcagagcatttacaaacatttttgacccctctagtctagttagaataaacgccggtaaagtagatcttgttatcaagtcggattttggttgttttattaatgaggaataaaaataaacaccatctttgccatggtaacatctgatcttgtcacatgtaaataagtaatttttcattttttgtctggaaatggatggctttataaagttttatgcagagtagttgaactcagataaataattagtggaaagttataaaatatgattagtatgtatgtgtaaaaaagctattttaaaataactgaaattaggaccaggaaatctgtactgtagtcctttttttcctatagactagctgtgtgaccttaagttactttctaaactttgattttttttttttatgagtcaagaactttgaataaataacttcttaggttcctgctggatcaattattctgtgattcagatttgatatatctggtcttcatattgtttttttattttgacaggtacataaataaaggataaaatattttatgaaacaaatcttcaatcaagtataacattttgatgcttggcatctagactcccttgtgccctcactatgccagcggcaactgtagatcatagccaaagaatttgtgaagtttgggcttgcaacttggatgaagagatgaagaaaattcgtcaagttatccgaaaatataattacgttgctatggtatgcccacaagcagatctttaaaacgcttcatataaaggaggaaaaggaaattttaaagtcttgaattcaacccttttggttgatatttttagggattaatttcaccatgaaaagtaaaatttgtcactgccctccagccaaaatccatcaggaatacacctgtgatttgacaggttgggtttatccctcattgcagtgagggaaaacgcactggaattcatgggaaccatgggccgtttgaataagagttaggaaggatttgggctcgtgtcaggtggtcttaggggaaggtaagggaagcagagctttactgtggattggatgtgttcgggaagctggggtaattctgtgattgggtatcttactaagtcttaaatgagagactagaatgaggttaaagctgcagagaaggaacagtcattcatttagccaggatggagatacttggtcat

SEQ ID NO: 128907 - DNA, 1050 bp, Homo sapiens
gctgcgccgcaccgtgctgcgccgtcgcttttcgcacgtcctgacgggggcgctagatgatgacgcgacacgcagagggggcggagagcgcccccgggggcggggcacgcaagtgacggcggcgcgggtggtggagcgctgggcggccaggctccctggctggccggtttgggcgtctgggccgtgaaggtgggacctcctgttccgggccgcaagtttccctctccagccgcccgccgttcgtagcatgtcccccagaactcggggagcgcaggcaggacaggcttagagaagacgcggtccccagcgcttgggccacggacgtcccaccccgctcctctgtcgctggagaaccgccgggccgagccactgggagaagcaggccagagccttccagggcctccggcccgtggacccgaggaggatgagctggctttttcccctgaccaagagcgcctcctcctccgcggctgggtcccccggtggcctcaccagcctccagcagcagaagcagcgcctgatcgagtccctccggaactcacactccaggtgactggtcgctgcctctccaccggaggaaaaagtagggtgggagggcgggcttgtcctaaccaccctcacagcgcctcagtctgctccccaccagctcctcatgtggtttacctcccttggttgtgggtcacacgcttgctctgccactcctgcccccttttactgttttcctccggaccctccctgcctcctgccgcaccactgctcagcgcttctaactcggatttcctcatccctcctgacacatagctgctgactgtaatctctcaatctctctcatagtctatttccagtatcccttgctgcccaggcttcgccactgatctttccctttgcccacctgattgccgcgtcagcagaattgttaaaatacaattgtgaagagtaatctccaggtttcacaaagaatggaaaatagaactgttgcaacatcaaaggaaagggaagccagagttttcatcagtgaatgcttctcgtctgagagtcacttatcacgta

SEQ ID NO: 128908 - DNA, 1514 bp, Homo sapiens
tttatttttatcttactttagtttttcaaagatgaggtctcactgtgttgcccaggctggacttgaactcctgggctcaagtggctctcctgccttagcctcccaagtaactgggactacaggcatgcaccaccatgcccagccgtgacagcattctcaaagtagaaaaaccacagaaaattatatggctagaacctgtggtccaataaatagccagactggactagtatggttcacctgataaaaatgcctgatctaatttctacctaagattttgtatagcttggtatattgtgtttgaaagcaactaattggcatgatgtgaagaatattctataattcatgtccatatttcacattaagattttactgcgttgaatgactagtcttgttaccaaattttagtcttaaacatattttcagacaacaccataatagagcacttattactaaatgacccatatcaaagtgtgaaaatttaatttacttttaaatagctttgttttaagattttgaccatataatgtacctttgttatctttgtttttgtttttcatctgttctacctctaccagattgcttcctccacagtttcctcaggaaaaaccagtgatcagtgtttatccaccaatacgacatcacttaatggataaacaaggagtgtatgttacctctccattagtaaacaatgtatgtatatgggataatttatttcagggtaatataataggtgtattacttttctactaaatattttagaaatctgaaatgcatttaaagtttcattttgtcatgagtactttttttaaaaattgaatatttaagactacgccttaaagttcttacaatatgatatggttgattgtgaaagattataacttccatatactctagtatttacctttgaaccctcaaattattgtaaatagtcaagtaaggaaatattttggctccattttttattcaatggacttttaacctgtttactaatcaccagatatttatggtatcgattctataagaaaatgctataacttgttaattgctaatatcctttttcatttaattcttgacctgcaaaagtaagttaatatttagagtgacattatcctaatgagactttataatctttttctggaagtgattttaagcgtcatgtattgttactttcagtttacaatgcactcagatcttggaaaaattattcagagtctgttggatgagttttggaagaatcctccagttttagctcctacttcaacagcatttccttagtaagtatatttctagtaaataaaaaagtctgcctgtattttaatgtattaatcaaaatatagtttaaaaattcaaatgatgttaaaaatcagtcctctgatttctacatccccacaaatacatccatactttcagaggcaactgttttactcttttacctgtttcttctaatgtttacctacatctttctgaataatgtatgcgtacttctatcactcgattctttcattttagatatt

SEQ ID NO: 128909 - DNA, 1048 bp, Homo sapiens
aaatttaagaaataagtgatattctcaagcaattaagttaaacagaattaagaacaagaaaaaaatacttaactatattactgctgtcctattttaagaaacctaagctgaataagctccttagtttcatacattgttctttacctgagttaagttgactttatttttaatttcaggtcactgtataactgtgaacacttccccacggttgtgatttttaaagaaagtagatatatcgatatatccattggaccaaaatttacttttacagattctgtcaagaatatattacagactgctctatgttccattgtggttgatgttttatttgattttaaggttaaaactggcagccttaggtgtatatgtaaaaattatttagaaccctatcagttaactaaagctgaaaaattgtaaatagttgtcatggagaaaaactcgatgtctgatatttattgacattttttcttttgtgtttctagtgtgtcacaactcacagatatgaatgaacaagaggaggtattactagaacagtttctgactttgcctcaactaaaacaaattattaccgacaaagatgacttagtaaaaagtattgaggaactagcaagtatgttttccctctcctgagcgcacatttcctgaaaaaaatctcatctttacctagaagtaaactagagatttatcttacaggaaaaaatctccttttggagcccagcttggaagccaaaagacaaactgttttagataaggtgagttagtgataattttgaagaaatttacataatttaaaaatagaataaaacaaccttttcattttctcttttagtatgaattacttacacagatgaagtccactttcgaaaagaagatgcaaaggcagcatgaacttagtgaggtaagactgtttatttttttccctttgccatagattttttttttaatcttatgtgcatgagtcctgatctcactttcattatcatcagaaaccatttatgaggtatctgaccttataagacatgatacctttaaacgtggatgaacagct

SEQ ID NO: 128910 - DNA, 1049 bp, Homo sapiens
tagtgaaatttaatcccatcatttttgccttattctattgaaatgagtcgtcaggttcagcccacactcaatggtgggattatgcaagggcaggaataccaggaggtgaggtcattagtggagcgtctccttagcatatatctaccacagtgatttaattcgtaaatccttaggagagaacaatgattttcccagtttctctcatttaatagtttgcagccaatagattagtttctcttgagttaggtgtctacccctatccaaaagctaaggacctgggtggggcattataagacagcagattttctcaaaaagaggctatatagggcatataataaattgcctctccataccactaccttacttcctttccctgtgaggagttcttgtgagtatcataaattaaagtagtgcctgattttctttttcagagctgtagtgcaagtgcccttcaggcaagattgaaagtagctgcacatgaagctgaggaagaatctgataatattgcagaagacttcttggagggaaagatggaaatagatgattttctcagtagcttcatggaaaagagaacagtatgtaatactcgtcagttgaggacaagtattggataaagtttggtatttttatagaggaggagaagcactgggtgttagctatttctctattatgatatcatccccctttttttgtacaatatatttacctgaaaggaaggtttctattccttgggtgtggacttgggcaaaaaccaggttcctggaacttaaaactttgaaggtctgtcataggactctggacagccacacaccttagctattcccaggggaccccaggggggcaactgccattgctctaagatgtccttttgatgtgacttgagatataaatgagagtgagggcctgtacgtgtggctatttcctgtctggtatgtcagaggaacagtcctggtcagaagggggctcttctgagcagaaattgctaataaactttgtgctgatctggaaaaaaaaaaattttttttttgacagcatagtatcaaattact

SEQ ID NO: 128911 - DNA, 1783 bp, Homo sapiens
gaaacccgggcccctggtggtgtaggcacctgagggaatctcctggtctgtgggttgcgaagaccgtggaaaaagcgtagtttctgggctgggtagcacagtccctcaaggcttcccttggctaggggaggtagttccctaaccccttgcacttaccgggtgaggcaacaccccaccctgcttctgctcaccctccgtgggctacacccactgtctaaccagtcccagtgagatgaaccaggtatctcagctggaaatgcagaaatcacctgccttctctgttggtctccctgggagctgcagactggagctgttcctattcagccatcttgcctgggagccactgtgggcaaatcttaattggaagataatgtaaagagatacatattcatcttcttaaatattagaggtattttttattgttttctttctagattttcctggaaacatgaactgccaagagaggaatgggacacaaaaccaaacactgttttatatttatggtttgcaaactggcatttcatcagtggctaaattcacagatatcctatatagattgtatacagaactgagactgattttgtaccgattagaatgattgctatgatctttgagaaatttttctgcactatttgcactgaaatgtttatttattgttgataaattgtatcatatttaagttccactgctgttcctcttaccttgattaaatgcctatgcatgtacttttagctagtttttaatattttataaaacttcatttaaatttgtatttttaacttgaagttccatttctttatcaaggatggtatttagatttttttcctcttaaccttttttcaaaaactattttcaactgtgaggaaacccttatttttctttctttgtggataaaactttcaaaagcaatttaagatattcatagtgttaggaaacaccaaacctgcctatgtgccatctcacaaaagaaacttttaatacctacaataaatcaaaagaataaaccagctgttcttatatattgtttcatttttaaaactaaagatgcatttaagaagcaatacaagtaaatattttacctaataggaaaaaaaaaagttgcctttcatttaaaccattccaacagaaattcttatgctaatttaaaacatatatatatctggtaggtttgtggttggataggttttctaaattcctaatgttaaaaacaatctttatgttaatatacactaaatctatacacaaaaaaagtcagtgaacttttctgacctttactgtgagttaccttttcctaagaggaaagctatagtaataagtaaaatttaatttttaggcaatcctgatttttaatgaatttaattgagtgttcttgtatactacattgagcagtttgcttctataccgtgtcacaaaattcatgtatttcttgagaagccctaaaagctcataaaggaaaatgccgtgaactatgtagctcaggcttggtaaggtgccatctaaattacaaaacaaactaatgcataattttgcttaaatttcatcccagtatgattgtcttcccaacaccagcatatagtatagattgtctgtcttttttatattttttagttcttcctgtacatgtttttggcaataaagttataggaagaacaaaattattttgttagaattaaaacatgcttaatatttagtctgtttgtggagggcaggtattcacgtggactgagatacaatgttggatacagaaaataactttcattgtcttcctgacactgtgctaagg

SEQ ID NO: 128912 - DNA, 1053 bp, Homo sapiens
catcggagaagcagtgccacaggaaaaatgaaatgcatgtgaaagtttgtattctgattttacaagatgagatagaaatcagaattaaagaggaatacttaggagttactaggctaatcagtgtacgaatttgtcataggtagagatttaaaggttaatatcttaaaatagaagaaaattctaaatcaatcaatcagtgagatataaactaaacagacccacttcaaagttgaaagaaatttctaggcataaattgagactaggaaatttatatcagaatagagggtgcttgacacatatatatgcttaaattgaaggacagctcagattcatttttaggagaagaaagtaaactaatgtgctcttaaagaataaaaatttattctatggtttctgtctctgatcatcaccttccattctataaaaagctcagttactgatttgctgggtcatggtcaaaattcttacctatttatttcatatcaactttaaaaaataaattacttgcattctatatattactaattgggaagtaatatgcctcaaatcagttttatactggattattccctatgctttaaaccactgctctcaataaaacacttcctgattaatgtttgattattagatattttagtcttgttggggatattttagtcttgttgggttagccatgctctgaagaatctgtgaaagtacagtaaagttttaataagcaataaatgtaaccttttatataaatctcagtgctaggttaacttctaataagcagacgaacatgttacataaattataatgtctgtcttgtaaaaaagttgaggggactaaaagtttatgactctgatatggaagttgtcatattaaaaaactacattttaaaacatcaaatatttatactatttgcttttcaaataaaagcatagtgctgtttggcatagatactttgtcattttttaaaaaatgtttattgtttttatagacatacactgtcaaacggaagaaattaaagccacatcctcaatattaggcaacagagtttctaagagtggacag

SEQ ID NO: 128913 - DNA, 2904 bp, Homo sapiens
ccaggtgtccataacatgatgaatggggaaacaaaatctggtatatccatgtaatggaatactgttcagccagaaaaaggaatgaagtacttgatacatgctgtaccatgaatgaattctgagaacataagctaagtgaaggaagccagatacaaaaatccacatgttgtatgattccattcaatttatataaaacatctagactaggcaaatccatagagatagaagttgatcagtagtagccaggggctgtggggagataggaatgggaaatgactgctaatgagtatggggttttctttcggcaggggaggtgatgacagtgttttataattagtagtgatcgttgcacaaccttgtgaatataactaaaaaccactgaattgtatactttaaaagggtgagtttcacggtaagtgaattgtatctcagtataaaagttagatgataaacacttcattcatgatttctaaaaaatgttttttgagttcatgggatgagactcatcatttgaaaccatgtaggtatagaaaagagggagactagggttcactgggtgcttcaactgtgctatattgtttattattatagaaaacctatgtcaaggcaggtattatccttacattagagataaagcaggcctcacagattttgtccaaggtcgtgaagtccaggtttgaactcacatccctctgagtcacatgttcttaacattatacccacgtgggaggtaacaaatgctaaagacatgcatatatagaaaaagataagttatttatgatttttcccctgaaattgttatttctttcttagaggctggaaaaaattcaaaaggtccagttaaattgcactaaggtgaagagtaagcaaagtgagcccagcaagcactcagggttttctacctcagacaacagcatagccaacactccccaggattacagtgggaatatgaaatcatttccatcccggagcccttcacaaggcgatgaagattctgctctgattctaacccaagacaatctgaaaagttcagatccagatctgtcagccaacagtgaccaagagtccggggtggaggatttgagctgtcggtctccaagtggtggtgagcatgcaccgagtgaagatagtggcaaggaccgggattctgatgaagccgtgtttctcactgcctgaagtttccctttggagttccaaagtaaaggacacataagcaacacttccaaaaacaagggaacaaggtggtttattgtaaaaacaggaaatggtgcatgtcattgagaactactttaatgcagctatgaaaagggaaaaaagtgcccagttcttgatttcttagatactgaagaggacgtagtcatttcatttatcaaatataaggaaaattattcaccattttgaagctcaccctagactatgaaaattatattcactgcagagcaattacttctgtcattacctgaagtgatcagtatctatcttccttgtcatagcatgcatctctcaaaaagcctccactcctttccctcacatctgtgatcatcatgattcttttagttcacttctagatgcatattttgtgttttctaaagcatctgacattatcctcctttccgaccctcttatacatatttctaaaaacaggcacattggtgagatgcaccctttttagttaatagatgcattcctaaggagcttttaattgcttatctttcaggcataatcatcactttaacttttccttggagcatatattttgaattgtgagaataattttgttgcttttctctgagatctatagtctgtttctcctcattatttaaaaatgctaaaccttgtatctcactttttctctaacactgatttaatagctaacgaggtagaagcaacattcattctcctggtcttacatatgaatttaagtatcagctttcttgtaataaccttttattactgttctagagactacactaccgacagtgtgggccagccaccagcctgatctcaaagtatcacattataaagttagtagataaaacatctgtgagtgaaaatccagtttcaagaaccagagaattgggttgtcatgtctgtttaatgaagggaataggttttgtaatctatcattttagaaattatgtaactggctaatatggtttaattaaccttagtaacatctcatgaccactgactgctgaaagttctgaaaagaatttttgttttgttacactgcacatttaagggagagtccctcccctatcttatgagttaaaaaagacttcactaggtgacctaaattaaacttagtggggaaaagtggccatgtttggacataaataaatggtattcacactgtatggttttaatatattagtacattctagaatgtaaaaggattaaactttacaatttagatcaatattttgaatatgtgaaaggattaatttaaactttacaatttacatcaatattttgaatatctgattttttttaatgggagaattattacatttcgctgaaatgaggacgagggcaagaaagcaacattgctgatctctctagtatgaaagatttggagggagtgttgcaatatatataaatgaaaacatttaattgtgttcatcatatttaaaaatatagaatatattagagaactgtgatttaaaagtactgttaatgtaaaaaataaagcaagtgtaattaattctttcagaatataaaatttgggcattctctgctgagcagttcccaaattaagtacaaggaatgtttattcattttctgcaatatactatatgtaatagggaataccttgctaaaataaaacttaggatatagtggtaatggctttcacatttttataacataacataactcacttcacaaccttcttggagctgtcca

SEQ ID NO: 128914 - DNA, 1590 bp, Homo sapiens
gacaaggaagatagatactgatcacttcaggtaatgacagaagtaattgctctgcagtgaatataattttcatagtctagggtgagcttcaaaatggtgaataattttccttatatttgataaatgaaatgactacgtcctcttcagtatctaagaaatcaagaactgggcacttttttcccttttcatagctgcattaaagtagttctcaatgacatgcaccatttcctgtttttacaataaaccaccttgttcccttgtttttggaagtgttgcttatgtgtcctttactttggaactccaaagggaaacttcaggcagtgagaaacacggcttcatcagaatcccggtccttgccactatcttcactcggtgcatgctcaccaccacttggagaccgacagctcaaatcctccaccccggactcttggtcactgttggctgacagatctggatctgaacttttcagattgtcttgggttagaatcagagcagaatcttcatcgccttgtgaagggctccgggatggaaatgatttcatattcccactgtaatcctggggagtgttggctatgctgttgtctgaggtagaaaaccctgagtgcttgctgggctcactttgcttactcttcaccttagtgcaatttaactggaccttttgaattttttccagcctctaagaaagaaataacaatttcaggggaaaaatcataaataacttatctttttctatatatgcatgtctttagcatttgttacctcccacgtgggtataatgttaagaacatgtgactcagagggatgtgagttcaaacctggacttcacgaccttggacaaaatctgtgaggcctgctttatctctaatgtaaggataatacctgccttgacataggttttctataataataaacaatatagcacagttgaagcacccagtgaaccctagtctccctcttttctatacctacatggtttcaaatgatgagtctcatcccatgaactcaaaaaacattttttagaaatcatgaatgaagtgtttatcatctaacttttatactgagatacaattcacttaccgtgaaactcacccttttaaagtatacaattcagtggtttttagttatattcacaaggttgtgcaacgatcactactaattataaaacactgtcatcacctcccctgccgaaagaaaaccccatactcattagcagtcatttcccattcctatctccccacagcccctggctactactgatcaacttctatctctatggatttgcctagtctagatgttttatataaattgaatggaatcatacaacatgtggatttttgtatctggcttccttcacttagcttatgttctcagaattcattcatggtacagcatgtatcaagtacttcattcctttttctggctgaacagtattccattacatggatataccagattttgtttccccattcatcatgttatggacacctgggttgttcagaatacatttcgccagatttcatgttttgatgttaacacaggaggtgttataagatcaagtattatgtattcattcaaaaccattcacttagg

SEQ ID NO: 128915 - DNA, 1004 bp, Homo sapiens
agataagactttacagtcagtctcccctttaccaattatagattaatatcatagttaacataatttctaaaagtggggaaagagttttacaagtacatatatttgattttattctgttactttttcacactttccagaaaaaaattaattttactactctcaaataacagtaaccaaacaagttgacctaaaataaggaacaaccaaaaatttgtggaactgagccacaaaccagatgtgtgaaatgcattaaatgcctaggtttgggcttcggttatctgagtcctgacctggatggggttgtgtttcaggtgttctactgactaaaaatgtgaaatatttgtattgcactgaatcttaagaggctttcatgaagccttgctcttcaagaaataagcacagaaaatagattaacaaagcaagtatgtcttacttcttccagggcctctagttcttcctctagctgctgagtttcttccttcactgccattaggtaatctgtaactgactgtcggggctgcatccccttttcaaagcggttatacattccactccaaaacctggaaaggatggcaaagcgtcgtgataccaccttatcacagtctgaaaattcacatcctcaagtcttctaaggtatctatgataccacagtcttaataataaccaaatgcaaatttcagcctcaaaaaagccactacttaaggtaataatttcatgttgatgttttttttcttgggtcagtaaatgccttttggggagaataagtttatgaaaagtctgcctgtatatatgaattagcacagaatacatttttctaaaattaaaatagtacatgtaaccattaccttttaagaaaatggctcttagttttgaactttgaaattgtatatttagaatctttcagctacaaagggaatcttaaacttgcagcttttatcttttgtatcacgaccactaaaagttgacatttgcattggcaataacccccccccccccgctttttt

SEQ ID NO: 128916 - DNA, 1969 bp, Homo sapiens
cttaatgtaatttccacaagggaagtacttccagtaggacttaattcagtggagacaaaaaggcaacctattacgttggtgcaaaagtaattgcggtttttgcctttttgttgtataacggcaaaaaccacaattatttttgctccaaccttaacacgtcatgatcactgttgaaacttgtgattccacatttgacttaaggcatttgcattattctctttcatttgcttttaaaaaaataaattggaacttaacctttttatgatatcattattataaaacatcacctcctgaagaaaattccacatttaggaggaataaagaggcagaggagtcactggcaaaaataccagatcagatattcaagcatctccctctggtgtcttttgtgtccaataaaagcctcaaagatcagtgtcatacactttgacctctgaatgttaaacggtaccagaatccaagttcataccatggctacaaagttaccaaggatttacatacttgtacatgaagttacatggtgttgtagggagatgaagggttccctgagtctggctgtgatcagctctaaacagaggattcaggtagtcggcccgattcttccacaggtgagcccataatgagtatgttctttcttgaatcctgttataaagaaaataagtctataaatgacctattttggtgcttacacacagtagatatgttatattaatgctggaaaggaactaataattgttacctgaaaaccacgtgtctgttcgatagcaggtaaatgtatcatcttggtgacttcatggtatagagggagaacactgtaataatctcaacttcaccaccatctgtactggccttgacaaggtgttcgattcgtgtgtgtgtgtgtgtgtgtgttaagctgttcttttggggggagttttttcccccaaatagtcattggacatttataatttgtcacacactattctaaatgttccacgttttctctcatttaatcctcactgagttgctgtgagctctgtctaatttacagatgaagaaactgaggaatagagagaataagtggtttcccaaagtcctatagctagtaagtggaaaagccatattcagacccaagcagatactgttagaattggctagtcaggtacaagaaaacaggtgaccctaaaggatacactctgctccttctaaatcatctccatctccatggaatcacacttgagcttccttagagaaaacaaactagtatccactacaaaaattaattttctttatgagtccatttcatttgaactgatcattccccaaattaaatctgataatgttgtatacaccatagttaaaaccatttcattttatgaaaatttaaaaaatgttctctcatgtatactgcctaaatcactttgttgtaagttttttactgtcacttattttaaagtccacaatttatctacttttacccttggataaatcaatacagttttaatctgaataaattctggcttttatatttgctttcccaattaaatttgcaatttttattatggtagcatagccaccaaatatatctaaccttttccttttaaatgcaaaaaccacttttttgactccagaaaattccctttcgatattcatgcatcaagtctgtcaagctgtctatcaggcagaaactgaaggaaaaaatgaaactatttatctgtcagttgatgacatttaaaccatttatgaaatgacaccaggaaaaagaaaataaaactaatctgtcagtataggtatgtgactaaatgaaaaaagtcttcaaaattatgaaaggccacctaaaattctcagtcatcaaaatctttaaataaaagttaaacaccaaaaacaccaaaacacttacttgagttctcgtctctccttttggctgttacataggaagtttccaaactggcaggaataaatgtgatgttgaatgtgaatcaaaaacctc

SEQ ID NO: 128917 - DNA, 1220 bp, Homo sapiens
gaaagtttggcctgttcagtaaaaaaaaagactgcaagagaatgttatctatggaaggcttggaggaatcaattgcatcctgagacttcacgcagtggaatgtgtgtattttaggattaagttgaacactttggggcatggcctggggttggacagaaagcccaaacagcaggcgcccagggagtggtgagagctcatggagggtgctggaatttgccatgctttccactgggccgtgtttcagggccgcgtgcataggcagaagtgagcctgatgcttggagggcctgtctggtattgctgggcactgtcacaaggcatcagatctccagaagggccgagcttgctcagttttaactcggggctggcacttggcctttgcatcagattgtgctgtcttccaattgggtccatgcacccctgaattcacaggaagactttttgaattgcaccctgggtacattactttatggaaattggcttctagatcatcagcttctgtatgtcctccttactacgattacatgacctgcctctcagaatgctcctggggccagctttaagccagctctcccttctcagctcccttcccaattgccttgttgccaccttacaaaaaaaaacataccctttaccacaccctccgtcttgctatcatgcatcatctcagggtgtgtgagggaatatgtagtttcatattttattttagaggtacatgtgcaaaaatgtttgaagacttttgatcagattcagcttccttgagcagtctaagtcaatactgtgcatagaagtaaaatgcaagacacaagtgcagaaaacatttggaattttaaactttctggtggccacattaaaagtaaaaagaaaatctcatatgttatgtaaatatatatatttatattattaattttcataatgtattttatttaaccccgtctatcccaaatgttatttcaacattatcagtataaaaagctagtaatgaagtgtttttgcattttttgtgtgtagcatgcctttaaaatttgattcatattttacacttacagcatatctatctcaatcctgatcagacatatttcaagtgtttcgtagccacatgtgactagtgagtcctgtattagggcagcactgttgtaagtgatagaaagcacaacctttaagctgatggtatttgggaaccaagattggttcctgctgaattatgaaaaaaaaccaacc

SEQ ID NO: 128918 - DNA, 1453 bp, Homo sapiens
ttgccatcttttggaggtcacctagaaaatttcactttctccccacgagtagctttgtgcctgcctaccttccacgtgactgttagattaatactgttggtcattgtttcactgaccacttattcatcaatgtattcattaaactaaaaattgagcaactgctctttgccacacttcataagtattttcatttaaatgattgtatgagattttcacaacaattgtgtgcagtatgtggtattatctgtactgtatagatgaaaaagcataattttttaaaagagtaaacagtaagttgaaataaacatgtagataaacatgtaaatttgctctggtaattagagaaatgtaagttaaaacctcaaagtaccatttgccacccaattttttacaaattaagatattcaatactcaaaagaatgtggtaaaactagtgctctaaatatttatcgtattatttaaattggcttagacagacataatatatttggtttagagatagtttttttttttaccaggtttcttcctcttagggactaatccaaaatacgtttttaaaaaataaagatacaggaagggcatggaggctcatgcctataatcccagcactttgggaggctgagacattgaggattacttgagccacaggagtttgagaccagcctgggcaacacagtgagaccctgtctctacagaaaatttaaaaaataaaaaaaatcaaccaggcgtggtggtgtgtgcctgtagtcccagctgctcaggaagctgatgtgggaggatcacttgggcctgggaggttgaggctgcagtaagccatgatcgtgccactggactccagcctgggtgacagagagttaggctctgtctcaaaaataaaataagatatagacatgcctatgttgatagtagtgttttatttataatagtagaatattggaagccgaatgaatgtctaacagtagtagactgattaattttacttcaccttcttgatagaaaagtttgcatccatgaaaaatactaaatgtgaagactatatgtactaacatgggagaatatgtataatgtaagcaaaaaattcaggtcgtaaaattgcttgcatattcttattcactatacagtaaatcatatgtctgaagaaagactaggagagcatgtgcagaatggtcactgcattaccaaggaaagataagactgatgttattccctttttccctctttatttacaaaatacttgctatggtcggtatattccttttttaaaaaatgatatttattatctcatggtttctgtagggcaggagtctggatgtttctcaagcataaattggaactcagggaccctcttagcatctttcaaggctgcagtcaaagtggcagctgggctgcgttctcatcaggaagtttgaacagggaagaacctacttccaagcacttatggttgttggcagaa

SEQ ID NO: 128919 - DNA, 1300 bp, Homo sapiens
gtggttttgtcgcttggtggttagcagtcagggactctacaatggtactgaacatctaaggtcaaagtgcacagggatgtttttgtttcttcctcataatgttagtttgatccccattcaaggccatttaggaataaggcaatcctacatttaaagcaataaccaaccattcttgtatggagatcaggctcaaaaactgatccttgctgaatggccattcgaagggagaatatcggaggagctgaccctcatttctaaacagcagccaccacaatacacatgcatgtaacctcccgccacctccacacacactttgacatatatggcgaacatgacaagacacgtacccacagacttatatactcgtgtggacaggaaattaaagagatggattatgtaatagagaagagttattcatgtggccaaccagccatatgctgatgagcagaaattctgcatttcaagcaaaaccagcttagtccgctgcttctgctccttgtgatcacagtgaccccaagaggaatctgtcgctgtagtctaccacttccggctctgcgaactgggaaaagacagaggatgcagaaaccatggccttgtgccttggctgtccatgcactgtctgcgcttctggggaaagccctggagagctggagctgggagcccgggaagtgggctgtcttgatgggaaatgcaggctctggaatgaagagggacaaataaggtgctgaattattttttccaggaatccacgtttgctctcagttacttaagccgttcttcgtttaatcagaacaccctaacgttggggttggagaaatctgagtgtcacaaacaggcctaatttccattctgtttcctggactttctggttcatctcagtcattatgaaactttgaacacatcagttaacttgtttggggctgcattacctgctgcagaatgacaggattaggccaatactttctatgggtcttccagctgtgacagtttgatgcccctctgtagcagaaatcccttcctacatctgaaaacatctcagccccagagccatttccatcttctgtacataattggcagtcagtctctcaggtcacagtgacaatacctgacattgtctcaggtcacagtgatcataccctgggcatgattatttgagcagcttcaacttttggagattatcatgcagagtttggctgttcctgctacaaactatgttttttatgtgttgaaaaattggactccttggtactgttattggaaaggcagtctgactttagtctgaagactgttcatcatttat

SEQ ID NO: 128920 - DNA, 1038 bp, Homo sapiens
taggtgtctatacagtgttgactttgcttcatttattaacttctctgcacccaaagacactgatattatcaaacagcaaatgaaccttgtgttaggaaacagggtatttttgcagtcctacttttcacctatctgttgtgtgtttcttaaacatgaattggaactgaagtgactacctttattgctttatctacttgagaacttttaggacctgaaatgcatagcttttctttagttgtgaaatggagttctcagtcaaagggacagaggaccgtatttgatgtagtaatagcgatttgtttatgtaagggatgccgtatcttactgcgcacacatacacgtaaaatgtccaagataacattgaatttttattaattgtaaaaccgtatctcctgctttgagggttcagcttttgctacattatcaggataggtcctgtaaaaaaggtggagatcctaagaaattacacttcagctggtagatgaaatattgccaccttctgttcattctgagaagtgcacattgatgttcaggaggttatttgtgttgctgctttgcttttaagggagattaccaatcagttctcccagatcaaggataatcagctatttcataatgtgtacatggagtcttaattataggttaaaataatattttaatttttgtttatgtttaaaaaatctattctacattctaacttttgtagactgtgtagtctgtctctctttttttttgtatctctgcctgggataaccctcctgtcccttgtgggtgaaggaggagaatgatcagtaacatggggtcttgctctgtcacctaggctggagtacagtggcacgatcacagctcactgcagcgttgacctcccaggctcaagcagtcctcccacctctgcctcccaagtaggtgggactagtcacatgccaccatgtctggctaatttttgcatttttttgtagaaatggggatttgccatgttgcgcaggctgatcttgaactcctgagctcaagagatctccccacctctgcctcccagaa

SEQ ID NO: 128921 - DNA, 1048 bp, Homo sapiens
agcagctcaagtcatttaaaagtgtacactgtggggaagaggtaattatagacacggtctacactcattggtgatcccagaaatcacgagaactgcatcctatcctttgtgtggatactcaggccttggtgattttcacggattctctgaacttcatgtcaccaagtattatgatttgtgtccaggataatggaatgtgatgttttcctagagtgagatcagtgccctactcgtcccctcatctcagaaccatccagtcttcttcggagcaaagcacacagcgggagagaagtgtgtggagttactactcacggatgccagatgagcgaatcagtcctggagatcagtgatgaaaccgataccacagctagatcacattcacattctactagattataagtaaagggtcccttccttttaaattctcagagcacgacacacagataaaagtttcaaactgaaaaaaaaaaaaatagctcctttgctggaagattttcactgaaacataccagaaaatctctggcttttactgttctctgtcaatttgtgcccttctctctggctcattgtgtttaaacccttccttctaatgtgactgccttcccacctcttcttcgtaccctttgttgaagcaaggtggggctgttttgaatttcctaatagttacagatgatttaatgattagctgcttagatatactgaagacaagataagaaaaggaagagaaaagacgggggctttactgaggagagattgggaagcctgtttcttaccctgtttttttcagatttaaataaagccagacagattcacctactaattttaggaccagtgatccagatatgtactgtgttgtgtaaaccttctaggaaacgtggcagctgtagagccaggcatattccagatttaaaataagttaatccaaaggatttgatttgaagggtatatttagtgctaagtgtgtttactctcagcgatgagtttgacactgatccattaaagaaaactggggtttcgtacaagccatgccctcttctcatatttatcc

SEQ ID NO: 128922 - DNA, 1070 bp, Homo sapiens
atgaataaggatactacattttatagtgaaaatactgtttcccacgtatgctaccaaagggacacttttgattttggtggtgagatgacttggctaattttgggcactgggaactggtgatcagattaggagaagcttgaagtgcacgagattttatgaacctgaagttctgttcaatataaaggcccctgtggagggtccatctttccctttgtatcagctgttaccacatgtagtgttaggttggtgcaaaagtaatttcagtttttgccattacttttaatggatgtaatcacattctttcacccctgtggtgagggagggattcctgctctaggttacagggacagccagacacacagcacttgacactgggcaggtgagatgaacagtcacatatactcactgccaaggggaggaggacaccacagcccatgaaggggcacatgaggttgcgctgaggagcagagtgacagccaggggctgtgagaggcaggctgtgtagtatcaggagcgtggggtcacccttggttcccacaggaggatgtgattagcttgcgtgcatcattccatgactggcagggaactaaaacctgcttctgggggacgggcaggaactgcacctggtctgttggataagaattgtttcacttgggaaccttacctgcaggagcagagcgtggcagggaacttgcagtgaggccatttgaggccctctcggttttaccagatgtcgaagcaacacataatattaattttaggccttacgcacatgggttatgtagagccacgtgggctccctttgaatatccagctattaacagctttatagatcatggttagagatgcttagtcatgtgcgttcggaattctgtgcatctttctttgagagttcttagaattgctatagcctttgttctttattacgctaggattttttttttaaagtttcactttaagatggtgcacagcatggtctcccaaatttacagtacacatttcgaggaaacaaaactctagaagatttccagtgaggcaactttccttaggaaaaatacagaccttcatgg

SEQ ID NO: 128923 - DNA, 1012 bp, Homo sapiens
cctgcctcggcctcccaaagtgctgggattacaggtgtgaggcgccgccccttgcctcttttttttttttttttttttttttttattaagataggataaatagagataggaagtttcatgatgttgcacttgaaattaggttgctggtaacatgcacatttttttttttgtagcatccattgattaaagaagagagaagatgaatccaggagagggagaaacgatcttttattgttgtttcagaggtgttttattgttgtctgtagaatatttaaaaagtgagcacagtgtgcctagcaactccctttttatattcttgagacaagggacattttactttttgtcaatgtgagtagtatcaggattaaatatgtattgtctcagaaagagaatttttagcagttagacctcagaggcagcttcttccccggctgacctcagacccacatggctccacgcctgctcccccaagtgctattttactgaacctccaggcctgaaaatgaactcacacagcatagttagagcttaagagtattcattgcccatatttaagattttaaagcagaaacaacctgaagctctagctcttcttccaaggtacagaacagagatgtgtctcgaagcagcgctgcgtgatcgggttaccccagggaagtcccgagtgagcacacacctgcccgcccactctcccaccccatgaactgaaatctattttgcaggtggaataatgatcaaatttgtgttttataacaatgtttacattttaatatcaaggttaattatataaatgcttctgatttgactagggcttttcctaaagggaagtattattaccaaaggtggatttctgtgcttaatggaagacactgaaataccagagtagttatctgtgctgtcattgctcatcgatggccgtatagaaaacaggcagtctcccacaaaaagtaaacaggtacacattccataaatttgctgatctgtctttcttctctttggttatttgagacat

SEQ ID NO: 128924 - DNA, 1353 bp, Homo sapiens
tgtgcaattggcctgggccttgtgtctgcctctgagaggccatcccaaatccaagcttgataggcattaaaaaaatggaatcttcatgcctaatgaatgcatatgttcttaatttttatgttccatatttgatgtggtctggaaaatatatttgcttttaaagcaacaacaaaaaaagcacaaaatggagatgtccctgtgttctaaaaggaaagaaggtactgccaagttgagttcaggtaccccaaggtcatcttgtcattggtgggaggaagtgggggaccctatccactgcacacaggttactcccaagagtgtgctgggggtgggggttgggatggcctctctgggcactccaggtgggacagaatgttttcggggagatttggctctggttttgactaagcttgatttaactttatcctaccttttcttgcagtgaaatatgaggagttatactgcttttcattcaaccccatgctggataaagaagaaagagagcaaggctgggtgctgatcgatcttagtgaagaatacacgcggatgggcctccctaatcattactggcagctcagcgatgtgaatagagactacagagtgagtgcgtgaaacccaaacactgaagccgcatgaaattagggtttcagccagcttagcatccctttatttttatctccttcaggttttatagctctttgtagatatccatatgtggatttccaggtctctcttggttagtgccagctgtatttacaacctggacctagaatcaaaacgtttgaacctgctatacagatcaccccttccagacccttcatctcacggttgcagaacttgaaacccagagaggccgggtggcaggccttgtggacaggcagttggtgggagagctggcctggatctcattctcccatcaggtctttttatagtgtagtgagtgattagtgggcaagtcagggagactctgaaggcagtttggcaccggctcctctatgtactcactgagtccttgcttggtacacaaggtcaccaagaggcttccctagagaaacatgtctacactcacaggaaggaatatggagaggcagggaagctagagtggcagaattaatcccatcttctccttaatgacaggcttacagatcaggggtggtttcactataattttaaaaatatttgagtaacaaaagtaatgtgagaacatcctagatagtttacaaaaggaaaaaaaaaaaccccaaacccaccatcccatttttaaaacattcttctgttttaaaattttccttcagttgttttctcatctgtatagtttgataacttttttcatatgtaagtaatgcatattcatta

SEQ ID NO: 128925 - DNA, 1020 bp, Homo sapiens
ggcaaaacataacatgcccaaatgcaggaagctgtttcattcttggtaaagaactaagttaggttaaaataagggttgtgggtcaaatgagatcagttaaccttgtagatctaatgtattaataaggattgaacttttctgatgaaaagacccgtttctcagaggccttcagcttttcccatgtcctctctcctctcttccctccaatttgcctcctgctgtttatttttgtatcaattatcttcccctccttagtgtttgtgggtacttcaacacttaaataatttcttttgtttgttttcccccttttcctaaactagtttctttttagtattttagtccccagttcttttggatattttttattttagaaaaaatctcatgattgaagtagtctcatttgctttattggtaactttttatattccttatataagtcattgatgtttaagcaatctttgcagtggtaatttcttttttatcagagcgtagcagcccttttccactgtgttagctttaacagtcctaatatttaatttcaacacttgtttgcttaaaacaagacagataaggtgaggcaccctcatttttattttaaatatgcaaaatccagtaatagctgtattatcttctcaccccactctaaatggtttttcagctacagtttttttttttttgagatggagtctcgctctgtcatccaggctggagtgcagtggctcgatctcggctcactgcaagctccacctctcaggttcatgccattcttctgcctcaacctcccgagtagctgggactacaggcacccgccaccacgcccggttaattttttgtatttttagtagagacagggtttcaccgtgttcactaggatggtctcgacctcctgacctcatgatccgcccgcctcggcctcccaaagtgctgggattacaggcgtgagccaccgcgcccggcctcaactacagttattttaagttgcctgaattcagcataatgtttgatgcaatttagctttca

SEQ ID NO: 128926 - DNA, 1007 bp, Homo sapiens
cctgacgcggtggctcacatctgtaatcccagcactttgggaggccgaggcaggcggattgcaaagtcaggagactgagaccatcctggctaagacggcgaaaccccgtctctactaaaaatacaaaaaattagctgggcgtggcagtgtgcgcctgtagtcccagctacttgggaggctgaggcaggaggatggcgtgaacctgggaggtgaaggttgcagagagctgagatcttgccactgcactccagcctgggtgacagaacgagactctgtttcaaaaaaaaaaaaaaaaaaaaaagaaaaaaagaaatatactctactatactctaagtttcttggaagaatacagtgaaaagagatcatttatatagaagttgtgctacacagaagtagttaataaaggaaataagatatgtgctgataattactttgccaaatgctttttgattcaggacaagaagttcaattatgaacttttcaaggcatttggttggatcctaagtttcttatgatttgtccatattctttgtaggtagctaagagctaaagttactaaatggaaatgacgccagggagctgtcaaaatctggtagtttttactttgcactgttactctttaaaggcagttggttgaggctttttcatccaagtgtgttaaaagaaaggcagagtaaggcagaaaagcagttgaactttttggagggtgcactaaaattggaacagaagttctgggaagatgtacattaggttgcacgcagcagataatgtgaggagaattctgtgctaacagtttctgtgtcactgattaatggaagtactaggcgataaatgtgctctgagcggattaatgggatttaggaatagcccagcgaactgggaaagggctgagcagctggtgatgagtgaatcacagggaccaggagggtcatggcccagagatagcgagtgccaggactctcgccgtgaggatccctgagggggaaattactgtgttccctcatttt

SEQ ID NO: 128927 - DNA, 1001 bp, Homo sapiens
gcatggtggcacctcccagcggagccatctctaacttgtgttgactgcagaagtttattttactaacttctcatgaccttatttaattttagctattaagcgcattcaatatttgactaccaaaatgtttccatacctggacttgtgcaaatttatatgctgaatggtttacttcaaaataactgtcctggatatcaggaagcttggtattgaaaaataaaattataaatttaggaagttggttcttacctggaacatctcagtgcttgtcatctgaacgcaagggttgagctagctggaggttggggagcgtttcttgtctttctttgagccacaaagaaatgttagtccttgtcgtattcattagttatttgtgcttagcttatgcacattaacatttggttctagattcttcacagtcagatttccaccattgagaaacaggcaacaaccgctaccggatgccctctgctgattcgctgcaagaactttcagataatacagctcatcatacctcaggaaagagattgccacgacgtgtacatctccctgatacgccttgcaaggccaggtagggcagaggaactcggcatttaatatggaacctctcttaaaaatttgcaaatcagattcaagaatttgtatggtgcttaggaatgataggggttcagggattatgtgtcagtctcgttctcaggagaggataagcccgaatgatcatctgatacagagtttcttgtttttttagagtctcccccgagttatttattatgtgagtctctttcatgaatcttagtattaacttaatcttggtggggttataggatgctttccttttggggtgaaattgcctttaagttatgcacttcttatattgtggtaatcgagccaccttgaatggggccagtgacagaactaatcagttgttttgtgtggaaaatgttatcagacagttctagcgcagttttctccctcttgatgcttttaaggtttggtctcca

SEQ ID NO: 128928 - DNA, 1219 bp, Homo sapiens
tgtatggaagcaaagagccttaaggccatttctacaagctagaaacacataggaaaatgtgcttttttctttttcatagaatgtaattgatacatagtgtaaactcagaacattaacacatacactttctgctttaaattagaaatgtaatataattataatgaaatgaaagcgttgaccattgtaaaacccagagagggtattcttaataggatctacacatcttttgtggtacctttaaactcatattttcgtaactggtgaatgttcatcttttaatatacacaatcctactctgagatccgattaacttaaggggaagtttttggtttttattattgggggaattctcaaaaaattgtattttggagtaagtgtgagtttaccctgttatcatttatttcgtgaattgctcttctgctttacggtaactcttttcatcatgccgatttctctaggttgaaaatgtccgcttggtagatcgagtgtctcctaaaaaagcagctctaggtactttgtatttgacggctacccatgtcatattcgtggaaaattcacctgacccaagaaaagaaacatgggtatgctttctttatttttagctttccttgttttgcgttgtttgaagcaaaaagtgtttgccctccattcatttttcctcagggtgagatgggtgggcttttgtgcctggatgttggggaactgtttctggaatgtgtgtttggactttttctgtgcagtcgtatctacttgatcgactattcattttaaacatgaattatttgaacatcagtgaagagagacttagaactagccagaagatacaagtgcttcctgtcacagctgtcaaggagagattcaataatgtcagtaggccagattcagcattgtcatcctccagtgctccatttgcaatagtctctatttgcagggtcctgtaatgcagccatttggtcattttattacattgcctctacttttctgataattttaaaaagaaagaaaatctagaggagcttcatcatcaggtatttctcctacttattaatgaaaccattagatatttgaacatcactaaataataataattattattattaatattatttttgagatggagtcttactctgttgcccaggctggagtgcagtgatgcgatctcagctcactgcagcctctgcctcctgggttcaagtgattctcctgcctcagcctcctg

SEQ ID NO: 128929 - DNA, 1052 bp, Homo sapiens
tcatataacatttctactcacagtggaagaacattgagaaaaaaaggactctgtctgaatttttagcttctcattactgtagtggtctcaaattttgtttctgcacaaggtctccttatcactcaggcactttctgaccaaggggtgggtatttcatttgagacactaagattgttctgcatgccgtgtagcgtgaatatcaacattaaagattgcaaaaagaaaagaagatggatggacggatggatgtgctaaatagattttaaaataaagtcaaatgaaagtctttatttttgagtacagcaagacgcttcatcaattcagttttaaatccaaatgatacttaattatgagagacagaaataactcaggaaatgttaccaagtgctctagggtttctagccagtgatttcctaactccccaagagaagcaaaaaagaagaagagctcgagatggggaaggaatctggaaaatgaaaaagagccactgtggctgggcagcttgttcctccaggctggtgggcttggtgccctcggccttgggatgcttatcacagtcctttgggaccagaacactggatatcagtgcagcctctgggccagcttcagaggctgttagagcatcattgctgctgtggctgatgcttcctttcctcagtaagtcacaaaagtcgtgttggccatccaggttaccgagtgacttaatttccagaaaatttaatattgagtcattattgtatgcattttcactgttgccattttgtatcctcgtaggtagtctatgaagtaccactgggtcacagctgcagtctgctagaaaggagagagacattaaagaccctttagatcccttatagaagtcaaaatgcagggataatgtctaaactgcctgctcccagcagttcaatttcagaaccagaaccagagcccaggcctcttgactcacaaatacttttcttttcatgttggtagagttagaaaatgtcatgataccaattttagcacaacaaactatttatctagctgcttttcttagattagaacataaactt

SEQ ID NO: 128930 - DNA, 2188 bp, Homo sapiens
gtgaggccgcgcccgcccgggaccctgcagacgtgggccagccatggagcacatccgtacgcccaaggttggtgacaccagcgcgggcggaggagggacgggaggagatgggggaggaggaggagggatgctgagcgcgcgggaggccgactgctttgaggggcaccggcggagcctggaccgcgggcgagggaggagcaggcattgcctgagcatcccggggtgcctgcgagcccggtcgttctcttgctgcctcccaggcctagccttagctgctgctgggtctgacctcttggttttgggggagcgcagtggacacaagggtgaacgggagggaacctcagttgtctgctagtaactgggtgtagatcaacccttctttctcctggcacgaggctttctcttttagctgttggccgctcagagtagttgaaagggaaataagcctttcggtgacaggtgcaaggaaaacgagctaaatgcagagggactcctgcgcttggaagcttgttaaatctagggtgtcaggcccacccggctcggccttcccagtcagcatcctcatcctgagcgtagcagctgcaaggggccttacacagaacggataatcaatattcattgtaggttgaatgatggtgtgttcttgccttttccagtccgttttgttcgttagagaaaaggatgcagcttacggattcgtcacgcactgttgtgttttaacaacaccagcttttgctaattaacaaaagcaaatggtccctgatcactccagtaaattaacattggaaacgttgatcgctgtaccaaatcttcctcctcagttgtactgataatctaatttagaatgaaaatgatgatcgacgttactgcatgataaaaaccctaaacgagtgaaagaatatgcttaaaaaccctattggctgtctgttgttactaccaccacagctccttgcgtttttgcaggatgaacttccattcaaaatgtaggcccctgacaggtcaaagctaggtcagagtggccatagctcaggtggttccagggatcccacacatttaagaggggtgggggcaattgctttatggccagcaagaattgattcctaaattttggaatagttcctgagtacctttttgtaaaagcagattaaaatgatctcatgtcattggaagaagaaatcttttagtttgctggagaatgtcagttccgacagtaaatttaaattgtattgattttgcactagggaattaagttgtcgcttcacaatcatgaaattgtaaacttagaagacaatgctacaaaccacagaataggtggctcaaagctttcagagtttaagtggtactaaataatttattccagaagggtgaatttaactcatggactctgcccttgccaagggcattcttcctccttccatgatgaagggagccgtttgtaaaagtgatagctgttgtggatattgatagcaagaatgatacagtgacatggcagtggatgccactttgttagagaatatgaatttgggggagtcaaggccttttctgttctatatacaaagccacctggtacaaagtcacgtgtgaacctgagttgcaagcagtgttcttactcttaaaattggtgtttatggataccctctaagcagtgcagtacttgaagtcagaaatccttatttatctggaaatggaaacaaattgggggaaaatggaaaattgtctgaagtgttactgaattgggtgagtcattaacatttgggataaagctggtgaaaaaaataagaaattacagaggttggatggatcggattcatttattcatttattttattctacaagcatttagaacctttcatgtgccaggctctgtgttaagtgctggaagcgtccaggaactcacaatctctaaggggaggcagttgtaaatatgtcagtgtatgatagagacatgtgcaaggtgcagtgggtagagagggagactgaagagaggatcagctctgccctcaaggtcaagggaagccttcttagaagagccgtcttaacatggaaggacttaaggaggactaggagcattttcaacagtggtcatgtacttgtataaatatatattgtaataaataattacaaccctaaagaaactgaaaacaataacaatggtcaaagataaatgattccttgaggttaaataaca

SEQ ID NO: 128931 - DNA, 1027 bp, Homo sapiens
tccctactaaaaaaaaaaaaaaaaattagccagggatggtggcacatgccacttgggagggggaggcacaaaaaaacacttgaacctaggaggtggggttgcagtgagccaagatcgtgctactgcactccagcttgggcaacagagcgagaccctgtcaaaaaaaaaaaaaaaaagaacaaaaataagatattaaaattcaagtttttaacagcagataattgcttttttctgatttttaaaaaatgactttgtaaaactagcaattatcttttcctggagttttgtctatgagttaaaatttaaaatttagctacagtctctgtatttatgagttaaagtgacattacttaaataatcaagtcataataattttcaatattatgtattgaaaaaaaaatcccaaatgtctgcctgtcttttataagcctaccttattttttttcaacttttatgtttttaattgagattatacgttttgtgccgaatagatgttttctgtttatttctctttcgttaattagcagtgtatccattttacaagtcattcctttcatcccaataacttgaggtccactgtggtttctgaagtctgctaagaacttgtgatcagaccgttccacccagactcggaccctcagtttcctgcatttgtacatatgtatagttaaatgacaataaataggtattcatcttgctcttagaagtaggttggctgtttttaaaacacacagtttttcatctaatgacaccaggacaaaaactttccatttgctgagggagtctaattaaagaaataaaaaagaaacttatctattataggaggaaaaattatttgccttctgaatagtgctagaagcacatgtcaagaagatgtgctaagaataaaaaaaaaagtcttgttctttgttttgtttaatgtagctgtgtgaggcagctgcaacccttcattttcatggaaacaatcccacacccttcttcaccccaaagagtccttttcgtccaactaggaacagatttttttacc

SEQ ID NO: 128932 - DNA, 1109 bp, Homo sapiens
tgaacactcaaatcttttactgtaacgaaaccaagaaacttgtttagaatgtgataggcagctaaaactgttatgcccactgtgctcaatttgaagcagaatttagtgaaaaattatttttccacattgaaacactttgcagacacaaatatctatgaaaagatgctttgtcagccactgtgcctttttttctgtgaagactcaacggatgtgtgtgtttgtatgtttgttaacagttacatatgtttgtatgagtgtatatatatatctgtgtgtgtgtatctctaacgtcagtgtataagtaagttgggtttatggtgggctttgactatgtcattaggtgggtacaaaacccaactgatgtggagaaaaattgatgtttgatgttgatagatatgcttatacctaatttttagtttttaaactattttaaaatatactatgattttatatgtatatttcctatagactctttaagacgtatttataatgtttctaatatgaaatcactaaactctagtacattatagcaggtgctttgtaatctggaatggagaagaggtaggggcatttggggattcctgtttacttgctgctgccacaccttttccgactgatctgtcctggtaggtgtttattagcaaaagtcagtatcaccagctctttggcacctttctgtttctgcttgtgaattcataatgttttcaactaaattttttttttctttctcagaattacctaaatgttttgtagagttttgactagtaatcaatcaaaattatataaagtcttctccagtaattaagaaatacatatgcaaattcttttgtgattgagtaaaagcagcttaaattacttttcttttctacattaagaaatatattctcaacattttcagtgagaatttcttgtaatggcacctcaaattttatactcttaaaaaaaaacaataatttgtgaattaccaccaaaaggcaatggcagtcctacatttaagaatagagctatgcaaactctgttaaaaactatgaggaaaacttatattagaacttttgatatatactaaaatactgattatcttaatcacattttccccagagataaacatt

SEQ ID NO: 128933 - DNA, 1010 bp, Homo sapiens
aatgtatgcttttagaactccaaggaagtggaactggtattaagcataagcagggacaaaattttccactggccccgttcttcacattgcccactttcttttcctagctaagtggttcttacctacagaactgaaagtcagtagcctgaaaaagcacccactgtataaatgactaagagctcccaattgctcagatttgagagagggagaagtatgattaggccagtgtgccttaggactctagtgggagaaaagttgtaccaaggatgggtaagataatgtactacatgacaggacccctatttctacaaagtgcgatggtcacttttgagatgtccacccaactccagtgataagaacatagtattttctgaattcatgtaacagaactaatatatcactaagtgaataccttttctcataaaataccaaatagcaatgtggcggggacctctattgaaaatcatcaatgtcctgtaagtatgaccaacacgtttgataatcaagtgcctggtaccaggatgccggaaaacactattccccagagacagttattttctaccaatcacagcccataggccagaaggatgtcagctacttaatgtgtcttgtggaggccaaatctcttctggcaacaaagggattattccgtgctgggagcagagctgttattttagcaagcagaacatgcacaagggctaaatacgctgcaattgcttttatgagaagtctactttaaaattatctctggcctcacagcacctttttggcgtggtctatgtccacttggtggatgtctgctcacagcagcttgccatgggcacagcttgtatagagaacactctagccaagtgaaacacaggaatagaaaggagcagcagaaagagccctatgggctctctcagtccccaaggaagccatttctgactttgtctcacagagatccctggagagggctaccagagaaactgggaaaagaccacagggagaaggaaacttctagctgaact

SEQ ID NO: 128934 - DNA, 2060 bp, Homo sapiens
acttcttggcagtttttcagtgttcagccatgtcagttgaaactagatttttctgtagattttttacttacccatgtgagcctaacactatcctgtaattcattttctcaggctatgtgtaaatgtagaaccctaatttttctataaaaaaacaaactaactaactaactgtgtaaagaaagaaaaagggaagtaccaatgggtttttccaccttatttttacctttgatctacccttgcagatttaacctgtcttcttccctcccattattctcattttccttttacctttctccaccatccagagccacaaaagcaaaccttctacctcctacctacttttctctgggacaaggataaaggaatatgattttccagagccccagagccagctcatcttccaggtgctgaaaccactttccaaataaactaaagcctggatttgatattacaaattttgggaaatcttagaataaagaacgagaacaaggaagtcattggctagtataattaagaaaggtaggattcagtgcttaccgatgatgcagtacttgatagaagaaaacagtctgggaggatagcgctcatttttcagttaccctttaaggagtccctttgtctttgggaaagtagcagaatggtccgcttctttcccatgagtggaaaatgtggcttgtccaactctcctccaggttgcatttcagtttctttccaaaacttattacctcccctaatcctgagactttggaaaaggtggaaggaagaactgttgctttatctccccctccctgcatgtgtcaacattgtgatgtcagtatttactaatctacattcagtggctgtacaaataacagctgtagtaagaagagattcaggatgctagaggtgaatatttgggtcatttacatgtacactacatagcaagttgatactcatgttgcatgttcttttaaattagtgattttgtgtcttaagtctttaacttccaatacttcatcatgtatgtaaccttccatgtttgcttctgataaatggaaatgtaggttcactgccacttcatgagatatctctgctcacgcttccaagttgttctcaatgacattagccaaagttgggtttgccattcatcccctaggcatggtaaatcttgtgttgttccctgctgtcctccgtattacgtgaccggcaaataaatctcatagcagttaatataaaacatctttggaggatgggagagaacaggagggaagatgggaaacaaaatagagaattcttaagattttgtttaaaccaaatgtttcatgtagaatgcaaaatgttggcacgtcaaaaatatgaatgtgtagacaactgtagttgtgctcagtttgtagtgatgggaagtgtattttactctgatcaaataaataatgctggaatactcaagaattgcatcctctgacctacttcattcttcaaattcttcatttttacagccctgtgacagcacagtaaaggtcgtatctcctcttagtttatatttcccaggaatttccactgcaaccgcagagttggtcatgggctcacagagctagagtgagaggtaagctcttcttctctaaattcaaagctatctatgtttgacaaataaattttggctggctgtaacaatttctgctgtataagaaaattggacaaacttggtaaatatttttgaatatcgtaaaaaatgtctaaacaaagttgaatgttcttaatctatgcatctatttcatattgaaagctaaacttctaaaaacttgttctagttattgaatagactaatctacaattacacctttgagtgcagcagtttaaaaaaatgaagtgtccttgaattttttcagtaccttcataaattaactcacatttgttaaagttgctactaagacaaaatgacatttctaagcatttgagtctggagttgttgcttgtgggtaagtagttgaactgtatctagtacattttaaaattctaatatattgcggtgatataaaagagaatacttggtattgacccacgtatcaccaccaccaagtctt

SEQ ID NO: 128935 - DNA, 1064 bp, Homo sapiens
ggtagggaaggagacagaggagagttgagcggtgaatcccagttgcgttgctcttcatgcattctttgtgtgtgcacatgtggggacagagtctcgcgacattgcccaggctggacttgaactgctgggctccaagtgatcctccacctctgcctcccagagtgctgaggttacaagtgtgaaccactgccctgacctttgtatgtgttgaggagcctttaaactagagcccacgcttacctgtgaagctgtgacgtctcctaatgtggttgctttgcgtattcaacttaggacatttggttttactgttaaaccacggttttgtttgttgcttacagtttgacaacttaaatgctgcgcatgaaacctctaagttggaaattgaagctagccactcagagaaacttgaattgctaaagaaggcctatgaagcctccctttcaggcaaggatgctttttttcctctttaaacagaataaaatctgaaggaaccacatgatgttttaagatggaaatgattcataacttcctgcttcagcgaatgccctgtggccttcaggctggggtgttcttggttcctttttgcgtggtttattgttaacagatgccttttcccactaaggatgcaaataatagttacaaatgccagccttgtgttaaataggatgggctttggaagactgtaaaggccattttggcggtggtggttgccagcttaggtccctgggaagtggcaagtacaagtttctatcttgtaatccacagtaaaggatccaccccaagtgctcctgcacagcagtgttgctgtgaaatgtcgatgccacttattgaatagaaaaatagtcttttctatttttcatctgtcatcagtgggagggtgtaagccattgctttcagaacagaatcggcagtgtcgctcacagtctttctactaaaccagttgcatcttacagagcagcgtggatgagtgctaagaaccggctgtgtgaccttcagcaaggactttctcaccacaaaaatagagttgcccaaagtcaggcagaggtgataatgtgtaaaagtga

SEQ ID NO: 128936 - DNA, 1008 bp, Homo sapiens
aaaaagactactttgactttgtgtttgtctaataccttctttcaaacattcgcatgtccatgcttgcttgttgcaaattcgaaacaattttatgtttggttttggctttgtggggtgtctgattaattgaaagtgagtggaattctggagaatgagcaagaagagactaggctgaggataggagtgagagcacacacaggtggcaccataaatctctcctaagctgtagtcagtgcacaggaaagtccatggcctaaaatcggggttatgcacgccccccaccgccacacacacacgtttatgtcacagctgccgaggagcactctgagaacctttaatacagcgtttacatgtgcatcctttaaaaaatacttcatgagtctttatgccaaataaatgtttccttcgcagcccaggccacttccttcaaacgaaagccattagtgtgagcgattactgcagcccagctgttccccagcagcacaccgggccagtaaacagagcaaaggtctgtgcacagctgcaggctgatgtcactgtctggggctgggcctgctgctttggactattacaataacagcagtgaacctcctgttcccccatctgacccattttctccctttctctttcccgtttcttcccatgtgtcctctcttcacctcacttatcaaaacgtcagagctgccttttttttttttggtgaatagagggaaacagccctgtcccatggctaataggaaaggacttctgtgtatcctatttggttttaaaggctgatgtgccacaattacatattcaaagcgacagtatttttatcataaacagatgtgttaaaatcagccagggtagtctgctattaacgtcagcttcgaagctcttctagcccagggcttggaggcagtctcttgtttattgctgagtccctgagttcacttagatgtttctgtcccagatatgagcttccagatgggttcagatcttgttcctgcttttttattttttaacttt

SEQ ID NO: 128937 - DNA, 1052 bp, Homo sapiens
catgaaaattatgagctaggtataacaacatcgtgtgtttggtgcctactcatccctaacaaacaatgttcagctctcagtctacttctctgcattgtatttataaaaaataaattgtggctcagaggttaagtaacttcccaagggaagctggaaagcaaagagcttgcataagaacccaagatggctagaccaccaatcttctggtagtcaccacagggaaagtttgatgaaatgatttaaaagattggaaaactatttgaaataaacgctcgtttgcattgatagctacttttggaatatttttcttctaatcaagagtttaagaaatattgttaaaatgtatcttactgaggaaagtaacttgcaaaaaacagtacattgccaaaagcagtatacacattgcctaatcaacacttaacccagtgtctatgaacttcacattgcctcacgccatatggaatgtgttgattcattcactgttccgtttttatctacaattttggtttaacaaggctatgtatttaaaataatttttaaactctttacaggtaagtcacttttgagttgtaaaattccagaagtgacttttcttgaagtaggctttaatgaaaaatctattaatatactgaaaaccaactgtacaccaaaacagggctgtttatctccctgacttgtttgaagactgagttgatagccacctcagacttagctcattctcttcctatccacatctgccctcaatttggactttggttggctgtatttataagtaaaaggccatgttctttcacctgcagatatgcagttttaccagtggtacctgtgtttgaaacccactgactgttcctccttgtcctgttccttgtcctaactccagtctctcaacttgggattttcctaatttaataccttattgtgtagaatagtggctcccaaactttattgtgtacgaaaatagacctggttgaaatgcagatcctcagttctcatgcccattgcttctgacttggttggctggggatgaagtccaggaatctgcactttgtttt

SEQ ID NO: 128938 - DNA, 1121 bp, Homo sapiens
tgctattaaataataggtattaggatgtatgcagcttgacagctgtgtagtaattaaccacactggctgttttgtgagggcatcatctatgctacagaaaggaataatcattagactaaatattcctagaaatcccaaacgacaggctcttcaaactcaagtggaaatgagacctcatcagagtattctcctgatccagtagagtgtggtgtgtggagtcaaagcctaggtttttgtccatccactcctagttggatgttacctaacttctttgagtatggttttttcgctggtgatatgaaatcagtatgtattttgctgcgttattgtggagcttgaataaaatagtaatgcatataaagcagtggtgtagtgcctggcccatcacagcaactcaagaaaagagagctgccactatcgccgtcatcaaagcacccacttcttccctccaaaataatgggggtggggcgatgggagttggtgtcactctcccattgggtaatttttcttcaccttctcaatgaaagttgagacaaggtacccaaactactaagaactgcaaagaaaaaggacagttcataaactcaggagcactgaaacccaggtagagtctgtgctttccaccttccgcatctaacagcctccagctgtcccagcatccactgactttcccgttgttccctcagtctcactgtggcagtgtccaaagcagcctgtgtgtttccactgtctgagccacactcccttcatggaagcactggttctttgcttctgcagaaactcttaaaagtgtccctttggtccagtgattttttgatactctacgttgatgtctttactgtctcgtgttttcttgttaccttcaggtataaagtccataattgtagggattcttttctgtttcctatggaaaaataatataatatgctttctgttttcttgggtactcgataaatatttttgggtattttaagttttaaagttttttttttttttagaacaatgtatgaaaattaagatttttaagtgaaaagaaaacagccggcagctccactgccctgacataactttatttgcatattcccttttcttagtttatatgaatatatacaacttcatac

SEQ ID NO: 128939 - DNA, 1483 bp, Homo sapiens
ctgtagtggcagacatatttcattacatatcagacattcttatatctcatgaatctgagaactaatgtcacactctgtttcgcagaagacacactaaagttattttagtttttttctaattcttggtttatccttgcttagttagacggtattctgcacagacagccaaagtgaacaacagtattgatggtagtaattaagcttcttcctaaaagggtctattgggtggctttctaggtaaacttgaacagggctgaggtcaccctccccaaacctctaattcttcaaaatgcctccacatcttttttttttttttttgcaagtggaatttaacctaaagtagcacctgaacaaaggtgaattttgaatggcactagcagtaaagttgacttggaacaaaaaaacatagatgcattgagcaaattcactgtgtgggtgatggggaggaggtcagatgcagcacacgtctgagccatctgatgtggctattctctgcaagatgctctatgctgttgatgctactcagtggctagcaaaaatgcaggcacaccgatgggaccacagccagagactaagtgcctgtgtcccagggactcctaattcaattatggtgaatccattttttttttcttgagcatttcatatatttaatgcctgagcataaaggcatctttatatccagatttccacctttctcttttttcacattgtgtgtaattctgcatgttacaatacaaagagaattgaatcaacctgttatctagacggttaagagtttatcatctaagagagaaacactgatctaggagcagctgagtaaaaagaaacagtaaatcagtatctaaaggacataatgcattttatcatctacaagtaaagggtaagtacatgtaaaggccaagctaccagggagagtcaggcagaaactaacccttagtatgtgtcttttacagtatgggcactggggtcagcatttcatctatggatggtatttaaagcccttggtttttttcattactgcttcccatccgatgaggtcatctgccttgatagatgaccaaaagaattgagcctggatgttctagttctaggtaggccccatgcttcttgaaggcagggaccatgtcttaaatttcttttatattttcacagcatctgctatgaaaaatgcttagttaattagtttgaagtaataagttaccaaccaatttagaagggtaaatggtctatgcatttggaggaggggaatggtgtcacattacaagggaagaaccaactgacttttgcacaacccatttagacaaagagtgaaagatgacctcaaggttttcctgttactgttactgtgcctgacagaggttggaagatgtcagtagtttctgaggcattaaggacaggaacgtggagtgcagtggagttgaagtttggggaaatgtcgacatgcttggtgaaactccctttcccaaaacctcccttaataagc

SEQ ID NO: 128940 - DNA, 1053 bp, Homo sapiens
gtgtagatgagaaggttcccatcgtttttcattggatagtttctcagtcagatttgacagttaattttaatatgctaaaagatttctgtatactaaacacttctgacagaaaacatcctaatggttatggggaagtagtaagtgaatcacaaatctagttttccaatcttcataataaaagtgtgtgcagtctcaaaatacttcccctgaggtttatgtttgtatctgcttattattttcggtgcctaagatgaaaataaatttagtatatattttaggcacgtggtgacctgtctgctcacttttagggcattgggttggcctatgttgctacttttgtcctagatgattttacagctacagtaaattaaatcagttttattctgtaaaatatgttagctggggtgtttttatatttgttttgggctgaatagcgttaggtgtcacaggaatgtttgatgaggatgtaaatagatttttgtttctgcttcatgtgcacgtgacccctcgtgtttcttattttccacgtggctcatctctgtccctggtgatttgttttcagctgactatttttagttttcccagaggcatctcccttctctgtgggagaattctcattttttccagcacctctctctcgtgtttcataactccccttgacctgtcatttgattttgccagcctctccctttcagtctgagctgacggtaaatggggggaggcagcgaggaggaggtcagcagtggccctcctctcccagctcagggccgctgcagcccttccaactgaacaaattaataggggggaaaaataacaaagggtgccctatatttgcaataatttgtctgatctaaagtagctccaaatagcttttaattttaaagagttcttttaaaaatactgtaatccacgctccaagttaaaaatcaaacagtatggaaggttgtgcagtcctaggcaagcctctctcttacccagagtccctgtctgctctccgtggagacagccgctctcagctgcttgcatagtgttcttgcacgtttccagtcacat

SEQ ID NO: 128941 - DNA, 1177 bp, Homo sapiens
tatttaggtagcaggttcgtgagcatcaggagaatgtagtttcagagatgccagaggatacgcagcctgtatatttatttcactgataagtggaaacatttttactgcaagaaagagttgcaagttggagtgaagatcatttaagtttggcaaataaactgtgtggggagtaaagaagaaaaggtgagattaaaaaaaaaaatcttaatagtatagcaccacctggtgttagaacattaggcatttttcaaatgaaatttttgcttatcaaattgcatttttcttcctgtttgggtgattttaaaattttccactcaggagaattttgttaaagttttcagttaacgtgagttctgttttctgtgtataaatgagtgaatttcctgagatctctctttcattccaaagatgtatttggacttggttcttatttatttcttatatgatagcctattgtcctaatggattattttttttttagtcaccagtatggggggtcgtatcaatttgtttatttttttatttcagttttgccaaaagctgctttctcatgattattctgattgatcatctccttcagagaacatgtgtgagttaattactttaggagacagggttactcctacacttctcatatcctaattgcctcatcatttctgctctcttgcctctaaatgatcaaaaataaacatgtctgcgtgaagctttcatctttcatctgaagttacatgattgtgaacattcattttgtgttttgactttgttgttagtgcagaagtttgagtttacaggcttaaaaagtgccagctttcgggatgaatagcactggaaactttttgttttttttaaaccccaaggaaagcctacatccttgaaaactgcacagtcgtcatgggtgaatttgcctagaccacttcctaaatccaaagcatctttgaaaagtcctgcgctgcggaggacaggaagcaccccctcaatagccagcacccacagtgagctgagcacttacagcaacaattgtaagtcgactttatatcacacttcgggggttgtggaaacagtcattacaagaaaaactaatgctctgcaaataattagaatttttgtttctggggtttcaggaaaaataggcatactgcttccttggagttgctctgaaagtttggcagaaaaaaaa

SEQ ID NO: 128942 - DNA, 1008 bp, Homo sapiens
gtgctcctgccagggtgacagagcgagaccctctgaaaagaaaagaaaaaaaaaaaagttggtgtgaagttttgaggtctcaatgatctcaccacctcattgctcagtggagctctgctcataaaccttgactcctaatgagccaggaggctcactgtgcaccttcttttgttcttatcaggcattattagcataggtgtcagatggtaaataaatttgctggtgaacatgtgaagacccttgtttatctcctttgtatggtagctgggaaaatgaagcaacacctttaagtctttggtttattcccctctgaatttaaatgttcctgtagttgtgggacacatgttccaggcctgtgactaaggcagttatttttgtttaatccccacctgaagccacagacatcttgtgaacatacttgcagaggcaggtactgacagcatcaccgagaatgctgcgcttctgtggagttcgagtcatcgtgagaacttccctttgtgggactttttgctcctttgtcaaattactgcagtcttaagacttgccgtgtttttgttatgactcacctgtgttgctctgcctttgtctggggagcttacccttgaatttaagcaaatgaggatagttatacagagtcctattgccttgatgaactcaagaaggtggaatagtaaaatcactatttgcaacatataaatctagagtgttactgaaatattctgtgttctgcaacgtatttacttaacagatagagcgtgtatgctaggtaagtcatgtaccagacactgagggattgtgggatgagtaagatgtagtttttgccttcttggtattaactgccaaatagaagaggtgacaagttcttgtttcatcacatttgttcttataatactaaaatttaataaaaagaactgtaggattttggaagagggtgtaattacaaataccaaagttcgcttaatggttttctttctgtaatataggagattatataatgtaatagagtta

SEQ ID NO: 128943 - DNA, 1062 bp, Homo sapiens
ttcacatacttgaataaagtaattactaaaaatcagaggttattacccaataagttattctaaaagccaagttgaggccggacatggtggctcacatctgtgatcccaggaattagggaggatgaagtgggaggattacttgagcccaagagattgagacccacctgggcaacagagtgagaccctgtctttacaaaacattaaaaaattagctgggcaagtggcacacacttgtggtccttgctactcaggaggctgaggtgggaggatcactgaacccaagtggttgagggttcagtgagctataattgtaccactgcacttcaggctaggtgacagggcaagaccctgtctctgaaatgtgaataaaatttaattttaatgtgtcgctaatagatgtttctatatttttatgtaattaaattagtttccttaaagtgtgtatcaggatctcttttcataaaaatagtattagtcactaacatgttttgagtgcctgtgtgcgccaagcacagtgctaagccctcttttaaatgcataatctcatttaattcccacaactcctagtagggatactgtgataatcgccattctacagatgaggaatttgagggtctgaaagcttcagtaacgtgtccaaagttacacagtggggtaattggtggagacgggaaatgggccgggtgttctggccccacagtctgtgctcttaaccctggtcctttacgtgcatgcagaagtcttgacacactcctgtcttctttcatggacatatgtgaattcttcattaaaccacatatgtgtgaaggagaatgtggggaaggctggtttgtgctaagaactcttctaagtgctggaatgaagtgcacagaagagacccgttccttccattagggagcttaaattctaataaggggattaagaaaataaatacatttttggattcatgatgatgaatccaaaaataaaagagaaagagccaaacatggtggctcacgcctataatcccagcactttgggtggccaaggcagatggatcacttgaggtcagaagttcgagac

SEQ ID NO: 128944 - DNA, 1697 bp, Homo sapiens
cctgcagaaggacctcgttattaagtgggctttgactgggaatattccatgaagaggtagttgtgtcattctttgcctgcagatgggaccggcgctgatgctgaatggcttggcggcccagtaggaacctaagcaccttgacttcactctgaaatgcctgcgtagtcatgcgactcagtatcgggctgtgtgtcttgtcacttttatttttaggcccccactggggtaacccaggttggccaggctgcctcaccaggagactgtacctgagctctgtttgcccagtgcctggtggccatgggtccagatgtttgtcctagtaatttattctaaacagctacatcgaaaacatctttgtcagcatacttgctgtggttactatgataattttactcttctatgatataatgtctcttttatgatagttaagttaatagagtgagaatttcattgaagattttaacaaagaacttgcaaacttaggaaacttgttcatatgtacacatggctgctttctgtgcgaccatctagcttagaaaagcttccacctggcaggtgtgtagggcgtgatgcatgctgtcgtgtagaccctttacatttgaggatttagcatttgaggtctcagatactcatgatgcagcctgaagtttcaggatcccggaggtggtacggtatttttctcctattctgtagattgggaaggttgaggtatccaaaggtgaagccattagctctgactcttctaatttgtggtgttgctttaaaaaaaaaattatggtaaaatatatataacatgaaatttacgttttcaaccatttttgagtgtacggttcagtggcataaagtacattcacaaagttgtgtaactatcaccagtattttcagaacttgttcatcatcccacacagaaactgtacccatttaacaatagctccccatgttcccctgccccagcccctggtaacctcgaattgactttctgtctctattcatttgactactccaggtgctttatgtaagtggaatcatccaatatttgtccttttctggttttttttttttttttttttttacttataatattttcagggttcagccatgttgcagcatgtaacagaatttcattcttttttatggctgaataatattccactgtatgtatagatcacattttgtttatccactcatctgtcagtggtggccactgacacctttgatggtgtccactttttggttattgtaaatactgctgctgtgaacatggatgtacagatttcttggagtctctattttctgcttttgggggtataagagtggaatgcttgatcatatggcaattctatgtttatctcttggaggaaccacagaattgttttccatagctgctgcaccacttgacatttccaccagcaacgcaagggggttccaatttctccatatcctcaccagcattttgatcataggtgtcctaacgagtatgaagtggtatctgattgtggttttgatttgcatctcgctaaagactaatgatgttgagcatcttctcatgagattcaccccaatgcctggtggcatcacctccgcttccttttcttcacattttagaaaggggtaaacttactttcattttcttccccagtccttatcctcttctgatttgagactgaggtggtactagccagaatcaagtaggaaaa

SEQ ID NO: 128945 - DNA, 1107 bp, Homo sapiens
atggagttatagagtatggagacttttgtgtgtgacgtcttttgcttagcgtatgtgtttgagatacatctgtgtggtttgtgtatcaatggtttacctttctgttgtggagtggtatttcatcagatgaatgtaccacaattaaaaaaaaataatctacccgtgatggacatttgggttatttcaagtttttggcaattagatttttcttcctagtttaataacacaggcaagataataaaatggcatcagtgacccacagctccatacccccacccacatctgtttttgttttcctgtgttgctttttctacatattttacatagcaggaatcataaaacacaaaaatatttttcctagttttgtaaactgcataatttataaatagttgcattttattgaatcactgtactgtggttttctaattccttcttgtcaacattttcatcatttctaagtcttcacagatgtggaaaatatactgaaaatctgctgaaatatttcctataataaatttctgacgatagttttcttgagactcttaatggaaagtcataaaaattcaagcaaatagggacaaaaactggatgggtgtgataaggatatggagtccttctaagaacttagtgtctggcaggttctcaggaaccaagtcagtgaggcaatctaaccttcactgtttttcatttctgctccccttggtatgttggtcccatccacgtctctgtagagatttgctttctctgcttttgggtgtgtggagaaggtggctgatgcacagcgcctggatttatgttatttagttccagggacacactgtgcctgacatctttttttttttttttctttttctttttttgagacagtgtctccctctgtcacccaagctggagtacagtggtgtgatctcaactcactgcagcctctgcctcctgggttcaagcgattctcttgcctcagcctccaagtagctgggattaccggtgtgcgccaccatgtctggctaattttttttgtacttttagtagagatggagttttgccacgttggccaggctggtctcgaactcatgacctcaggtgatccaaccaccttgacctcccaaa

SEQ ID NO: 128946 - DNA, 1096 bp, Homo sapiens
taaaagtggccgggggcagtggctgacacctgtaatcccagcactttgggaggccaaggcgggcagatcacctgagattgggagttggagaccagcctgaccaaatggagaaaccctgtatctactaaaattacaaaagtagccaggtgaggtggctcattcctgtaatcctagctactggtcaggctgaggcaggagaatcgcttgaacctgggaggcggaggttgtggtgagctgagatcgtgccattgcattccagcctgggcaataagagtgaaactccgtctcaaaaaaaaaaaaagacaactaaaagcatgcacagtctgtacatcaaatcatttctttagcataactgtacagtctttgagagtgcctttgataagccctgggggtagatggtgcttttaattatttacttctatacaaacagctcattgtataaaagtaaatactttggacccagtactatcctgaaacttactgttttgcctcttgttcttttttactgattttcatgacaaaggttactttctgatggaattttgaaaatcatctacaatatgatgtgatatctaagagagcaagggctttattttgttccttcctctgggaggagtatttagaattgtgctttttatttttgttcaataaactgttgaaggaatgttgacttagattgagaaatatagttgagattctcagaagtcggctgagttaggactgcaggcagctggcacatgatccttcctagcctgcttttcaaggtggtggtttagtctgtggctgtcgtaccctactgggttgtggacagagacctacttcagtggaaggttctagatgaatatgttcaggatgtaacagtaaaacatgaaattctgagtaaagagacagaaacggtaactagtagctatcgtcaacatttaagggtttctgttgggtaggaaggattagttggcaagcagattacagaaaaagaatgcggaaaaaatctgtagattccaataagaattcatgaatatgtctcagaatacacactgctgttcactaccacatgatctttgaaacaatttttgagataacattaagtgtgatgaaa

SEQ ID NO: 128947 - DNA, 1028 bp, Homo sapiens
gcttattaggctgaacatttaaaaatgtataaccttgtagatatataatcaaatgaaaactattttctccttatatggtgtgagttgttttgatcttgaatgattagccctccatccttcagtgctagggactgcttttcttctctccttcctcctgtttttattgaatttcaaataataaatagaggtatttcaccatttagctagattttgcccaccatgacatccattatgaaaccctggggacatactttattatagaattggaaaaatgtaatgggtatccaggacatttggtgcagtaatgtcatagagagtgcacagacttaacaggcaaaattgggttcatgtctgagattttcctattagccatgtgaccttgagtgaaatttcattacctttgctccccagttggctcatcaggacgctggaaggtgggggtagtaccttgtctcctggggttattctgacacaggtgccaggtatatagaaaatgatcaatgggtgctaataaccttccttagtctctagttttaaattaaatcttctgattcatagataggtgtttcatttaatttctgctgcttagccttggaggtgttgcttggatctgctggtgctgtcggttgggagttaaattctaggctcaggaggctgataactttccctcttccttaggaggaattgatttgtagcaaacattggagattgtttattctcagactccagctttgtcacctcttgtttttcttgaaagtttaagtctagtgagctgctgatactccatttgaactgtgttttcaaaaaatcaatgtagatacttttatctttggtaaagtctgtaaattatgttgcctctttgctatcagtcagcacattcgaaagacaattgagtcatcactttgaactaatcttggacttgtggatattacagtactaaggttccctgttctgatttttcacctgtaacatagtccagaatatttgtattttagagtttcaattgtaaaatgttactattaatatac

SEQ ID NO: 128948 - DNA, 1132 bp, Homo sapiens
gctttttgtacattggaaacatggtaatatttaactcaggtgttatttacacatataccaatctggatgaaaagaatcaatatttcttcaccttatttcagataagcagttcataggaggtattcagcagtgttcagtgacaaataagaaatttattttccttaatgtttattttgtagatttttgcatgattgttagctatgaatgatacgaagttgaaactgcatgtcctcgtaaaacatagctcccttggctagctttacggaatgaaaatagaagccagcatagatatgagcagtttctgagatgacattgaaacatagacctacccccttcccctgacctctgtgtcaaggtggttgagtcatatttcccagaattctgattaagtcaccttgcactgttaaaatcttattttttattatactgtaaactgctatactgttaatcatttcgttgttaatcaaattacagaattgaaccatatttgcttattactgtgaccctaagccaacaggctttaattgaagtgaggattgcagaagtcctccttgctggtgggtcaggatagggtagaaggatattggagaatgagaaatggatttaaaagggctgagccatgccaagacctagctaccaagaaaaattcacgtgttgtattagatccccaatctaggccccacatacagaaccaagtcatttatacgtagtgtatagttaggcttatatttcatgtaaaatgataaataaaaagcatgagtaaaaatccttgctgttagaatattatgtttgatttttttttcttttatctttttttttgagacagagttttgctcttgttgcccaggctggagtgcagtggcgtgatcttggctcactgcagtgtccgcctcctgggttcaagcgattctcctgcctcagctttctgagtagctgggattacaggcatgcaccaccacgcccgtcttcattttttatttttagtagagacagggtttcaccatgttgatcaggctggtctcgaactcctgacctcaggtgatccaccggccttggcctcccaaagtgctgggactacagacgtgagccactgtgcccggcctgtgtttggttttcctcagcctcagccatt

SEQ ID NO: 128949 - DNA, 1566 bp, Homo sapiens
tggacaactttaaaaggaattgcataaacggaattgcaattctgtagacagtttgctttttcagggatggttagggcaggaaatgatacacaacttaaaatggtgatgtcctgttagtacagtgctttacagtgtagaaagtgctgttacagattttttttttttcataggcaatatattccattaggaaagctatacaaagaaaagattagaactacatgcttatccttaaaaccaaagctaaaaaaccttagaagtggaatttagtttaaaataatatgtagttatttatgtaacttgcaccacgttttttcacctgttctttttaaaatcaggtttatgaagagaaaataattcttggtaaatctgcttggtagaaaatcatgcttggaacaagaccttttaattatgtcaataagtcaaggttacattttggagtataataggattataagattctagataatatcttatattttttggaaactaacctgcagttattacactcaagcatttaaaaagcctgttacttaatagccctgttctgttaaccctgtttgttttgatttcaaaagtaatccgtgcttgctgtataaaaataggtagattgagaaaagtgagttaagcaatttcagcaaagataatcacagttaatatttaagaaaatacttgttaatatatagaaaaattttttatagttatatagtttatctaaatatactattgcgtggaggttttttcctgattaatgtatcatgaaaaattttccatgtcatgaaatcttcagaaatcttagtggctacttaatattacattacatagatgtatcaaactggttttcatttatttccacttactaaatatacttttgcaacaaatacgtttttaaaactttatgtgcagggttaatatccttagtgcccttgaaatacagttgatggttggaagatctcctcatacatattgaccatttgctttccaaaaaatgtttaaccaaattatgttcccaccagctctctgtgagaatactggtgttaccgtattcttgtcaacatgtagaatcatccttaaagggaaaaaaaaaaaattcttcccaggtttataggtgaacagtgctttctctatatttaaacttcaatttctttgattacagatgatttgaacaccaaagaaatctagttgttttccattttgaaatttgatgtagtgccagatttttctcctgggatattagtatttttccattaattcataagagccttttatggattgatagtaaatctttgccattcatattgcagatacttttcccattttatctttgctttatatatttacagtagttttgacatacacaaatttctttaatgttgataaatctgttgactttctcaaaacagaatttttaacacttctaaatcgtagcttcagaactatatgtgactgtggtagaagatttaaaaaaaattttccagccgggtgcggtggctcacgcctctaatcccagcactttgggaagccaaggcgggcggatcaggaggtcaggggttcgagaccagcctgggc

SEQ ID NO: 128950 - DNA, 1022 bp, Homo sapiens
tcccggtcttggctccttcttccggcacgggccggagctgacacccccacggaaaaccgcacagcgcctccgctctttctccacgggctgagggatcaatgcacttccgcataggcctagggccccacgctccgcgatcagcgccggaagcgcacggcatgctgggatttgtagtcctccacctgtggccggcaggcgtttagaacgcgaggtctagttggcattctgggatacatagttcctgggcgggtgggggcggattcgttggtgtaatctcttttcggcttaaagagccagaagcgacaccacagactccggcgggtcacatgactccagtctagctcgcattgcggctcccgcccgggcgagttctcgcccccgcgcggccgttgccgaggagacggcgcatgtcccgccgcgcgttgccccctctgcagtacccccgcccctcttctcccaccacaatgagatcctaagatggcggtggctgcggcggttggcgctgcgtagctgaggtcgaaaaggcggccactggggccgaggcagccaggaaacgtgtgggcctctctgctgcggtctccgagggccgaccgctgccggcggcgggtcgtgggggctgactgtcgctctgcctttgacaggagaggctgcttcttgtagaggtaatgcctgcgcgtccccagcccttggcaacctagggcggcgcgccccagaggcgggagagtaacggctccgggacactcggccctgttgggtctggccacgggcccacgcctcctctgtaggttcccgggtcttcctgccccgggcttcccgtgccctaggcggtcagtccgcccgctccctcaggactgatcgccgggatccccgggtgagcacctcgcgacgcgttggtgattgcaggactcccttcttgcctcctcgcccctcctgctggccctgtcggggaggctgttctgcgtcccggtggctccggctataccccttgcgggcggaggaagcggagcggggactctggtttg

SEQ ID NO: 128951 - DNA, 1025 bp, Homo sapiens
tgaggacccctgaacaccaatataatacagagtttttgaattgaaggtaaacctggtatttatgtagtgacgaggttattttattatgaagtacagtagcttttaaatgagcaaacatttttaaaatcatcggatatacgaggttgttacatagtttgagtaacaggaagctcgatcaatcagaggagtaaactttggcatagactattaaaggatagttagggctaaccatctttgttacactgttccgaaatagatatcactttgctgtttggtaagatttcagaagtttaggggatttaagcatttatgcatatcacactattttccaaaagaattgaggtaacttaaatttaaaatatgaataagttatatttttccccttcttttgatctttctaaacatactttagaccaaaactgaagtattttttattctgtatttcatagcgtaagtaatttacttaagtgatacatatttttaatcctaattaggaaacagctttgaagtgtggagcgggaaaggagcagtttctgagctgcaaaaactagtttctaaacaggtaatttgacattattatctgtattatcctttgtattagagttggagaagactttatggtggacactgctgtcacagttacagtgcatgactgaggatcctctctgcttagtaaacaaactttctgggttcaccgccctgtttgctctgcttttcggcgtgctgctttggcctgccggtatatctttgttcggaaaggccctgtcattcctaattattaattactagaatggtttatgcagtaccgtttgaaatttatttgtcttcacagaattttttcaacctgtttgaatttgtcctataactggatagcctctctttccaaatccatttaatctcaagttctctcctacaacattcctattaattggctgttcatgaactctacttgtcgaacttgttataccttgaccgaaatttagttgtctaaaattactttattattattttttgtacttcgatct

SEQ ID NO: 128952 - DNA, 1050 bp, Homo sapiens
taaaagctttttagaaataattgctcttcagaaaaaaacctcagaaataaataacctaaatttaattctactcttaaaattttaagaaagttcattttgaaagttttgtagaaattggctgggcgcagtggctcacgcctgtaatcccagcactttgggaggccgaggtgggcggatgacgaggtcaggagatcaagaccatccggctaacatggtgaaaccccatctctactaaaaatacaaaaaagattagccaggcgtggtggcgggcacctgtagtcccagctactctggaggcagaggcaggagaatggcgtgaacctgggagcaggaggttgcagtgagccaagattgtgccactgcaccccagcctaggcaacagagtgtgactccgtctcaaaaaaaaagaaacttttgtagaaatcaatatatattcttgctttctacaaaagcagacagatttttattttatagctctcctatgaggacctgaaatgagactgtcatgagaaaatacgaataggtagttgatgtatatcttaattataattctcagtgggtttttttttttttaaactggaagactaacaaaacagggcaagaaaaatggaactcaagggaaaggtcacatgtgaatgtgtgtgttagagttgttaatactacagtgattgctgtatggtgggctttagtaaaataaacaataattacaaaattagttataagattttccttttagcacattggggaagatgatggataagacgaataaaaataaagggtaattgagttaacttaaattggaagacctgggttttttcaataggagatttggccatttttttctgaaggaggaaagtggatttgagacttggagaaactagtaaggctgtgagattcacagtacagaactaagaagacaaccagaaatacctatcagtactttcatttttacggatttgagtgctaggcaacgtgctatgtaatgactactacagataaaacagtgtgcaaaacagacagggtgcctttcttcatggagtaaatttacat

SEQ ID NO: 128953 - DNA, 1083 bp, Homo sapiens
caaatttaatagtttcttattttaatttgcagctggactttatatattcgtatttttttttgcaaactacttgttttgcttatatttctccggttttatttttttaaaacaaattctctgtataacaaaggtattaactatacttagtatttctttgagatttttttttctcccaagctctcatttactattctcagcacacttaggaatttacttttatgtgaataaaatctgttgaactttttattttttatttctttgtgttctaaatttagtaagttctctgtttttaaaaaccattcaattttcttgtctttttaaaatcttaattgatgtttaaaattctgttttaatctttgactattttgatagtatgatataaggcagcctttctcagttgggagagaattaagctccaataccctaaggcatctgttgtttactgtgaattaactttttttctgtgtgtctgggatggatggtactggatatgtaccatccttgggagaattgagaaagtagtgactcaaacgatttttcccctcttctatgattgaggtgaagaataccacttaaggaagactgttaaagctctaaatgtatctttttcaaatctgttagcaaattgttgtatcagtgctcactcctacatcatagaattgttgtgaggctttaatgacataatggacgtgaaatattttagcatggtgtttggcatgtggtaagcaaaataaaatgcgttagctgttactagtttttcttactacatttttctgattacatgtatttgagggtttttgttcctgagctagtactgatttaaccatatagacagcattgttgaaaccatatagacagctaatttggattagcattctaacctcctgacctctgttgctatccttgcttttattttacagatggtaacttttttttccgatatgtttattcttccagataaattttagaattattttgtcaagttctaaggagaatcccagtgggatcttaactggaattacattaagccaatctacatttagaaaaagtggttggttgtaatatttagtatcccatcatgga

SEQ ID NO: 128954 - DNA, 1139 bp, Homo sapiens
atgcctgtgttttcagggtatcatcttcatcccaagtccattgtcagaacagagatactttctttcctgggagaagttctgggtctagctgtttatgacacttttcctactttattgttctaccctttggaactgtgttgaattaagtaagtaatcttcaagcatgcagactggtgctcacaaggtatattcaggggttttcctttccttctctgtcattccaactacctagctcattttaatcataatatgcctgtcacagctaaatcaatttgtctgtgatgtggttgacagtgcctcattttagttcataaaaatcagtgcttcaaagattgtattgctaaacttcatggaatgatttgaaaattgaatttgtttttatgtgttataaagctcagttcttaacttgtttcgcagagagttaattgttaaatccagtatggccacaggaggaggtccctttgaagatggcatgaatgatcaggatttaccaaactggagtaatgagaatgttgatgacaggctcaacaatatggtatgattccttactcttcatggtgtgttgttggctattaatgttaaaatgcagttttccccctgaccaaatttaactcactgatgctctttgtatacacttgctggccaagacattaagggaccctgggccgtttattatattaattgaagacacaaatcaaattgagtttttaagccccaaagcagatttactgttacataaagatgtaaaagtgttttttttatggaaaccatgtttaagacatgcagctgggttttaggaagggatttggagaaggaattgggaaattatcaagaattacgttttcaccaccctaactctgcttttgagtgcatctgcctaacacacctttctctttacagaccagttttctctcctctggtccatgtgatatactgtggctgtcccattgttctaaaccttttagttatgggtgcagttatgtactgactagttacctcttagttccaatttgaaattttgtagtatgattatcctaatttggattagatatgtgtttcttttttcagtcttctgtggcgagggtggggtgaggtgtaagtagtgtaacaggttggcaggaatattcactcatagattg

SEQ ID NO: 128955 - DNA, 1079 bp, Homo sapiens
ggaagcaaaataaatagcctagggtcacacagtggagtgttttttcagaaaacagtaattaggtttagaacctaggttgatttgatttcagatctctttttgatacgtactgactttataggagatcggtaaaggtatctgtaatttatttcactatttataatagaaaatcacaatgtaaaaaaatcctcttggaaatattcagattgattttagggttggcatttgaggatttgtatttgttagtgatcttgataagaaaataatctcttttcagaaggatgggctataaaattaaggtagatgtaatgaggggaaaatgggttaatagaagtaaatatttgtctctaggagtataagtctgtcaaaaatgtcttgtcttttttaattttaaaactgaccaaaactttttaattataccaatctattttcctggtttgatacaggccatgttaatttttgcttttacttttttaaaggattggggtgcccaacagaagaaagcaaatagatcatcagaaaagaataagaaaaagtttggtgtagaaagtgataaaagagtaaccaatgatatttctccggagtcgtcaccaggagttggaaggcgaagaacaaagactccacatacgttcccacacagtagatacatgagtcagatgtctgtcccagagcaggcagaattagagaaactgaaacagcggataaacttcagtgatttagatcaggtttgtgaattatttttaaaaatgaagctattactgtgagaaatacttgaaatggattaaataatttgtcttaggaataaaaaattgagctgtttatgtaatttttaaaaaaagtttctgtgcctatggaaagaattttaatcactggggatggtcctgtcttctttagaaggaaatgaagtcccatttctaaacttgctaaagacatgcatttctggactttatactatgttatatgactaactcaagtgattttactatacaactaaattttgcattttggtaactgaataaaatggtattaagtaatggaaagttccagtttagtatatatatcattggctaagtgtggga

SEQ ID NO: 128956 - DNA, 3082 bp, Homo sapiens
acaactttaattacattgattcattgggtccaaagcgtataaaaatactataagcaagtaataaaaagcaatatgagttaaagtgtgatccatggtcctaggacacgttgagcatccctaatacgaaaatccgaaatgctccaaaatccaaaactttttaagtgccaacatgagtggaaaatttaacacctgaccttgtgtgatggtctgcagtgaaaacgcgtcaaaactttgtttcgtgcacaaaattattaaaaatattgtataagattaccttcagattatgtgtataaggtgcacatgaaacataaatgaattttatgtttagactccggtctctttcctaagatatatctcatgtttatgcatatattccaaaatttgaaaaaaaatgaaactcctaacacttcttgtctgaaatattttggataaggggtactcaagctgtacttcatttagacttaccttgttcatattcgtcagttgaattgtctcagcaaagtgaagtctagaaaatgctaatcaaattttcatattgtagtgaaagactgttacagagccaaagctctttcaggtcttagtgcaaagctctttgtgtgcaccttctgaatcaatatctgatggcgaaactaagaacattggggttaaaacaaaattttgtcataaggttaatgtttgtgtgatttgatttctttttcatatatagagaagcattggaagtgattcccaaggtagagcaacagctgctaacaacaaacgtcagcttagtgaaaaccgaaagcccttcaactttttgcctatgcagattaatactaacaagagcaaagatgcatctacaaaccccccaaacagagaaacgattggatcagcacagtgtaaagagttgtttgcttctgctttaagtaatgacctcttgcaaaactgtcaggtgtctgaagaagatgggaggggagaacctgcaatggagagcagccaggtgataacgtttgtttcttttgctcattctttacacaaacctcaaaataccaacagtaaggtttagaaaattaggttacgcacacaggaattttagttgggtggaattaaagtgcttcactgacctcctttgttaatctgccagatttacttaaaatagagtaaatttctgtttatccaaaaatattttagaaatggcatattcaggttagttaaaggcttctgtttatttacaaaatagcatattgccagtttttagtaaagggggattggaaggaaagtgattaatagatttttgtaggaattttttaaaatggcaaatattcttttgaaaagttgtaaaactataatacatttaattaatttataaacattaggaaaatttatataaaaaattgtatgcagttgtagaagtaaaatttttcagatactgtagattaaaattttgaaatgtatttttgaattgacagtgattggagtttttagtattaccaattatgtcttgattaaaatctaagctggattcagattttttgcatgtgttaattcacacaataatccaagtgtctttggttatcttcgaaataaaaatttgtaaaactgttgctattgaactaattatccttagttttatatattgtgtactttcatgctttttttaaaaaaaatatttcccctgcagattgtaagcaggcttgttcaaattcgcgattatattactaaagctagttccatgcgggaagatcttgtagagaaaaatgagagatctgctaatgttgagcgccttactcatctaatagatcaccttaaagaacaagagaagtcatatatgaaatttcttaaaaaaatccttgtaagtattcgacttttaaaataacatattatttttgtagtatctcagtgtgtatttactgatgacattctgatgccaccccagaggagttaacatattttcaaaaaatcatgccatccattataacaatttattgcccattttaatagttgtatgatttataccgctaaaatatttcaggctagagaaaatgaggaggaggatgttcggactatagattcagctgtgggatctggttctgtagctgagagcacatcgctaaacatagatgtgcagtctgaggcttcagataccacggtaagcggctttttggtaattaaagtgctggaaatgaaggtttaaatttttctcccagttttcaagatgttatttttataggcgttccttaatgaaaagtgtattccagggaagaacccctcaaattgttaatgctgtatgtgttcttctgtatttaaacacggaagttaagttttatttattaacactaaaaatagttttaatggttaatttgaaaatgtaatttttgatcttcagtttatagaaacattgtttttgtagtttgttttgttaagcaaagcttcactaattttaagaagcatcgaggaagttaaaatggatggtggaattaagggcaataggcaacattagtgattacttagcatgtagtcttttggaaataaccaagttcatttgtcactgaggacacgttaaggatattagaatttttcattttttgggctctatcctagtactggagcaaaaccagatgactgaaaaatcgagagaaagactagtaaatgggacaggatagcatttacattgtgacttattcacaatgagaaaaatgctgtaattgctgacttggcaaaatggaatttgttgaagtactgtttttctgaagaatagtaatttacagaactttgaggaaagatttctaaaacttagtgtggttcaatgctagggtgtttttaggcattttaaacaggcgtgcctataaccatgcattattaagcttttaacacctattacaggctagtaaagcttttgttttgagaggataagcatatatctcttcgggttttgaggtgttcaaaatgccattcagcattaggaatttgaaggtttgtttcctattagtattgacctgcataattcttacctgcctcctttctcttcccggaccttcctaatttgaagaggtgatttggatttcttttctctacattattttcaacaggagatacttagagagcc

SEQ ID NO: 128957 - DNA, 1026 bp, Homo sapiens
tatggtaattccgcaggatgtggtacttgcttagttacagtaagcaacagtctagtctacagaaaacttaaaagactaaatatactgctgcttggagggggatgtggattgatttttgtttttttttttttttaaaaaaaaggtggactggtactttttaaattgttttacaaggctggcttatatgttaaacaggagtttgtgttaagaatttaatatgctacactatttaataaaggaggaggcatcttttattctgagaattcggccgtgcattgaggacaaactagggaattcagcttcacaagaacaggtttcagacattgacgttactacaagtccaaaagggaaaggtgacagacctcagaatgacagggaactgaggcctaataggaaatatagccaaaaacgtggatttccctcaaaggtatactttacaatattaacttgggaagtctctaaatgagcacttcttctgttcatatttcctcttctttatttgcttttctgttgttgctattactcttacatattaattgttaatatagttgtcatactgtaatttgctttagtaaaattctgtcccttactgttttttttctactttgttatatacctctccatggattatagcttacagctgtttttaatttatattaacaaaggttttgaaatgtaatttattcccttttttataaattgcgagtataatttataacacgttcttaaaccttgaccatcagtcagttgccctttgtttctgatatttgtgtttattaatttagatggggccaggcgtggtaattctagcactttggaagactgaggtgggcggatcacctgaggtcaggggtttgggaccatcctggccaacatggcgaaaccctgtctctactaaaaatacaaaaattagctgggcacggtggcgcacgcctgtaatcccagctactcaggaggctgaggcaggagaatcgcttcaacctaggaggtgtaggttgccgtgagccactgcactccagcatgggt

SEQ ID NO: 128958 - DNA, 1455 bp, Homo sapiens
tgtaatctcagctactcaggaggctgaggcaggagaattgcttgaaccctggaggcggaggttgcagcgagccgagatcctgccactgtactccagcttgggtgacagaacgagactctgtctcaaaaaaaaaaaaaaaagagtttgaataaaaataccatttataaaagtgcatgtatctgttggcaggagcaaagtactattttagtaattgagtataggtaagactaatttcatatgttttattactggtttattacctaggactacactttcccattttgtggctattttatgggtttgttgtattttttttttttttttggtgtgtgtggctatttacaaatggtaaaacttcacctctagtattttggcagtttttttattttttctggttcctacaagaatttgagagcacagtttgaaattagttatgggaatcttattatatcaaatatcaagtaaaatgtgccccagttcaccagtagagtgaataaagtagctgattattttaaaaactagtggcattggagaagagcaaataaacatgaagcataataggtaaccattggaattttattctctttaatccttctgaatagtgacaagcgaaatttaagagttaacagttaatgcagtatctgccagttctttttttcttaaggcattacatataatttaaaaaccactttgctgtttttaggtttctttgaataatatccttataagtgattattattcttttttgaattctcttcttggcatttatttcattttgactttcttgattcttaaggctgtctcgttgttctgttagtattctatttgtaaaaacattttaatttcttcaggggaaaaaatcttaattctcaccacctgtgtttatttttttctctactctgcaggaactgtcattcttaccaccccacccctgtttcctccttagaatcttttcaaaatgtagtattctgttagaatagtggaaaacacagttgagggtcttacatgcgattcaaggttgaaagcaaccttgagacttaacgcatgatatgaaatgattgatattctagagctgcctaccaagggcacattccactttatgaaatattttaagacatgatgacatcttgtataagatgtcagaagaaggcaaaagaaagccttctacgagtagccatgcgttcattgttttcctatactcatggcccccaacttaatctcacctcttaaaatttataagctttctttgtaccttgtacctgtgttttgccattattttcatcattgctagttatttcgtgtgagattgccctgtcttttaaaccagctatggttcttcagacatgatgtcttatacttctgtatttagaacccagcacataatttggagcagatagtatgacgtaaagaagactagagcctaagaacctgatttcccttaactgtgacactgga

SEQ ID NO: 128959 - DNA, 1009 bp, Homo sapiens
gctttgctagaggagtatttgatcaacctagagagattttgttttaccccttccattgatatctgtacctatttgatttggttttacattttaccgttgactttgatgaaatcattataaaattatttttgctgcattctgagagggctagctattgataattatccctacccttcaaagttgtttttttcctaatgatgtaaactgtctggaaataagccagactaggatgaatttccacggaaatggatgtaaatatttacaaggtaactccccttatataggataggagagaactgagtaaacagtacttaatttgttaaaagtttcagtttattagaggttcaagacaacagaaaaacctctaataaatattggcttaccaagatccaggtaggctatttgtttcccatgctcatgaagtctagagatagtctaggatagagaggcactgactaggcacctctgatgtttacatgaaataatctaattatagccaacttcctatttgatcataactttcttgaatatttaactctttgccatgtacttatttgtttacttattaattttatggatttccaagtcacagtgtaaaatattaccacagttactcatgctcattcacaatactgatgagttctacttggggaggtaaagaaatttttatatagtattgtaaaggatgtcacccagaagggagtttctcttgagcccatctgcatgctccataatttctctgggaatcaaatgtacatagcaagtgtagatcagtgcatttttactttcaaaagaaatctttgaacttctttgctctctttagtcatttatttgaaatttacataacccgacaaaaatttgttagcagtacaaatttaaaattgactaagtgaaacaaaagtgaaatattttatgtaaatattaggtaaaatcgttcaacttttaaaataaaagactttttaaaaggtaaatcggtgatgaaaaatacaattacggtatacgtttcgat

SEQ ID NO: 128960 - DNA, 1023 bp, Homo sapiens
gcagtctcagctcactgcaatctctacctcctgagttcaagcgattctcttgcctcagcctcctgagtagctgggataacaggcgcacaccgccacacccggctaatttttgtatttttagtagagatggggtttcatatgttggtcaggctggtctcaaactcctgaccttgtgatctgcccacctcggcctcccgaagtgctaggattacaagactttcaggtcattaacccagtataatgtgctccttttctgtaggggcctagattcttcagtgtgtgtgtgtgtgtgtgtgtgtgtgtgtgtgtgtgtgtccatgtgtccgtgtccctcttggccttttatgttttgtatatctttttcttttccttttgttcattcctcttcctgctgagccattgattatgtagctttttactgtgaaattacctcttaagtggcaggctatatatatatctctgtgtcatcattctgttcttactcttttttcttgatgtctactaaaactatatttagggttgtatatttaataatttgttatcaatgtgtatactttgccattgataattgaaaccgcaacatggattttaatagtcagatacaagtattgttggtcttattttccaggccagagatcctcagcaggagcctatggaagagatagaaaatttgaagaaacaacatgatttattaaaaagaatgttacaacagcaggagcaactaagagctctacagggacggcaggctgcacttctagctctgcaacataaagcagagcaagctattgcagtgatggatgattctggtatgtcacagtctgagaatattctttttgtaaggaagactcatacataattgtattgcagggtggatgctgattattacataatcagatcttgattgttgtctagtttagaaaccttcatatgaggcttatactttcctgtgcttttctctggttatgcagaaaaggttgcagggacaactggccatcatactataccatgcagatagccagatct

SEQ ID NO: 128961 - DNA, 1007 bp, Homo sapiens
tcaaagagtgtccctttcaccatttaactaacaagttacatataattactgtaatttctttcttctcagcatagagttttgactagacatataggattctatatagccttgaaattctcagttctcagtggaaaaaaggtagtgttttcctttaaaacagaagcaatttataactaattgtcttttttctttatcttttttttttttttgagacaggatcttgctctgtcacccaggctggaatacagtgggcgtgatcttggctcactgcagcctctgcctcgcaggttcaagtgattctctcaccccagcctcctgaatagctaggaatacaggcgtgctgtaccacgccgggctaatttttgtagttttgtagagatggggtctcactgtggtgcccaggctggtcttgaactcctgcgctcaagtgatctgcccaccttggccttccaaagtgttggaattacaggtgtgagacactgtacctggccaccaatgtctgttttagagttggagagttagaagtcaggttaaggatggagttatttgttagtagaacagtgactatcatgaaaattgttgtcacaaaactgctttatgaatatgggggcattttttttaaattaagaagataaaaaccacagtcttttagtatgacttgtatcacaaacagccacttcaataaattatccattttactgcaggggtcagcaaactatggtcagctgagtttggctcattgcctgaaataaagttttagggaacacagccatgcccttttgtttacattgtctgtggttgcttttaccttgtaaaagcagagttgggtggtcgagacaaaaactgtatttcccacaaagtttaacatatttactatttcaacctttaagcaaagtttgccagcccctctaccggagaattgattctattcaagaacatggagattgaaacctgtcagaatcagctgtgcttttttacactatcactttccctttcactcctcactg

SEQ ID NO: 128962 - DNA, 1091 bp, Homo sapiens
atagtgtttatattgtattaggtattataagtagtctagagctgatctgaagtatataggaggatgtgtgtagattatgtgcagatactacaccattttatataagggatttgggtatctgttgtttttggtgtccccaggggtccttgaaccaatccctcatggatactgagggatgacttcatatgttaatagtggcatatcaggaaaccgtatttaatttgggaatagtaagggtatatacttacctaccagcacagcctagcaaatatttctttctctttataaagaatatttatgcatttaaaaaatgagaatgcatttaattgcgttagtcttaattcttcttttttgttgtttttttttaataagcctccagctgttccagacaatagaagacaggcagaaagtctttcattaactagggaggtttcccagagcaggaaaccatcagcttcagaacgtttacctgatgagaaagtcgaactttttagcaaaatgagagtgctacaggaaaagaaacaaaaaatggacaaattgcttggagaacttcatacacttcgagatcagcatcttaacaattcatcatgtgagtaaatctggttcagcagtattgggtataagacacacaagtatatatactgtcacataataaatttagtatttggtgaatgaacacatagctcctcaaaaatatttgtagggacttaagacttgcatatgaaaagtttctaagttgcaagccaatatatatgaaagccaaataggtgataaatcagttttataattcagaaaagggaaagaataaagttggaccttgaaaaattagtaggattttaataagggaaaggtagaagagaaggcaactgtttgatacgtggacatattaatactttgtttcttaacattcaaaattttcccttaaagaaaagttaatccagttagtactttgatttaaaaacccaaaactgtgaaacatagtgtgtattaaaaaaaacaaaaaacaaaactatgaaaaacttttatatatggtttagtctagagagcccagaacttccaactgctggatttatattcatttttaaaaaata

SEQ ID NO: 128963 - DNA, 1988 bp, Homo sapiens
aactaagatgtgtggctgggtgtggtggctcacgcctgtaatcccagcaccttgggaggctgaggcgggtggatcacctgaggtcgggagttcgagaccagcctgaccaacatggagaaaccccgtctctactaaaagtacaaaagtagccaggtgtggtggtacatgcctgtaatctcagctactccggaggctgaggtaggagaatcgcttgaatctgggaggcggaggttgtggtgagccaagatcgtgccattgcactccagcctgggcaacaaaagtgaaactccatctcaaaaaaaaaaaaaaagaaaagaaaaaaacaacttaacatgtgaaagttgcgcttaagtccttgtcgtcagttttgtatgcataaagtagcactccgtatactgatgactcttaaagcctatttttttcctcactgggaagcagtgtgagagcagcagcaaaaggtagactcgtcaaggaatagaatgaggagactgctggaaaccacctacaggaattgtggtactaaagtgagcaacaaataatgatggttcctttgagaaagatactggtaaatgacagcacctttgaaatggtaggaggtagagaagtgcaaagattcttaatctttaattcctcttgaaagcatgatttatatttgatagtaacagaagttaaatagaaagtaattaaatttagttcaaggaccatagaggattagccattatctaaatagcaggtttttattgctgtttaatatttcatggtttgaggtaccacagtcacttttaacacttttctttctctcctggagcaagaaaagttccttcttggtgtccagatgtgacatccccctgatctgtgggtatgaaaaactgatgaagacctaatcagctacagctaccctgtaaagattacagattgagtactgcacatgattcatagtggccctgtttaacttaacctagaaccaagtttatcaagttagttaccaagtttactcgttagttaaaactaactagagtacttctctagttagttttccaaggtagaatatcattattcttgtcaatttccatcttttttctttcctttctgttttaacccagtggttatattgtaaaggtgatagaacctgtggaagaaagaggtaaacaagtctttgtacattttgatgtgtttaattgtggagtaagttaataaacaattttctgaaatttaaatctgcagaaattaagttgttaatttttactttttagttttcaatatccaagccaactgtatgtgtttgtttatggtaactggtgattaaaaaaaattttttgttgttgtgccttcttcagcctctccacaaaggagtgtcgatcagagaagtacttcagctccctctgcttctgtaggcttggcaccggttgtcaatggagaatccaatagcctcacatcatctgttccttatcctactgcttctctagtatctcagaatgagagtgaaaacgaaggccacctcaatccatctgaaaaactccagtaaaacatttataatcattgtttacatgaagttaaataatagggataaattctgtttttttttttatgttgaaaattctgcaaaacgagatttatttaatattgttgtaaacattcttaagggataggtagaagaggcgtgtgtgtgttgtgtgggcataatttgagttgtctaagagatgtgatgtaacatagtttctgtgaactgatgttactttcttgtttttcaaataaaggatcaaaaataagattacagttaaaatatttctatattcagatggtttagagaccaggctgtagaatcagacagccctgaaattgtatcacacaaggctgtgttaccctgtacaaataacttagccttactaagcctgtatttcctcatctgcaaaatagggatgataatatacctgttgataaatatgttttcattaaaaaacgttggcgcagttcctggcacttacagt

SEQ ID NO: 128964 - DNA, 2077 bp, Homo sapiens
agaactcagctaacttaatttttatttttggtaaacgtagtatgtagtgtatagatctcatatgtgcagacaaatcaagaaccttccatacatgctcagtaatgtctgtatacctgattttcctgagaggtagtatttagtagtacttcacacttttgatacttgagaaactagaaatctttttgacatcaggttttctgctattaacatttacacctgcttaaaatgaacaattaaattgaaattggttttcttacacttttgtccctaaaacagcataagaaaataatgtgagattttgagtaagctgtacttggcattaacctcattattttacagtcataccccctggagagttcactaggtggatattccattaggtctaaattttgtttctgttagctgctatgatatgaaaataatgtctgtattattttgctaaaatgggtgtaaatcgtatacataaattttttgtttatcaggaagttaaatgaagttcgaaagagattgaatgagctaagagaattagttcattattatgaacaaacgtcagacatgatgacagatgctgtgaatgaaaacaggaaagatgaagaaactgaagagtcagaatatgattctgagcatgaaaattccgagcctgttactaacattcggtaagaacttttctggggatgtttttccagcatattcattctgtcttgatacttataatgtgggaacaaaaatacttcgttgtagtatttactatttgccttttatttaagctttctactattttggtcagtgtaatcatctctgccctgtgaagaaagatgaatagggaagtatggagtacaatagttcagtaaatttgccctttgttagactgaattcgagtaaatcatgagatgtatctaacttagcattttgctgtctttttctttttaggcgtaattttcattttttcagatgtttttctacttaaatagcacatatgcagaagttaatgaaaagcaggagtcgattattcaatttgaatttaaatggaatagccaacaatgtgcttggtttggtgttattttattagcagttctaaacttggatttctttctctctttttttgtgccttaaatgacttcaggctgttttctttcttctagaaatccacaagtagcttccacttggaatgaagtaaatagtcatagtaatgcacagtgtgtttctaataatagagatgggcgaacagttaattctaattgtgaaattaacaacagatctgctgccaacataagggctctaaacatgcctccttctttaggtatgactgactgtatttacatataattttgctgtgttattcttacaaagtgggttttcgttcatgtgtgctctttcctttaaaagttactggttttaattatacatgttttcagcagattgtcgatataatagagaaggggaacaggagattcatgttgcacaaggtgaagatgatgaggaggaggaggaagaagcagaagaggagggagtcagtggagcttcattatctagtcacaggagcagtctggttgatgagcatccagaagatgctgaatttgaacagaagatcaaccgacttatggctgcaaaacagaaacttagacagttacaagatcttgttgctatggtacaggtaaatattgcttggtcttttaaaaacctatttgtcaaatagtacagtcttaagtaaaatttgtgtatgataattactttggtttaattatactaatacacatttatgtatcatatgtgaggtttaaatttttagcactttacatgctgtatgtcagaggtcagcaacctttttaaattaagagtgagttggttagatagttgcggctttgtggcgatatagtatctgtcacaatttcacaatgcaaaagcagccatacataatacataaatgagaatgattatttgccaatatagctttattttattataaacaatatagctgtttttatttacaaaaacagaagaggttttgttgtttttgttgttttgctgacaactctggccttatattatgtacaacttgcagcatctcaatgaggta

SEQ ID NO: 128965 - DNA, 3363 bp, Homo sapiens
cttcaggcacccgccaccatgcctggctaattttttgtatttttggtagagacagggtttcacagtgttagccaggatggtttcgatctcctgacctcgtgattcgcccgtctcagcctcccaaagtgctgggattacaggcgcgagaaactactcttttttttctagtattaaggtgacagaattatatctagtaattttgtgattaatgaagtggatgaactaatgaagagttggggttatacgtttacagtgtaaaagacagcacataggaattgactcattattttcattcttactgggctggctggccatagattcagaacatgtgtactcataactgtttattatgttaaaatattctgatttgacttttgcagttatggaccagcatttccatcttttactggcctgaaataatataataaaatctttaagccaccataagatatctaaggaaaataactgtatgtggtttaaagagtaagttgtatatacttttgcttattaactaggatcttatacatgggtcttgagattgaacagaaaataagatatctttggtgatatcaaataatcagttaataatatgggaaggggataataattccttctgatattttcccagagtttattggctagcttttttttttttttttttttttttgagacggagtctcgctctgtggcccaggtgggagtgcagtggtgcaatctcggctcactgcaagctccacctcctgggttcacgccattctcctgcctcagcctcccgagtagctgggactacaggtgcccgccaccacgcccggctaatttttttgtatttttagtagagacggggtttcaccgtgttagccaagatggtctcagtctcctgccgtcgtgatccgcccgcctcggcctcctgaagtgttgggattacaggcgtgagccaccgctcccggcctattggctagctttatcttcagttaggttgtgttttcaaagaaaggaaaacagggcaactgtgttcattttctaaacccttgcctttcctactgtatctaatcctttttctctccttatctccaatctaaataatgtctagagaaatatgttgcaaaggtgggttaagtatacaaaattttccattatgttttatccctgttgtttctgttgtttctgagggcttgtgtttgttaacctcagcttgtgttttcatctttgttttcttatttcatgttatcttcggatgatgatggaagtcagggtctgatagcagattaaatatggcactagagccttagtgccatatttaaagtaactgcttttatgaaattaatataattgctttaattcctcataacgttttttgtgaattcctttttagctgtcagctgctagtgtgggtaactgtcccaccaaaaaatatatgccagctgttacttcaaccccaactgttaatcaacacgagaccagtacaagcaaatctgtttttgagcctgaagattcttcaatagtagataatgaggtattgtaaattgtactctcttgttcctgagttagtcttttgttttcctttttttttcttcaataaggcacatctcaagaaaggaaactgaatatccttgaaacatgtttgtaaatagtagtctgctttgtgccttttttagtagacacaaaaatgtaatagattataataatataagaaagataaaacattttaatttttaaactttaattgaaaagttttaaataattttttctaaaaagtaattatcttttaaaaatatccatgttctttgttagtaaatatttggcagaaatatataggggggtagttgcagcaaatagtaatcatttcagttagaaagacctatcctttgacattttatttatatgtggtttgtagaaaatataatttttcctaaataatttctgaagtatatttgagttctacttgtttctattaataggccatgtgcggtgactcacacctataatcccagcactttgggaggctgaggtgggcagatcatgaggtcaggtattcaagaccagcctggtcaacgtggtgaaaccctatctctactaaaaaatacaaaaaaaattagctaggtgtagtggtgggcgcctgtaatcccagctactcaggaggctgaggcaggataatcacttgaacctgggaggcagaggttgcagtgagccgagatcacaccactgcactccagcccagatgacagagtgagactctgtctcaaaaaaaaaaaaaaattggctgatttttttgtaatcataactatattattattttaaccttcatggacatgttagtgtgaaaaggagagaatgagaatagaaacctttgttgatactgacaatactagtagtcttttactcttttaggctacagcaaatccaaatatttatttaactctggtttcttaaaaaaaatagttgtggtcagaaatgagaagacatgaaatgttgagggaggagctgcgacagagaagaaagcagcttgaagctctgatggctgaacatcagaggaggcaaggtctagctgaaactgcatctccagtggctgtgtcattgagaagtgatggatctgagaacctatgtactcctcagcaaagtagaacagaaaagtaagagagctgcataaatcacttttctaaaaatgtcacctgccgaagattgacctgtaggctaggcagccacatttctcctctacatcacagcacaaatctgctatttcagtgaggctactgtttaactaccacctttgtgacccagtttaattgaatccagccactttctgttctgacttctcgtagcatcagctttctcttttgtcttaaattactatggcacttgatcaaatggtgatacagattttcttatgtgtataagccttattagttaagtttataaaaagaaaatgcttgatattttgtagtgcttttctgtcaggccagaaataggcccttttttgcttaaattgagtatctgctgtttgtaaggttcttaaggatcttaaaacattttattataatcatttagtttttaggatttcagtttaaaatgtccatatttagaatatttctaaaagagttggtcatctataagatcagtgaattatttagctatatagtagtaaccatatcaaaaattttgaaatatagatttgtttatgaccttcccttttgatatcctcagatggcatttctggaatttctggagttttgcaccaagccctactctcttctcagatgaacttctattcttggggtcccaatatgcattttactgatcagactatatctacaatattttattctgttctgggtactacacgtctgttcttctacagagttcttc

SEQ ID NO: 128966 - DNA, 1888 bp, Homo sapiens
ctgcttggtccccacgttacccacacttctgtgcaacatggctagaaatttgggagttcttacaatccccttcaggtttatttgctagaacaactcacgaaatacaggaaaagacttacttacgtttcctcatttcttataaaggattctgaactgccaaatggaagaggtgtgttaggacagtgtgtgggttggggaggtgtgcagagcttccatggtttcctctgtgtgtcccaccctccccagcactttgatgtgttcagtgacccagaagctgcctgaattctgtttacggttttttaggagatttcattgcttaagcgcaattgataaaattgttgactgttggtgattgttctcattagcaaaaattcacatctggttgaaaggggcttgttacggataacaaaagacattatcacttgggagattccaagggttttaggagctctgtgctaggaaccaggcacaaagaacagatagatattttattataccacaagaatgttgttccagtagatccaggtaaactggatcagtcttcactcctgctgttgagaattaagcaaaaataacaaattgtagatagtgaaaagagtctgccaacaaagatgttattacattgttactaataattataactgaaaatttcttcatgaataacagatggtgaagtagatacagtagctccacttgatgaaatactatgtggttgaacttaaagcgtgaagaatggaaaactacttgtgacataataaatatttttattttgcagaatacttaattatatggacactgctgtgtaaaaacatacatgaaaaagactggagactaatgaaaactaataattgtacaaagctaaagatctggacttctcccccctctatattttttaatactttgtatgttcttttaatttaaaacagaatattggcccataggcctgagtatcagagtttattgctgtattttaaaaaccaaattattatgtatgatgacttaatgctttcaatcttgtgttaggtggaagaacaattgccctttttcggcagatgaaaattatcgtcctttagccaagacaaggcaacagaatatcagcatgcaacggcaagaaaaccttcgttgggtgtcagagctctcttacgtagaagagaaagaacaatggcaagaacaaatcaatcagctaaagaaacagcttgattttagtgtcagtatttgtcagactttgatgcaagaccagcaggtaaaatttgctatgaaagtatatttttcgtctatttttataacttctgaagcaatacaaatttttctcaagtcatcagtaactattaacaaacattttctttcaatagactctatcttgtctgctacaaactcttctcacgggtccttacagtgttatgcccagcaatgttgcatctcctcaagtacacttcataatgcaccagttgaaccagtgctatactcagctaacatggcaacagaataatgttcagaggtaatctgtttcttagaagtattgagactgtataagagctaacattgagcagaggttttacagttagcttctgggagaaaagagcaagaccaaattgcatatttggacattctctttcccttgagaattttataagtggtgatttacctaatgtttccttttaataccatggatttctgtttttataaatttatgttattgaattttacttatattttggcagattttatggtgtgtaaattgtaccacagtgaagctataaacaaacaaaaaagtgattttcttacagttttaccgactgtcggacagaagtactaagttcatttcttgttccagagggaaagttattgaattaagccttatagagcaagcacgtatttgttacagtat

SEQ ID NO: 128967 - DNA, 1050 bp, Homo sapiens
actggaggcacatgccactgtgcctggctcatttttaaaattttttttagagacggggtctcaccaacttgtctgggctggtcttgaactcctgggctcaagcattcctcctgcctccgccttccaaagtgctggagttacaggcatgagccactgcagctagcctgatttttctttcccactgttttccattgctaatgctagatctttgataaggaacttttgccagtaaaagtggtttagtgagatgggtccagaattaaaactaatttactaccttagcttatgtgatatttgcatatttaatgtgtatttttgtgaaaacatttttatagcctgttgacaattttattcacctaaatctactcgagtagactataaattcagtgtatttggagtttttgtaaactatagttgttaacttataaaaacttgttttcattggtaaggaataaaaaactgcctgaagaggaggtggaaagcagtaggacaccatggttatatgaacaagaaggtgaagtagagaaaccatttatcaagactggattttcagtgtctgtagaaaaatctacaagtagtaaccgcaaaaatcaattagatacaaacggaagaagacgccagtttgatgaagaatcactggaaagctttagcagtatgcctgatccagtagatccaacaacagtgactaaaacattcaagacaagaaaagcgtctgcacaggccagcctggcatctaaagataaaactcccaagtcaaaaagtaagaagaggaattctactcagctgaaaagcagagttaaaaacatcagtaagtgttgaaatttgttgaatgttgatcagtgtaaattttggtaatcttactttgacatgttgacatagatatagtttcagtaaggctagatgtgcaggtgctgttctagacttagttgaacagtcatttttagttacctttatatatataatttttttttacaaaataatattcgaaatagggtttaattttctggattaatgttgtaaaacatggcatttattttttgtacttcttaa

SEQ ID NO: 128968 - DNA, 2109 bp, Homo sapiens
ctataatggatatttgtatatatcggatgtgattcttatgtctcctaatattaaaaattgctaacttggaattctagtagagatttggggtcatgtaaggtctgccatatacttcgaattggaatatactcattaagatgagtatcaaagaacagtgaaggttagatttattactgttagctcatgcttccaaagggtattgcaaagatacctccaagacatatttactgttttgtattctatttataccaggccttcctagcattgtaaattgagttacctgtactgttacacaatggaaaccgatttcccttttagtttgagttagttgcaactgataacagttgtcactttttttactcaagggtatgaaagtgccagtatgtctagcacatgtgaaccttgcaaaagtaggaacagacattcagcccagactgaagagcctgttcaagcaaaagtattcagcagaaagaatcatgagcaactggaaaaaataataaaatgtaataggtctacagaaatatcttcaggtatgttcttttttggtttgcattaatataaggaggttttcagcttagatttgaaaagctataataaagcaggtgttaaaattggtgtttcacacgtatctatcatgtggaaggttttatagtggaaattatagtacacattccttgatactgaaaaataaaaactgaaaatattttgtgttatactatttaatagttttggacacattttaataaaattctaaacaaaggatagttacaattgtggaactcttcaaattctgaaaatcttatctgattaagaattagatatgaaatcatgtcatctcctgcttcaatcctttggcttactgtgcctacaggataaagtctgaatgccttcatggaacgtacatggccatcagggatttggttccttcctgcctctccagactcatttctcaacacactctgccttgaacttttttctttctgtggcactgaactggagtttttgtatagctatcacattctttcttaccttggtagctgtttttctatctcaagtcctttctgccttttttgtaagttcgtttctctgctggactcttaatacaattttaattctgaaactccattctaatccaagctaggatagtttcccctttctcctgttttccttgtagcttgtgtaaacctattttgttgccttaatcacattattatagtatttccctgtttgtcacttttttgagtcccttggcagcagataaaagcaccagtagtttcctaatttgtaaagagcatctcaaagaaatatggagagagagaggcaataacatgacattagactatagtggatagaccttaatctagtagctttcattgacattagtataaaatgcatgcgttttttgtttaaaaatgataacagcagctatcttttgtaccatgctccattattttcaaattaccaacaaatctcatttgagcctcataatgctgagttggttttatttccatttttcggaggaaacatggtcaaagagggaacttttttttgttttgtttttcagtactcataaaggctcagtaatgtaaactggtacaactttcctggaaagcttcagaagtcatgcccttaatccagtaattgtacttgtagtaatccatcctaagaagacaaaaggggaaaaaaaaaaaagacattaagatttagtgttgtctcaacagtatggtttcaactatgtataaacaaaaatttgaaagcaaaaaggccggaagaaaatgcatcaaaatgttaatagtggttttatcatctttaaactcataatgagcatttatcattttgtaatcagaaaagaaacatcacatttgtttgcattttgaaatgaatttctcaagcttacattgctaggaaatggtaaagctgaacttagaagctgggcttctgttaagtctgtgttcctttctgcaaaaatatcaatcctattcttctgaacccagaattttactaaaattttataattttcatctccttttactctctaccaaatagtgatatcttcaaaaaataaacagtccggtagaggtcgaagaaggacactaaactgaaagtctt

SEQ ID NO: 128969 - DNA, 1961 bp, Homo sapiens
aaacctgattaagattagggatttttccagccaaagctaataaatttcagttcaggaggagaaactggcataaactttccacctcttgactgcagaagtggtgggggaatgaagcttgtgtttaaatggcatattcattatttgagaataatttaatttttaatgatacgcaatttagattgataattttatcacatacagaggtattaaatatgtcattaaacagttatagctttgaaatgaattttttaaattaagtatgattaaactgcaatatagtatataagataaaagtttgcatatcaaaattctttttacctggatttttcccattagaagagattgcttacagagataattttggttcctgcttattataataagtgtcatttttgtgatagttcataccttaaaactacgagaactttagtgtatcacttgattttatacctgtaactgaggcaaaatagggaagttgcatatttattgttacatataattaatatatttttctattgatatcttatattagtaatgttattatttcatgcttgtggaaattgagacctgaagatattaaattattagccaagtagtggaaaatttttctattagagcacattctttttccattttcttattcctctcacaaaaatgagtttttatgatcttgtatacttctttgaaagcgcaatgtattaagatactcaacattttaaatggatacctttgagtgtaataattttgtgttatcaacaagtaaatttagccgaattgtagctaaataatagagtgatgcctagattctgtgaaactgaaaacttcagttggatcacttgcctgctccaatatacactgagtatgtaaataagacacaatggtgaaattgacctattatgttaggttacagatttggttactcatcatcacagcacttttctgtgtgatgtatgagatttgataattagtagactatactggatagaccttaatctagtagctttcattggcagcattcagtttattctttttaacattaacaaaatatacaaacttccttttctgtaatgaagtccatattagcaaaagcaaaaaagaaattagcacttagcttatttctaagtgttgaaagattttcactgatttttcctataaaatgtataatattttctgtatattttatatgatcagaaataaacatggttcttagtaatgctaggtaatgttattcattaaagtttcatttttagtataaaatgcatatcttgatattttaagattttatttatcttggtaatattaagcttcttttctactttaaaagctctgaaatagaattgtctaaaatagaatttttagataatttaaagctgagagtaatgatactagctaataaaagttgtcatgaaggtacttcatcaatattaactttctggtcttttatgtattccagaaactgggagtgatttttccatgtttgaagctttgcgagatactatttattctgaagtagctacattaatttctcaaaatgaatctcgtccacattttcttattgaactcttccatgagctgcagctactaaacacagactacttgagacagagggctttatatgcattgcaggtatctggtacctaacataatttttcctaccctattatcaccttcttcatgattatctctggttgctgtcttagactgaagcatgtgccatatgaattttcatctgttctctatgtgctttcttgacattttatttaaaatttttgtatagcttaagtagcattaaagtattttttttgagtactttttcagtgttttgtctacttcctcacacttaacctgtgagggtagaaacagtacatttttccttccatctgcttttatttttgaatctgtaatataaatgaatgattaagcatgtatgttttatataaatgatgatcttattttcttat

SEQ ID NO: 128970 - DNA, 1034 bp, Homo sapiens
tcaaactgtacatttaaagtgagtgcattgtatattaattatatttcaataaagtttattttttaaaaatgcaaatgatgttgtgatgttttcttttctgatgtgagacaaccaggtagagtaagctactagacattgttagcatttggagataggagaatgtccctgagagtatagaaataatgtaaaatgttaactttgccaaattagaatttaatcagtagctgtctttgtgtgtgtttatctacataataaatattctgcaaggctacttatatcactgttctctgtgactctgtattcagcgtttaataactttggttatattatcatcttgtttggacagaatactgaggaaacttatgaatatcttttaagtgtacaattttatgtaaatacttagttatctctgttagattattaatatgaaattcttagaagtattagtgatttttgtttgttttactgtaacttaggaaacttttgagaagaactttgaaagagaaacccataaaataagtgagcaaaatgatgctgataatgctagtgtcctgtctgtatcatcaaattttgagccttttgcaacagatgatctaggtaagcagaattgtttataatcttagaaacaactttaagttgatctggtccagtctttgaattggcgttgataaggaaacaagtctagaaaggcgaagtgtgtgtggttgaaagaatgtggacttaattatctatcagtctaaaatcaagaatcttctgactcttaaccctgtgagcaaatcatccaacatttttgactctgcatatactaaggaaatgggaattttaacctaccttgctatgttcttgtgaaaatataatgtaacttacttgcttgagttcagaaaatgttaatttccttttccttaaaggaaaggtcatcgtttaaggtcatctagttaattcatgggaacaattcaggcctcatctaatcatatttttaataaaaatattaactttgtaatttgagttaagcagtcagttttcttaaataacct

SEQ ID NO: 128971 - DNA, 1085 bp, Homo sapiens
agtagacatagaattgggaaatttcattgataggcctttttcttacctaatttgcttgttttaggttgcgttgttttcatcagaatttgcatgacattttggaattcacttgtattgtttaaatgaaacaacaaaatgaaataaatatgggcttcagagtttgataactaagtttaaatccttgttcctacattgaactgtctgtgaaagcttgagcaagttacttaaattttctgcaaatgaaagtaatgtcatctactatataggattattttaaggattaaataagtgtgacaatgtatatgaagtgctcaagtagtatagtgtgtagaacttgttaaagctaattttcctcccttttgtttggacatttttttattaatgcattttgaggaatatatgaaaaagttcacttttacatactcaaaaaatatttttgttccaaatgtaggtaacaccgtgattcacttagatcaagcattagccagaatgagagaatatgagcgtatgaagactgaggctgaaagtaactcaaatatgagatgcacctgcaggattattgaggatggagatggtgctggtgcaggtactacagttaataatttagaaggtatatatttttgttttcggtaggtttttggagaacaggtggtgtttggttacatgaataagttctttagtggtgatttctgagattttggtgcacccatcgcctgagcagtatacactgtacccagtgtgtattgtttgatccctcacccccttcccaccctttcccctgaaaccccaaagtccactgtatcctgcttatgtctttgcatactcatagcttagctaccacttatgagtgagaacatgcaacgtttggttttccattcctaagttacatcacttagattaacggtctccaactctacccagatggctgcaaatgccattactttgttcctttttatggctaagtagtatgctgtggtgtataaataaataaacaaatatatctgtctatctacacatatatacatataccacattttctttatccgctcgttgattgatggacatttggactggttccatatttt

SEQ ID NO: 128972 - DNA, 1049 bp, Homo sapiens
tcacactctgtgggttgtctgtttactcagatgattatttcttttgccgtgcagaaactttttagtttaagttccatctgtttatctttgtttttgttgcatttgcttttgggttcttggtcatgaagtctttgcctaagccagtgtctataagggtgtctccaatgttatcttctagaatttttgtggtttcaggtattagattttgaaggtatattttttattgattacaagtaataataattctatgtaaaaaatttaaatatgtgatatctaatggtggttttattactactttattttaattgataggggtgcttaaactacaaacatgtttctttgtattatgttagcataaaatcatcaaatttaatatttttcaaatttcaacataaaggcatatatgtatatataataggctttgttaggctaatgtattttctttttaaaaattagaaactcccgttattgaaaatcgtagttcacaacaacctgtaagtgaagtttctaccatcccatgtcctagaattgatactcagcagctggaccggcaaattaaagcaattatgaaagaagtcattccttttttgaaggtaagcaattattttaaaaaataaacgaaaccttctatgttttgttttttaattcatacagaagaccttattgtgataaagttcaacggtataggtaaacaacaacaaaaaaactatcacccataattttttcaccctaccaacattctctgaacctttcagtaatattttatacacatgtgcatattctgcctttttcatttactatatcataaacttctttctagatcattatttttctgctgcattttttcaggatttatcacctttatttttagttttagtttttgtgagtgtatagtaggtgtgtatatttatggggtacatgaaatagtttgatacaggcatgcaatatgtaataatcacatcatggtaaatggggtatccatcccctcaagcatttaacctttgtgttacaaacaatccagttatactcttttagttattttaaaatgt

SEQ ID NO: 128973 - DNA, 1131 bp, Homo sapiens
tttgaagaaaaatttaaattagaatggttgtcttaagtaaaggaggaagctttaaacatgatcctatatatcaacttgaatagaactaatgtttacttttgaagaaaaatttaaattagaatggttgtcttaagtaaaggtggaagctttaaaagtattctaatggtacatttagaggtggaagattttgtcttttcctttcatagcacttagtatttattactgtagtatatattgtatctcctgtactgtcagggaactttctggtattagaaatccctgtctgaattcatttgtgcccagcagttacatcaaatagggactaaatatagatgaccatatatgttcttcccttgtgtatactctttaagcaggactagcaacattcccacttagtaatatagcagtattctttagtaatactaacaacctatctttccttagtaatcataaacattagttttaagtttttcagtacttaaaagtaatagtattttataattgaagtttactgtctttaaaaattatttggtttatctttgaataggattcactggcaaaatttgctggcagaaaactgaaagactgtggagaagatcttcttgtagagatatctgaagtgttgttcaatgaattggctttctttaagcttatgcaagatttggataataatagtataactgttaaacagagatgcaaaaggaaaatagaagcaactggagtgatacaatcttgtgccaaagaggtaaataacgttcattttgatttttaggataattgacacataaatacagttcttgatcattattattaactgaaatcacattttacctcagcaaaagtagttgtttttagtaataccagttaatcacattataagtcattacatatgctagtcacttgtggaatttgaggactaacagcagttgctaaagatcaggaatgcgggcaggaattgatgttaaatgtacattgtcagataaccagttcacattattgtcctgtattcaggtcttgaaagatgagagaaggactgggatctgatcctgggccagtgccaggtgcctgccatgtctgttattgatccctgtagattcttcgagaatatgcattacccagaggtcactccca

SEQ ID NO: 128974 - DNA, 1511 bp, Homo sapiens
ttgggaggccaaggcgggtggatcacgaggtcaagatttccagaccagcctggccaacatggtgaaaccccgtccatactaaaaatacaaaaattagccaggcgtgtgcctatagtcccagctattcaggaggctgagacaggagaattgctagaacctgggaggcagaggtggtattgagccgagatcatgccactgcattccagcctgggcaacagagctagactgtgcctcaaaaaaataaaaagcctacaaataatgcttttgaaacaatataaaattattttaacagctttcaccttaatgtttgaaagcagactgtatcatcaaatgacctttttcctgacacttttttattttaaaaataaaactagactatcaaaaatggttctttgtattttttattagataatgatcattattaatacgatagacttactatataccttttacacatgtactttaaggaattaattactcaaatatttttgtgtctaggacaaggatgaaactgaaacagttaagcagactcaaacatctgaggtgtatgatggtcccaaaaatgtaagatctgatatttctgatcaagaggaagatgaagaaagtgaaggatgtccagtgtctattagtaagtttaaaggctctgtactatctttatactttagttttttgtaggtcatttattggaacagtttggtggagtgtaacaagtataaaattaagtgtcaaagaactctgattttgaatttcactgtgaccctgactaaattatctagactttctgcactgtaagtttttaatacattctgtttgaggatttcagatactgtatataaagcatctgtgccatgcaggaatgcagtaagtggtagctattgttaagattatgtgctgaaatttactaaaaattgtgtattaatcaacttagatttgtctaaagctgaaactcaggctttaactaattatggaagtggagaagatgaaaatgaggatgaagaaatggaagaatttgaagaaggccctgtggatgtccagacttccctccaggctaacactgaagctactgaagaaaatgaacatgatgaacaggtattcccgtattgactgacacacttccatcagccttattttaactaatcaaacttccatcagccttattttaactaatcaaagtagatccttctaaatattcaggtttcatgaatgcaagcctcattaatatgcttattaaaatctgaaaaaccagtttattttttatgattgttttttagagacagggtcttgctcagtcttctgggctggagtgcagtggtgtaattgtagctcattgctcatagcctcaaactcctgagctcaagcgatcctcccacctcagcctcccaaagttctgggattacagacatgagccaccacacccatccaataatttatacgttttaaattatacactgtttttagtggtgtgattaaatttcacaccggccctctccttcctatttgggttgtgaatc

SEQ ID NO: 128975 - DNA, 2300 bp, Homo sapiens
gatatatcaaaaagcaagttaaggttcttttgggcttcactgcaggtagggcatttggggagacagccagcatattcctacaaacttctaaatgttagtatctattggtcttttctttgagatggtttagattcttcaaattagggtccttcactgtcgtcctgcctggagtgtatgagcttggctgctgatattctgaagctagattgggaatggggctgaggtcccaccgttatacaggcatgcactagattattctgttttcagtattctatttaggttggtgcaaaagtaattgtggttttggtcattttcaatagcaaaacccacaattacttctacaccagtctgatactttactgtgtcatttgtgtctccacctctactcccagtggccccaggtttggggctcactagtttaatttctctaaaatataatctgccattttctgttgaggtgggaggagagaacctacgtaggcacattttccttaaacagttttaaacaactaccaccaccgtttcatctccagctcctgccccaacatcatcatgtcttcctttctagatctgttacttacagttatgaggtgaatctcagtttttgtttcctctccctgctgaaggcatttagctttgttcatcttcctctcgtcacttcctccttcattcccttcttgtctgcattaagtgtcttttagagtctgaaaaaaaatgaacagtgcagtctgttcgttccagttgtattatactgtgtgtgtgtgtttttaaggcaacaaggaaaccctttaacttagccatcttgaaatcacaaccaaagccgcctccttgaaatagttttagaagatacttttaaatttctttgtatgaaggtcttgggttggacaaaaactacacactagtaatcatctcttttatagtgaccatatatttcaggccctgctattaaaacatttttcccttctaggtcctacaacgtgactttaaaaagacagcagaaagcaaaaatgtcccattggaacgagaagccactagtaaaagtaagaaatctaaataagtctttgattttaagataatttcctttatttgctttaaagctaaaaaaaaaaaaaaaacacacacagaaaacactaaaattcttagtttgaaagtactttggacctgatgtatgtttttcttctccctataaatcctttgtagaaaacataagaatttgtttctataaacaataaagaaaaggtgacaaatatttacctgcacagacaaaaattctgtcaagagcatcgcatctttagatacaaataatggtagatttaaaaaaaaaatctatttgtaggccttattactgaaagtcctaattttttagaaatcaggtggatttcaggaatctgagtcttaaaatgctcccaggtgattttgatcaactaaatttgggaaccattgataaggaaaatttgtagttgccttttctttttggtcttaaatatcttgattgctcttattcaggcgtattgtctttattagtataatagtaaaatttaacattttttgcattacactaatgttaagactttcttttgatgacagatgaccaaaataactgtcctgtgaaaccctgttacctcaatatcttggaagatgagcaacctttaaatagtgctgcccataaggagtcacctcctactgttgattcaactcaacagcctaaccctttgccgttacgtttacctgaaatggaacccttagtgcctagagtcaaagaagttaaatctgctcaggaaactcctgaaagctctctggctggaagtcctgatactgaatctccagtgttagtgaatgactatgtatgtatcatttacatttccaaatatttttacttttcatttctgtgcatatttcttcattttcagattagcattctccacatgtaaaccattttgtgtttaggtttagaacatgttggaacatttttctaattcacactttaactttagcagaagggtaatagtgaattaagatgaccatctcaaaacccacatgctgttttataattttgagaaccaaagggataaaaagatttcatcttaagttcggctctgaagtggtaatgatgcatgaatcctcctttatcctttatactacctattcttctcaactgtttagaatatattgcaaattttcaataaacttaaaggtttacacttgggataggaaataaaacagtttgacaacagaatctttatacagtgaatgataaaaaaaaaaaaaactaggaaatctgtactcatgatagtacttac

SEQ ID NO: 128976 - DNA, 1025 bp, Homo sapiens
tttttttttttttttttttgtgacaaaatggtaacagcttgacagtatgtttcacagctgtgattgtagcttttcctatgaactgcatatttctaaattattcatagagctgaatgtagaagaaaacgaaatgtgatagaattactgagaaaataattcactatttctttacatggatgactggtttggatctagagtatgtatttttttttttcattacattacaggaagcagaatctggtaatataagtcaaaagtctgatgaagaagattttgtaaaagttgaagatttaccactgaaactgacaatatattcagaggtatttagctgtctttaattaaacttgtctttacataacaaatactgttaaaatgaaaaatgatttgtatttttaattttcattccaaaggcagatctaagaaagaaaatggtagaagaagaacagaaaaaccatttatctggtgaaatatgtgaaatgcagaccgaagaattagctggaaattctgagacactaaaagaacctggtaagagttatcaatttaaatcttgccatattgaaaaatcattgaatcttcatactactattgtgttttattttttaaatatgctactactgacctgggagatttaagccaaatactagaaagaaagtgtaattctgtaagaattttagttcaactatttataaaacagtgtcagataatttttttctattcacatctttagttttaaaaaatgtagacatgctggctgggcgcggtggctcacgcctgtaatcccagcactttgggaggccaaggcgggtggatcacgaggtcaggagatggagaccatcctggctaacatggtgaaaccccgtctctactaaaaatacaaaaaatcagccaagcgcggtggcgggcgcctgtagtgccagctactcgggaggctgaggcaggagaatggcgtgaacccaggaggtggggcttgcggtgagctgagatagcgccactgcactccggcctgggtgaaagagcgagactcc

SEQ ID NO: 128977 - DNA, 1088 bp, Homo sapiens
ataatctgccctattcttgcacaggaataggacctgcaggtatctaaaagaagaacatcagacccaacagcagcaacactggcattagttggaagactggcctaatggatgggctttataacaaataatatatttctctaactaactcttaaccattgctcttctctgagcagcctaaagttatataaaacattgacttgctgtatagaattcaatataatttccaaaaaagatactttatagataagtccaaactttatttaaaactacattttaaattcgttaccaaacatcacaatggggaaaaaaatgaagacccaaaaaagaagggggaaaaaaaaaaaaacacagtgtgtcaaggcttaaatctgtccagaattcagtttctgatgttttaaactaccatggggagaaatgaccacacctatcaaaaaagcagtgtcaaactaatttacatttttatacagatcagatgtttatttagtattgttttcatatatgcattgagtatgtaaggacagagttagatgagcctctgaagacatctcatatactctgggctcccaccgtttctgaaaaacagaataaaaatgctttataaattacttatcgaattactagaatttaacattgttctctgtcattaaagcttttacttttaatataacgttattataaaagaaatcctaaattagcttgctaatacaattccctaatagcacacagtaaaaaaagaataggtgaggcgtttctgattcaacaaggcagactgagcagatacttcgtgtctctctaaaaacactccactatgaaaagaaaacaactatagaatagaataaatctacaccaacaaaagactggttgtgagaaaacagaagaggggatatcaacaaattaccagaatgctcaatgcagatggaagcatacccaatgacagtggaggaagctgcagttcaaacacttgcaagaggctgcaactgagaagggtaccatattctaacaggtagaagtgggctgaaaacagaaattaactgaaggtctgatatctgaagggtctttccttctcctcaactccatttccaggaaaa

SEQ ID NO: 128978 - DNA, 1519 bp, Homo sapiens
gttgaggagaaggaaagacccttcagatatcagaccttcagttaatttctgttttcagcccacttctacctgttagaatatggtacccttctcagttgcagcctcttgcaagtgtttgaactgcagcttcctccactgtcattgggtatgcttccatctgcattgagcattctggtaatttgttgatatcccctcttctgttttctcacaaccagtcttttgttggtgtagatttattctattctatagttgttttcttttcatagtggagtgtttttagagagacacgaagtatctgctcagtctgccttgttgaatcagaaacgcctcacctattctttttttactgtgtgctattagggaattgtattagcaagctaatttaggatttcttttataataacgttatattaaaagtaaaagctttaatgacagagaacaatgttaaattctagtaattcgataagtaatttataaagcatttttattctgtttttcagaaacggtgggagcccagagtatatgagatgtcttcagaggctcatctaactctgtccttacatactcaatgcatatatgaaaacaatactaaataaacatctgatctgtataaaaatgtaaattagtttgacactgcttttttgataggtgtggtcatttctccccatggtagtttaaaacatcagaaactgaattctggacagatttaagccttgacacactgtgtttttttttttttcccccttcttttttgggtcttcatttttttccccattgtgatgtttggtaacgaatttaaaatgtagttttaaataaagtttggacttatctataaagtatcttttttggaaattatattgaattctatacagcaagtcaatgttttatataactttaggctgctcagagaagagcaatggttaagagttagttagagaaatatattatttgttataaagcccatccattaggccagtcttccaactaatgccagtgttgctgctgttgggtctgatgttcttcttttagatacctgcaggtcctattcctgtgcaagaatagggcagattatcaagatatccaggatacctatgaagttattatagaatatttattaatccattgaaattggataataagtttagaacataggttctcagtatctagaacttacatcattatcatctgtttgttaggatttgaaattctggaaaatatttatctacatcgcctcagactaaaagtaaaaaaaataagctttatataattagggagatttctgcacagagaagtaacattgtggttaattttaaatgaaaaacttaactttttcaagtggggataaataatacaactaaatttctgtaatagtaagattctgtatgccttcagataaacttgcctattgagatggtaatttaaagccaaagcatagcagtttcttttgtgtgtagtgaggttgaagcagatttgcaggtgaagtattgaaagtttatgtgactttaagtcagcttttgaa

SEQ ID NO: 128979 - DNA, 1594 bp, Homo sapiens
ttaacaactgaaataccccataaaaaaagaacttgttgagagtatttctttaaaatggttacttgctgcccaggcaccatggctcactcctgtaatcccagcaccttgggaggccgaggcgggcagatcacgaggtcaagagattgagaccatcctgcccaacatgggggaaaccccgtctctactaaaaataaaaaaattagctgggagaggtggcacgtgcctgtagtcctagctacttgggaggctaaggcaggagaatagcctgaacccgggaggtggaggttgcaggttgcagtgagccgagatcatgccactgcactccagcctggcaacagagcgagactctgtctcaaaaaaaaaaaaaaaaaaaaaaaaaagttaacttgctgtatacctcagtgtaatgtccattcaaggagtattaaatgaggatttccctgcgaggacatttactgtattgctacttaaattatggaagacaatatatcttcaactttaataaaacctattcagaaaattaccaattcagaattcggagttcttatccaggtgctctaactaacttcagggaaattggaacaataagttatgttacatgcacactcaaattctttattttctccactttaagcaggaaagggtaaaaactgttttggtactcaagcccagccttacatactgtgtttctctctctgtctgcatgcatattaaagtggaaaaattgtatttatatcttagttattaccatagtacctatgaaccttatcaaaattgcttatttgactggtgttacagctgctattaatctaagtctattgtttttctattttagtagataatttagttttaaaatacgtagggtttgagagcagatatatttatttaatctgttttctctagtaactattgctgaagggttaggcattcagtattcctatttgtcctaattttgaagttaaaaattttggttacagatagatagagggagaaaagttcaaaatgagtgagagagaactttatgcaggttgagataatgcctaaaataatgagctggccagactgtggaggtactctttgtattttgtaacattgactttgggtaaatgctttttcactgttaataaatatatatcctgtatacaaccctgaattgtattttcttttaaattcacatgctcatttatgttttagaatttgttccacagtggtgacttgacagctttaaatgtcactttgggaggccgaggcaggcggatcacaaggtcaggagatcgagaccatcctggctaacacggtgaaaccccgtctctactaaaaatacaaaaaattagccgggcgtggtggtgtgcacctgtagtcccagctactcaggaggctgaggcaggagaatggcgtgaacccgggaggcggagcttgcagtgggccgagatggtgctactgcactcgagcctgggcgacagagcgagactccatctcaaaaacaaaaacaaaaaaaagtatatgttgaataatggtatgatagaagtcactggccacaggaagaataaacttcaaagaagtaagtttattatactcaaaggcttcagagtgg

SEQ ID NO: 128980 - DNA, 1010 bp, Homo sapiens
cctgcctcagcctcctgagtagctgggactacaggtgcacaccaccacgcccggctaattttttgtatttttagtagagacggggtttcaccgtgttagccaggatggtctcgatctcctgaccttgtgatccgcctgcctcggcctcccaaagtgacatttaaagctgtcaagtcaccactgtggaacaaattctaaaacataaatgagcatgtgaatttaaaagaaaatacaattcagggttgtatacaggatatatatttattaacagtgaaaaagcatttacccaaagtcaatgttacaaaatacaaagagtacctccacagtctggccagctcattattttaggcattatctcaacctgcataaagttctctctcactcattttgaacttttctccctctatctatctgtaaccaaaatttttaacttcaaaattaggacaaataggaatactgaatgcctaacccttcagcaatagttactagagaaaacagattaaataaatatatctgctctcaaaccctacgtattttaaaactaaattatctactaaaatagaaaaacaatagacttagattaatagcagctgtaacaccagtcaaataagcaattttgataaggttcataggtactatggtaataactaagatataaatacaatttttccactttaatatgcatgcagacagagagagaaacacagtatgtaaggctgggcttgagtaccaaaacagtttttaccctttcctgcttaaagtggagaaaataaagaatttgagtgtgcatgtaacataacttattgttccaatttccctgaagttagttagagcacctggataagaactccgaattctgaattggtaattttctgaataggttttattaaagttgaagatatattgtcttccataatttaagtagcaatacagtaaatgtcctcgcagggaaatcctcatttaatactccttgaatggacattacactgaggtatacagcaagttaactt

SEQ ID NO: 128981 - DNA, 1168 bp, Homo sapiens
tcacctgtttttgactaccctgagtctgaatcgtgctcagcttgtggggaatgcgttaagagctcctcagtctttctgtggctgtgacccaggagtacgtgaaaaatatgaatagttcagaaatttataaaaagtcactataaaacctcacacagtcattattgaagttagtctcacaaagtgaagcatagtttttgtttattggtgacaatttacaaaatacttgccagcttagcctcacatatgacagatgtgaccagcaggctccagaccacaccgagctgcatgctggccccgtctacaagcctggggaagtgtggctgggctcctcaaccttcacaacttggggaggttgctcagctcacatgaaaatcagtcctctctttttccctagggcactctgtccctcttatgttgataaagtgggtttcccagccaggtggcacaggggatgctagactggtgtgcgttgggcaattctctgtggcagttctggacatcttcaaggatgcttgtctaggcagaggacagatttgtttcctgactacggtaataaagatcatcatctacctgtagggcaaaggttggatgagttgattggagaagcagcccatcttataactcgaggggtttcctgagcttggggttcctcagctgtgatacagatgatacatcataaattgggttgtcacacatcacctccttgggggacttggggtggggggcaaatggcattcccagagcaatacagtcctttgcctttggcccaggagtctgccagcatccaggaagctgtggcaggctaggtcattagcttgcaagcagggtaaaatctcaggcccttcacagggccgcagctttggggcagctgggcagggtctaggcataccagcctccaggctgcctcccacagcccgggcttcctctggggctccttgaagggcagactgggacagtgatacggtttgggcctgtgtcctcacccaaatctcatctcgatttgtcaagggagggaccaggtggagttgattggagcatgggggtggtttcccccatgctgttctcgtgatagctagtgagctctcacgagagctgatggttttaaagtgtggtgcttcctggttctccgacttgcttctctcctgccttgtgaaggcgtcgtctcccg

SEQ ID NO: 128982 - DNA, 1343 bp, Homo sapiens
aatatatacattatataacatgctttgcatatattaagttatattatttaatattaaataacttctaaagcaaattctacaagtatagaaatgctaatatatatcagaacatctctgaattgaaaacgtccttaaagtaaaaataacttttctttcagctgaccgtatacacaaccttgatagatgttaccaaaggtcaattcgaaacttacctgcgggactgccctgacccttgtataggttggtgagcacacgtctggcctacagaatgcggcctctgagacatgaagacaccatctccatgtgaccgaacactgcagctgtctgaccttccaaagactaagactcgcggcaggttctctttgagtcaatagcttgtcttcgtccatctgttgacaaatgacagatcttttttttttccccctatcagttgatttttcttatttacagataacttctttaggggaagtaaaacagtcatctagaattcactgagttttgtttcactttgacatttggggatctggtgggcagtcgaaccatggtgaactccacctccgtggaataaatggagattcagcgtgggtgttgaatccagcacgtctgtgtgagtaacgggacagtaaacactccacattcttcagtttttcacttctacctacatatttgtatgtttttctgtataacagccttttccttctggttctaactgctgttaaaattaatatatcattatctttgctgttattgacagcgatataattttattacatatgattagagggatgagacagacattcacctgtatatttcttttaatgggcacaaaatgggcccttgcctctaaatagcactttttggggttcaagaagtaatcagtatgcaaagcaatcttttatacaataattgaagtgttccctttttcataattactctacttcccagtaaccctaaggaagttgctaacttaaaaaactgcatcccacgttctgttaatttagtaaataaacaagtcaaagacttgtggaaaataggaagtgaacccatattttaaattctcataagtagcattcatgtaataaacaggtttttagtttgttcttcagattgatagggagttttaaagaaattttagtagttactaaaattatgttactgtatttttcagaaatcaaactgcttatgaaaagtactaatagaacttgttaacctttctaaccttcacgattaactgtgaaatgtacgtcatttgtgcaagaccgtttgtccacttcattttgtataatcacagttgtgttcctgacactcaataaacagtcactggaaagagtgccagtcagcag

SEQ ID NO: 128983 - DNA, 1057 bp, Homo sapiens
aggctgttggcttctgtatttaacttactgaacaaaactattttcttgtgttttagaatatctcatttgaaaccatgtatgatgtcctgtcaacaaaacctgtcctcaacaaggtattttaaatgttatatgtatatttgccttttagggaaagaatttggccctatgttttatctttctctgttatctttgatcagtttgagcacaaaaggtgtgttcagcttaggactgattttttattaaaaaatgtttttgtgtggctaaaactgtattttggaatacaagaaagaaattgatcactgaggcttgataggtcagaatattgtttatagctttatttacatagcatttgaattaaggctagcattttactcttattggtatctattaaaaatctcacactatataactaacacctaaatgtcaacaaaacaaagtctgcagtccattttcagacagagctctgtgtcttggtgggttcgggtttcccttaaactttactacatctgtttatcttttccctacactgtagttttaaaaaaatgcaaaaagtttcctatcatcccaccactcgctaacaatcattccctgaacgttctgaatatgcccccctaattttcccatttgttccttcttttcttggtccttctccacagctctccctaaagtaaacatgccgcctttaccctgccaggacaaatccctccggcctttagcatccaggtcaccctggctctcacaggaagcctgccttcagttcacgggccctgccatacttgcgttttgcctataccatctttgagcaagtcacaatctcgtgacttgtgtttgggtgtgtgccttgtgatctgggtgcctgcagtttcccccactgtattggaaatgctttaaggatagggatagccaaagctccacggtttttactccataggacaccggcaggtctcccaggactgccagctgtgcgtcaaggagggttaaggcagtcttaaagcattgggggtggagcaatgtgctgtcaggaataagctcctataaggagctggagattctttcc

SEQ ID NO: 128984 - DNA, 1138 bp, Homo sapiens
tcgagaccagcctgggcaacagagtgagagcccatctctaaaaatagaaataaataaataacacattccttagatacttgtttttctttagtttctacagagctaaacatttccgttctaagtcatctaaaaatgtttcccaccatcatcctcagcaaactaacacaggaacagaaaaccgaacactgcatgttctcactcataagtgagagctgaacaaagagaacacgtgaacacagggaggggaacatcacgcaccagggcctgtcagggggtggggtgaaaggggagggagagcattaggacaaatacctaatgcatgtagggcttgaaacttagatgatgggttgatgggtgcagcaaaccaccatggcacgtgtgtacctatgtaacaaacctgcacgttcagcacatgtgtcccagaacttaaagtaaaatttaaaaataaatgaagttatttactaaaattaaaaaaaagtttcatttttctttttaaatgtttctatatagttatgaagaagccaagaatttattgaccaagaccaagatattggccccagcctactttatcctgggaggcaaccagtctggggaaggttgtgtgattacacgagacagaaaggaatcattggatgtatatgagtaagtaggtttgttaaagcaaaagaagtagaaacaaaagcatacactgatatactttgagttttaaggcatgtagcctaagagggaatctctccttttgtatctagactcgatgctaagcagggtagatggtatgtggtacaaacaaattatgaccgttggaaacatcccttcttccttgatgatcgcagaacgcctgcaaagatgtgtctgaaccgcaccagccaagaggtacctttgcagggtcatctatagaaagaaactgttgccattaaagattcccttggttctggcatttttctttggccttcaagtaatttataaacgtcctatttttcatagtatctctagccactctccactgatttttttgtttcgttttcttaacttaaagagcaaaattgtgctgtactttccttttctggttctaatgctggataccactctgaagttgaataacaaacaggcaagaatttaaaaaaggggaaggagagag

SEQ ID NO: 128985 - DNA, 1034 bp, Homo sapiens
ttatattgatgataagtaagtcccaagtcacacccaaaatgtgatcataagtgaagataaatggattgcttgagtgctgagacaagagggacatgctcttctattttatgtgtccatcttgacctttctgaaaaaataagaatattgtaattagcattctatgtttgaatctgaggctcactatttataagctgtgtgatattgagagagttacctgacttctctgaacctcaattttatcatttggaaaacagaataaatataccatattgtaaaggtcttgttaggattgatcgtggtgactcggtaaataaagctcctagtgtaatgcctggccctcatcatcatgttgatcattactatcactgtgtttctgaaatgtcactgaaacatgtcttttataggtggaacataaataatgatacctgggtcataactgagcaactaaaacctttaacagtgaatttggatttccaaagaaacaacaaaactgtcttcaaggcttcaagctttgctggctatgtgggcatgttaacaggattcaaaccagtaaggagtctgttgttacataattatacaggtagccttctgtcctgttaccgttatgtaaaagttgaaatctaagaatatgaggacctaaagggaatatgaagccccatttcacccccttgtacttcttgtcacttcataggtatgagatctcgtggtagagaagagtagaaaggaaacggaggtttctgagcctcttctgggataaagagcatgtggctgggtgtcaagggctgggagtcacaatctgatttctagtcctgggtcttccgctcacttaggcaagtcaggcgttcattctctgcccttcagtttcctgtccaaaaagcgttgccagtgataccccacctacttatctcacatactagaatcaaaaatgctttgaactttttaaaaagccttttatggttttgatttatttttgccttccccattacccaagctaggcctttatatcccactctgaagtacagtgagcgacaggg

SEQ ID NO: 128986 - DNA, 1706 bp, Homo sapiens
cagggagaataataattactaatatatatttcatatggtggttgtaagggttaaatgacatactgtgtataaagcatagtgcttggatgtaataagtgtttaataaatacccattacgtcacatttgtttgttaaatggctggaacattccacttggggaatgctttgagttcctagggagaaaaaaaatatgtttaggtgacattacatgtaattaccaagttggttaaaaaagtgagattcgtgaattttaagcagattatctcagcaaaaggccgtgaacttaagttgtgatctggatgttagtagttgccattgagaataaatatatgatgtccaccactgaatttgctcaatgtctctggtttgctaaaagaatgcagttacttcatcttagctgaagatcagccattaaccatgacacagggctatggatagaatagtgcaggtttatctctgtgagtgtgggaaggaaatggtaagaacggtatatgccagtggctagagggtgaattcgtgcagagagataaggagtgcttgttatgatgtttttgtggtgtgggtcaggttaggtcatccaagtggaattactctcgttcctgccttctctggagaatgatggaaaaataaggcaggaaaaacaatctgagaatctggtctctgtataggggcccaatattcagtattacatagaatctttttataactacatgatgtaaaaatgctttaaaaaataattcctatcacttattatgatagcagtatctagaaaaaattatatgtccaagaactagatttcaaagcatgcttttattatatttgtttatattatattatatattttttattgttattatgttaaatgcttttattaatatatttgttttccagcctggcctacttggcaactttcctggcccttttgaagaggaaatgaagggtattgccgctgttactgatatacctttaggtaaagttcacttagaagctttaaaaaaaaaagtaattaaattcttttacaagtttccattgaggtgtgatatacatacagcacaggtgctgtatgtcttagatatacagcacaggtgcacaggtcttagatatacagctcagtgaagcttcagaaatgcatgcatgcatgtagccatgactcagatcaagatacggaagagcccagcactccacgatgctccatcatgcccctttgcagaaaatactgcctcctccagtaaacactattctgatgtcactatagattagttttgcctcttcgtgaactttgtataaatagaactgaacaatatgaactgtcctgtgtgatttcttgtatttcattatgggtggtgtgctattgtatcaacagggtatttgggtggttttcagatttgtgatattaacaataaaggaattataaatattgtagtacattttgggggtgtctgggtactcattttctggatatatacctaggaagtgaactgttgtgttatagagtaattgtgtgtttagccttatagattctgccaaacagttttccaaagtgattccagcagttgacaatcagcagagtatgagagtttcagttttctcctcttgataattctcctctcgatagtgtcagtctttttttttcctttttttttgttagtgtcaatctttatttgagcctttttgttgagtgtcgcagtatcgcattttagtttcaa

SEQ ID NO: 128987 - DNA, 1044 bp, Homo sapiens
tggatcacgaggtcaggagttcgagaccagcctggccaagatggtgaaaccccgtctctactaaaaatacaaaaattagccaggcatggtggtgcatgcctgtagtcccagctacttgggaggctgaggcaagagaatcgcttgaacccgggaggcagaggttgcggtgagcagagatcgtgccattgcactccggcctgggcgacaagagcaaaactccgtcttaaaaaaaaaaatacaaaaattagctgggaatggtgatgcacacttgtaatctcagctacttgggaggctgaggcaggagaatcgcttgaacctgggaggcagagattgcagtgagccgagatggtgctactgcactccagcctgggtgacagagcgagatgctgttttaaaaaatatatatataaattgtcaaatagcactctcttttagctacatatgggtaagccaaaaggtaatcttgacagcatttcattatgtcttttagtaagcattttatttatttttcagctaaaggttatagtgaattctctgaagaatatgataaatacattcgtgccaagtggaaaaattatgcaggtggtggatgaaaaattggtaagagatattatttctcacaataaatgttaagcacatagaaaatgcgctgttatttatttaaaggcataattcagcaacctcttcgcagggacttgggcaaatctgcatgaatctagctcactgtcagaacttcagagggacttaaatttggggaattggtaatattagggttacagcatagcaaattatggtttcgtaaaaggggatgggactacattacgacattgggcaaataaccatatttcatctgggagtgtggtatttccttccctttatgtagtgagttcactattgaagacttggttttttttcttaagtgtctcagggacatccagagattttttttttgtagatatgagcaaatgacatactcagcctggccccttattctgtagagttcctcagtagctctgaccctgaaactcatttgggctgagtgtt

SEQ ID NO: 128988 - DNA, 1033 bp, Homo sapiens
atccaccagaaatatggcccagcttcactgataagtgactggatgttgctatatcctcagaaattgctgcacgtaagttaaagagtaggaagttggaggatatgacagaatacagcttgggcttggactttgtccaggaaaatgagaagagaagaggtatatagtagggaagattaggatggctgacagaatcatgaaggttcttgaagctgatcgtgggaagataatacatgttgccatctggggcttaaaaggtgatcttcctgaaggcaacactggagacattggtttggcaatagtgttacactctctgagagagaattctgaaactggaaaccaattggagaattgtctagagcccagactaaatctttgcagatatttaggagaaaaaaaaaatggcaggtatttcccgtcagtgataatcaggttagagctcttaagccatagttgattttttcatagaaaaccaattcacatgaaccttccctactagatcattctattccaggatttctgtgaccgcttatgattgtgttctcaacctagaagcactaggtagagaatgaactttctttccaaattttggtttgggtaaccaaattctacactgctgttaagactttgcctctcatatattcttatagatgtatctaactgaccctcacaaaaaaccctttcatcatttcaagatgatacacctctcattacaggtacagaggtgcagttccatggtacaccataaatcttgacttaccaccctacaaaagatggcatgaattgatgcttgacaaggcaccagtggtatgctatgatgcttaaatcttttatttctttatttttattttttattttatttctttatttttatttattgattgattttttttttgttttgagacagagtctcactctgtcacccaggctggaatgcagtggcacgatctcagctcgccgcaacctccgcctcctgggttctagcaatttccctgcctcagcttcccgagtagctggaattacaggcacctgccac

SEQ ID NO: 128989 - DNA, 1049 bp, Homo sapiens
acctatcatctatttaagtttttacctgccttaatagagttgtctgttattaaactgtttataaacttggggatagtaaggaactttaaataacattaagtaagttcattataattctgttttagggctactcgtgggttttgaagctgtgtctccctgtagaattcttttttgagggggaggaagtagctcttttttccaccctacccctaaaactaacctttttgcataaacgacttaggcgttcatgccatgtgagcccctgaaatactgtagtctcatagctgccaactttcttattttctgtcacacttatcctatttccttgcagccaggttctatgccaatttcacgtttgtttattgctaccaagagtcgttatcaacctcagactcactccacatgtattgttgctagcttgctctttagttcttacctctggggcaggtcacattctctcctaatactagacagagcattttcaactttgctcacagttgtctagtaagaaatgtgcctgtaatttgatgtttattttggctttggaacccagggcgtgcaaatgtcattattaggaagggataggagtcattacgtttcacttaatttgccgagttgattctagtgatcaccagaagccctgaactacgcgcagattattctgttaggaattaaattgaggcattggttttattatctctgtgggaagctgtttgatagaacagggaaagccattgactctgattctgtcaccagctgtgtaactttctacaagtcactaatggagcagggtcttaagtccacaacatgatcataaaattaagcacttgggttaagtacccatcacagtattcccaactcataggaaaacaatggtcagataaacaagaaaatgtaaagcggagtatctcctcacagcagaacttatttacaaattttacaaagtaaaattaagttgcaacccctataagtctctaagtagctcatttattagcaaaataaggaaagccatttaccaatggtggattacctaaattgtattcgattgt

SEQ ID NO: 128990 - DNA, 3351 bp, Homo sapiens
ggccgcttttctcagagggcaaagatgggtcagggtgggatgttacattagtgttgagactctttggatccgtttcgtgggtaccgaggacgcctgggtacgcgggacaggctgcacccgcctgctagaggcgccccatcgaggcgccacgggtgaagctcccggccccacctacggggcggggctccggctcggtccgactattgcccgcggtgggggagggggatggatcacgccacgcgccaaaggcgatcgcgactctccttctgcaggtagcctggaaggctctctctctttctctacgccacccttttcgtggcactgaaaagccccgtcctctcctcccagtcccgcctcctccgagcgttccccctactgcctggaatggtgcggtcccaggtcgcgggtcacgcggcggagggggcgtggcctgcccccggcccagccggctcttctttgcctctgctggagtccggggagtggcgttggctgctagagcgatgccgggccggagttgcgtcgccttagtcctcctggctgccgccgtcagctgtgccgtcgcgcagcacgcgccgccggtgagtgagcttgagccgaggcgcagagaggggcgtgcaggtgcgggcgcggatggaggcgcaggtgtggcggcgcgagcgggtacaaggaacacctcgtgctgggcagcttctttacgggggtctgtggtttcgtgcacaggggtgtgggtgcagagcgggctggcgaaccccgtcctcggtagattcggtgctacctgcaactagaactcctttaaaggaaatcctagtctctgcaggatacctgggtgtgattcgcacattcttagatttgagtgagtgtacttgaataaccagttccaggcccttgcattttgaagtgtttaaataaaatgttccggtggacctgtgtgcattactcaatcaaggacagactgcctgatggtcaggtgctttctcccgaagaagttcaggagttcagcccaggatactgcagggccgtgggaaacgctgagtggtcccaagcttgggcggtgcgagcagcccagagcaggccccaaagggccccctgtggccttttgcacccaagtcatgggatcgcctgtcccgtggctctttcccacgagcaagtcacagggctacggacttcctaactgcaagagacagtgagggacgagcgtgactctttcattttacagaagaggaagtagacctagagtgagaaaatatttagccagaggttacactgttgtttactgaacatgcgtaacgtccgagcctcttgacgcccagtactctttcataattcatttctttataaagcaatcagactgcgtttgtctttgccaacagaatcggataagtaggaacctggcgcatctggcctgaggctagatggtgatggtcttgaatagtttaggtaggttattgaaagtggaagcaagatgtgcattgtcttcttttatacctgtaaggagaaattctttaaaatcatggtgggatatgatttagccattaaaattgatataatgttcagcagataaaagtagaatccagaatagtatatacagtttttcctgtaataggaaaatacacagaacatgtatgtggacacgattaaaggccttaaaataaaattgctccattgtgggtagggaattaatttgcttgacggtagttggttttatgggaattgggagagactttgatactttgatactgtcagggcccttcattgaaagaccaccaggaacacaccataagctgaacaaattgggtttagtgttctttgaggcaaaggagaccacacaccatgagcgacggacggtaggttatagaaaaaaacccattacagaatttgaacttcggttgcatgatttggggtaagactgaggaaccgggctttgctgtagatagaatgctgttagaaggtggggcaattctgactgagtaaagaaggaacagccattctgtttagcacgagaaggggatgtttggtgttttgtgcgttgcaggtgcccttgtttttgtctgttcttagagaaaatcttcaagtggcattgctttgtcttggtgtgtcatgtctcagaataatcttatccgacgtaggtatctgtgggattgttgatgtccaggaggaaaacagagcttacctggctgtgagtgtcagatcggcttgtaataatattgagagatagctgtgggactcagagcagtttcaggtgttggaggctgttttttcttctttctcaatagctttatttattctagcaaaagtattttgatagctattttcagaagaagaattaacaacctctcaatggatataatagttcttatctagaacagcgattatcaaagtctagtctggccactggtgtcactttgggaagctgttttcacaggttttcaatgaaactggaaaaataagaatgcaaaactaaaattattaatttagaatgttaatctttactctgattgtatggacttcaagttttcattgttgcaaacgtgttcttaaaaataacggcagaggtagatgttatgtgcatggaatttgttttgttttaacatctccatttggcagaataaaaatttggaccctcctgtgccaaggcctcattaatttttttttactggcctggaaaatcctgggatccatgcactgaaggacctttagaaccttacagaagtttagtgacttcattctctgagaagaataagcagtttttcaactggagtcattatatgataaactatagcctcatggtaacaaaagatatttcaaaagtactttcaataaatatgaataatgagaagcagctttaaattggaaacaagtcatttgatttagaacatctgtaaggattttttgtgtgtttgtttttgaggcttttcacaatattcctatgtgaaggtcctcctgagttattcttcattattgaattttttaggagtctattaagagatgatggtgaagacagtggcacaagaaatgtctggagagatagcgccagatgacatcatccagggttctgtagactcttattaaggattcagaaatttatcctaaaaaatgggaggatctggaaccagccaatgggaggccattagatggttttagacaagataacattttcactttaaaaagatgagtctggattggaggtcagcaagggtagatatgaggagactagtccagaaaagaaaacagggtgcgttgaaggatggtggcgccaggggtgagggagagaagtagatgttctagaaaaaaatcaggagggcgaatgagctgaaggaatcgttgggtgaggatgagggagtgaggtgtcag

SEQ ID NO: 128991 - DNA, 1344 bp, Homo sapiens
tccgccctccccaccctgctcagaattaaagtcaatgatcttttttttttttttttttgagatggattcttgtgctgtcacccaggctggagtgcagtaagtagtgtgatctcagctcactgcagcctccgcctcccagattcaagcgattctcctgccttagcctcctgagtagttgggattacaggtgcgcacaatgcctggctaatttttatattgttaatagagttggggtttcaccatgttggccaagctggtcttgaactcctgacctcaggtgatccacccaccttggcctcgcaaagtactgggattacaggcatgagccaccatgcccagcctaaagtcaattatctcaccacagaccacaaggctactttgatccaaccagcccatcttatatactaccactttcctgttttctcacagtgctccaatcacactggccttctttctggacttcaaacatgccaaatatactctccttgagggacatagcacttactgctacctttgtttggaatgttctttcccagatacccatgtggcacacccaaatgcttgagtggccccttattagtgaggccttcctatagcattatatataagatggatataaggtaggactcagaacatactccctatcctccttactctacttcacctgactccaaacactgtcaccacctgacgtagtacatattttattttttatttgtttagcatctgtctgcctctaactagaatgcaagctccatgaggacagagatttttgttttgtttaccgccatattgtcagcagctagagcaatgtctggcatgtagtagcactcaatgaatattaattgaataaatgagctacctaaaaaataactgcattgatatcataacccaagtagtgtctgaaataatgtaatgaattaccagaatgcaaatgaattattttccagatgtctttaagttgggtgttggaaagtcaatatgcatttttcctacaaatataaagtaagtgctgttattatccccatcttatggataagacatctgatatttagcttatgcaactatgcctgttttctgattttgaggcatgtacctcaccacttatactaaatttccaggtcagatcataaaaccttacgtaagccataaaattcagatataaagtagtctaaaaaaaggaaggaccagaatggaagatacctatcttacacacaaacagctgtatctagagtataggcttcttagctttctagatgtttcacccagttatagctgttctttgatagtgatacagtgatagaggcaggaggcagagaaattctaggcagatgggaagatccc

SEQ ID NO: 128992 - DNA, 1038 bp, Homo sapiens
atatcattaaaaggcattaagcagggaagtgatattatcagatttgcatttctagaagatcattctggttgcagtttagaggacgttttgaacagtgagagagtccacgtaggaatttactgcagtggtagaggaaagaaatgatggtaggctagactaggatgccggcagggagggtggaaagaagatgagagatttgagagttgtttaaaacaattaactgtcttaatgattagaattaaatgtaggtgataaaggaaagaaggaagtcaaggcaacttctaaatttcaggcttgagcatgaaagtagatggtaatgttatctactgagatggaggatgagcagatttgaaaggagggaaaactgatgaactcagtttctgacttgtctcaagtcacctatcaaatgccacataaatcagacacagaatctggacacagaagccttgggagggaatgaaatcactctgggagacaatgtagactaatacaagttagataggacagagaccaaggatttccaacactagtgtgatgtagtagaggaggaggtgatgaaagactgtggaaatgaagtcaaggaaggttgcagaaaaccagtagctggggcataatggaagccataaaagggaggctttttaaggaagaggaagttgtcaattttatccaatgtactgaaggatctaacaaaatgaaaattatcttttgccttacagagctcactgggtacctcagcaagagcatttttggcagaggttgttggtgcaatatccagatggagaagtattggtgggtgagttagaggtgaggaaataaatataataaagtcaattcaacacttttaaacttaaagcaacagtaataaatgcaaaatatttttgtattatatagacagggtaagtttttattttgccaagcagaatttttttaattctacctactagtgccattattttattaaaaagcattcaatttcagaaaaataagaaggatataaaagaataatgaacactcttcgggagaaaacagtaaccttaa

SEQ ID NO: 128993 - DNA, 1335 bp, Homo sapiens
ttctttgtaataagtattttgccacacctgtaaaaaaaaaaacctcacttttaactctctgccttgtttgggtaaaggcagtaactaagtttatgtttcagaactgcaaaacaaacaggatagttaccaatatggcccatgtatcagattgatttttgtagcctctcactgaatccaacatatccacaagcaagttatctgtctttctacctgataatctaaattatcaggatatttgttttctgcctaaatgtttatactaagccgaggggagagaggtacctagaccatgtcatctacaagcttcagtaactaaagaaaaaggaacttccctgagtggcttgaatgtgtttgcccacagtctatatctatgtatatagaatgtctgtatgtattttacttatttaatatacattgaatggtaccttgctacagtatttctgacatttagagtagtgttgaaatactcggctagcatcagcaccactatagcactgtccgtgtcatatgagtcactaatattaactccagggacttctggataggctaatagatcattggatacgaagggctcttttgaagcttcagtataccatgtttgcatagtttatctttaaaaacaactttaaaggttcttttgtgagccaggatctcagactgccgtagcatgatgctgtccatctttagcgcatgggctgagaacacctcttccctgaggcttctgaaggttgctgtctgtcatgagtgcatgaaggaggccaagagtttatgctatgggaggaaacagtcactgatttgcctagattctgagagtctggcccatagccaaccacattttcctttgggataatttatttcctgtggcatctagccagaagaaattgaggatgtttcctttcacagctgctccaagcctgttgcccaattcacggtacaagggagcaccccttccctttcctctgaaggtacgccacccacctccgtcgcccacctcagcgcccaggagccttgggacttccttccatatgataaatcattcttcttcacgtcaatacacttcatattaatttctagtacagaaaatcttgacagctatcagaatgccttggtcatagtgttgttgcaaaattgaccatacaggtggcccatgtataaaatctgaattttaggggtttgtccccacctcgcatgctggcttttacagggaggtgtctgggattcctcattagcaatcaaaacttaattactgggatgcagagtccttactttatcgccagcccgtaggcatttctgaagtgcacttttttgaaacatcattttgctaactctcagcag

SEQ ID NO: 128994 - DNA, 1030 bp, Homo sapiens
cccatttaaaggatcacttaaactggaaattcagaaagtttaaaattacttcaaggctgggcacggtggctcacgcctgtaatcccagcactttgggaggctgagacaggtgggtcatctcaggtcaagagttcgagaccagcatggcgaacatggcaaaataccttctctactaaaaatacaaaatattaggcgggcatggtggcgggcacctgtaatcccatctacttgctgaggcaggagaattgcgtgaacctgggaggtggaggttgcagtgagccaagatcgcaccattgcactatagcctgggcgacagagtgagactccatctcaaaaataaatgaataaatagactacttcaggtccaaaaggaataaataaatgtaggtgatgaaatgtcttaggagatcactggggaaggtagtttagatcatagttccttcagctgctcctcaaatcacactttaaggatttcctggaagaactgaccctgtcccattaagactggcattagcccttttggagctgtgagtgtgacacacaagctgacatggagaactctgggaatgtgcttctgagggatacccggtatgacttcggggaattccagtacaatcagaaggaaaagcaaagtgtaaaccaaaagattaaccacgtgccctatattaaaatgttgccataacaagctaccttttttgttttagaagatgtaaattacatagggaaaaacttaatgagtgacaaacttttatccttaggcaaaatttagtctcttacccagatagcagtacctctttagcccagattacttatcttgggtaagtggaagcttaaccttctatccttgtgtttcagaggctaatttttttttttccattttgttgaacaacaaactcggtaatcccattaatcaaatcagggtgtgttttcttttttaattttatactcagctatagtcaaaaccatcacaaggccaagctgggtgggacctttggaaacagccagagccagaggccttgtgggtggcaga

SEQ ID NO: 128995 - DNA, 1069 bp, Homo sapiens
gattttgttctccattcagtgttcgtgaagtcacctctgctaggaacctgtatcccataatcattttatgttcaaagcctatcatccttcacagtccagctcctattccatctgttttcttgaagttttttctgatcttgctaaccagaagtatgatctcagccttaagcttccattttactttatctgatgacaccagcagtttctacaccccattatggttatttgtagtaatgtgccattagattgtaagctctttaaggaaatgatacatgtctggatttgtccctttatctcctctgttgctgatcatagtgtttatatgtaatgaaggctccataaaaggctatagaaaggatgttaatggtaatgaaggaaccacatttcttaaaagataagcctacaatgtgtagtttagaaaatagttacaggaaaggtggtgatgctacaaagtttgtaggataatgcatggaagacttgcgcaggaggcatcttgatgtggatgttagaaccttagaggaaatcacgatagaattattgagtgttagaaccggagaatgttataactgttataaaccttataggtttttatatcattggttttctgactgggttcagtgtaaccttgggttacagggagatgccttggggccttacctgggagtgtgactgaaaattgttggggacccagttctgcttccttaagtattatgcctagttcagctgatcaaaacagctccacttttatctcttttgaatatatgtatagggttctatttcatatttttaaggtatatgttcttgaaaaattttttgaaaggtacttacgtagtccattgttgttactttatatatgaggaaaattaagtcaagaagtgttcatcaataggtccaagtccagtatggtgggaaggccaggattttccccagctgttatggcctcctatggcaccaccatgctgcctggcatctctgtagccaccccgtcttataaagtctttgaagagcagagagtgagtctgaatgtttctgtgctagcctttgatacagtgcacattaagagaatgtt

SEQ ID NO: 128996 - DNA, 1067 bp, Homo sapiens
tgacaaatgatttttcagtgcggagtatttttagaacatcaggaatacagagatattgtgtatgattttatctttcagttagttcctttttcctttcctcccctggtcttcccccagcccccagtctgtggagctgatgtacaagtatgacctggtcctattatactacattcatgtcaggtttagagtggttagccccaggcatatgtaatgaagagaaatttcttctttcatgttccttacacatatatgtgctgatgctatgctgccatgaaaccactcgtgtttttgcagctgtcttgaagataatataatctttgttcgtgtgaaatgtgaagggagtgattacgtagtgaagtgggcatttactacatgcaacatattcttgagattcttcccaccaccatctgtgtgagcagggtactcagaaacactcccactccacaggtttaaaaatggaataatagaatcataggatcacagaactccaggtctggagatggagatgattataacggagattcatgggcttgataatgtgcagagagagcgtcaggaggtggatctcagtgtcatttcagccttctcggggttatatccagacccactgagagtgacatcaggctttcttcaccctcccaccactccccactgccctcctcctctgctacctccccatccctgtgtgacataacattattgaaagactttggcattaacaggttcccctcaaaatatggcaggggacaggtggcaaaataccttagtgtgactttaagaaatatgttggcttcctattcacccccttacattatgacatagtggagtctgaccccctccgtcattagcaaattgcctggctccagtaagtcttcaaatctggctttttactcctcactgtttttttaaaaagctttatctttagagagaaacgtgtcttcaaagtcctttaatgtgacctgtatagggatgtgttggcttctactgaaagtgttatgagaccacctgtggtgtcaggactgcggtctcctgctgaaatagaccagaatggtttatcatattcttaa

SEQ ID NO: 128997 - DNA, 1225 bp, Homo sapiens
gtaaagaaggaagaaagagtaagtctgaggtttaaagtgagccccattaaaactgtaaattagtcaggattcctctgtctgttttccctttctcccctgtctccaggatcagactgggtacctctgccgagattgtgaataaatattctttacataattggccaacatttctttaaaagcaaggtggtttattacctggtacaagagcagagaaggaaatgtaggtggcattgcctaatctttcctctgttgccctgagcaattcagctctagccccaaactttgatgtcctacttggccacatactgcagtcattgtgacctgtcttctgtggaagacatcagtatctgtctgtttgattcaggctttcctttttgcgtctcttacttcccatcccaaacttttccatctcagactgtactcttcggggaagaagtataagaatttcttcctagcttactatgtttctaatgagccttattttattataatgagctaaaattggcaggaggtaacaaacatgggccctgaatcccagccgtaccacttctgacctcaagagtgttatcagtcatatgagctttgctgtctcatctggaacatgggagtgatgataatatctatctcatagtcttgcactttttgtttttataagatcattgattaaaaagtattcagaactgcctggcagtagtagcaagtgtgtgtgttgtggggctgtcaactgtaaatcccaatcctccaatctgccaagataagtaggataagccctgccctgaagctgttggattaatttagtcagaaatcaatttcatgaacacttcttgagaatctgctacttacctgttgctgtgggctgtgtatagaaaacttcaaggagctgatattcatctagaaaagtctcatagacttgacacaggagcagagcagtataaaggggtagtgctgctgttgtgaattgtcgggtaggttttctggaaaggggaagagggtgagctttgaggcgtttttgaaggatgggtaggatttggacaggcagagaagaatatgcaaaatcagcacaacgagagagtgagtatatgatgtgtatacatgtgtggagtggcagctgaatgggaataagcgtaataggaacatggaattgcaaatgagaagtagtcaagattgcattggatagaatgcagtatggaaaatcctgatttcctaaatgagaatttgacttagt

SEQ ID NO: 128998 - DNA, 1087 bp, Homo sapiens
cccaagcttcagccaccctggccatcttgctgctgtgtgaatacaccaagctcattcccactctcagccttttgtttcacccacctggaacacttcctttcattggctcctcattaatcaggggcctgcaagaatgttgtgttttcatagaggcatttttccatttattccactgcagagcccggaaaggtaaaaactatatttccctctcctcttgctgctcaggttctggttgtggtttgatgccaccgtcagacacaccatatgaggtgtgtaaggtgagtgtggaccatgagtggtaagtatggatgtgggcgtgtttcgtagacattcagccttgaagtttttctttgacctttccagcaatcaactgtttaatacctgataaatcatgttttaagctagctaactagattttgttctctgcactcatggcctgaccaacaattgggccatggccatcctctttgaaatagcactcacccactcctgccgttatgctctgtcctcttaccctacttttgttcgttaaagcacccagagcaacctgaagcaaccaatgtatttgcttattcctttgttagccagctccctcactcaaatctatgttctatgaagttagatgctttgcatttttactgctgtgtctgtctctacctagaacaatgcctgtcacatagtagggactcagtaaatatgcgttggatgtacttatttgctacagttttttggtagctgcctggagggttggagtaagaagaaattgcagattgcaatggggttcaagaaatgagcagtattattagtaagtggtgtttgccatgggttctagagcagcagagccctgttgctatgcctgccatagattataacaactgaggtagagcattgatgcctgtgtttgggaaacacttccaagcgattttgcttttttaaaaattatgttttatttagctccagagacaaaatctaaagccttctagtctgtaggaaaaacattccattttaaaatttctgtcagtttataagtcattaagttagagtttgtagagcacttactctttaataatttgaatgaggataattc

SEQ ID NO: 128999 - DNA, 1065 bp, Homo sapiens
gtgactcatattttgcccttaaagcttctagtacatacgaagacttccgtagtctttccaaacctttctccctctctcttgccagagtttgttttccttccttctcttcccaccttccaccgaaacctgaagtgctggtcctgatgattagaggcctgcaaaaggaaactcgtcttcttctgtgtctttttttttcttttttttttactcactttgataagaaaaatagccttttcttggagttgctctctgcatactgagcagacattggtacacatgtaattcatatagtagttaattggcactatttagcagctggaaaggaagcactaccttccttaccatgtggcagtctcattcttgtcactatccagccataatctctgctggtgttctgattaaagctttgtgctttcagattcagagacactgggaactgtttctggtttcctctttttccattcattttcccactttaatatgctaaggtatgttttctgataattcagaaagattgctgttgctttcacctgtagttttctcttcctgtttccacaatgcatctgactttgagaatacattactttgcccatctattatgtcagtcatgtccacttctggtttctttcctgtagggaaaattgattttttaaaaatgaaaccaaacctttagaaactctcttaggtaatttcttccagctctcatgttcctatattttccttgtttgtaatatctaattaaaagcttattataaggatccttccagtgtcgttaacttcaagtaaactgtgtctgtacacctgcaggtacccacatacatttttatgaaaaggccaagctccaatttgtggtacatttttaaatcgttagtattaagaattgaagatgtgggggcattatttacgtttgagaagcccttttcaatcttaaaatctatagggttctaagcttcacattatctcatatgaacaaaggtgacaccgccatttaaaaactgaggctatgcatacacaggtagagagagagagcaagcaggcacatggatgcaagcacaaacatgctga

SEQ ID NO: 129000 - DNA, 1060 bp, Homo sapiens
ctgttaggctgaatgtcatggaaggctgtgtggcagagtaaaatgagtagttacagatctggaaagtaatcccaatatcttaccttggccaagcaacttaatccttttcagttttctcaggtacggcatgggataaaaacaccttcctctaagagcggttaggagaattaaatatgatgaggtgtgttaagtggctagcagtgtgcccgtgtggaatgcactagttgttctgactgggttatggaagtcgctgggctctaagcctgtcttagtgttgctagtgactagtggtggcgcctccgggtgatcatttcactttgtgcctgagtttcctcatttgtaaaataagatatttggcctgtgcctatggttttcaggttttcggtttaggcttctggagcctgtgtccagtgttcactcctccctgtcaccgctccccttctgctccagaagttgttctctttttctgtcatgttctaacttcctctggtgatgtcttttgagcaaaatattatgtggcaaaaaagaaattggaacaacttcacagggtgatcttgtaaggatcgtttcagtctaagtgctgggcattttcttaacgtcattttgaatccaaatcgcatttctaaagtgttaactctcttagctctcaccttgtatttactggtttagacaaagaagtgtatacttaataatgaaaccagagaatgttcagatttaaatccaagaaaattgcttttgtcattgcagcattttcaaaagattattcccaaaggactacacaagaggaagaagcagacctcagtcagaaaaaggtctgaactttttataaaggaaaagcctgaactgaattctcaaaaatacttgatctgagttatattcggagtatgtagttgaaaataggaacttatgggtggtatttaagtgtagctaaaaaaagagcatcaactgttgcctagagtaggtgagttctttccaagagaaggtcatggaaacctggtagcaacagtatccatggaggaagagggcttggatgcctgtcctgtgtaagtcggagagcctt

SEQ ID NO: 129001 - DNA, 1047 bp, Homo sapiens
acgcacctcagcctcccaaagtgctgggattacagacatgagtcaggagccactgtgcccagccctgtatttgtaaatagatgtctagttatgttatttgtttgtttgtttgtctgttttttgtttttggtttttttttttgagatggagtctcgctctgtcacccacgctggagtgcagtggcaccatctccgctcgctgcaacctctgcctcccgggttcaagcgattctcctgcctcagcctcccgagtagctgagactacaggtgcatgccaccatgccaaactaattctttgtatttttagtagagacggggtttttactaaacatgttagtagtggacgggctttctgctaaacatagcccggttagccaggatggtctctatctcctgacctcgtgatccacccacctcggcctcccaaagtgtggaagttacaggcgtgagccaccgcacctggcctagttatgtttttagaaacaaattattggtctgcctcatcatatatttatgaatcagtcttaattccatgaatgtcatagtgatgtactgtttgcctctgtttcagaatattggaaagaagatgacctgtcaggagttcattgcaaatctgcaaggggtaaatgagggtgttgatttctccaaggatctgctgaaagtaagcatggaactattggtttttagtgtatgcttgtatttctgtttgctgcttacagcttaatcctaagtaggctaaggatcacttaagtattttgctttttgcttttggttttattggtgatgtttcttttaagccttgtccttgatttttcgtgctgcaaagtaccttaagttgataatttctagaagtctgcattataatcaataatactgaggtaagtaaatttggaatggttggtgatacaaatagtgagtggcagtttttgttcgatttatttgtaaatagactatcagaatttaagaaagatcccaaaggtatatgcactacggaaacagagtagcatttgcaggctataatggaaacagttccaactgtgttcaatcc

SEQ ID NO: 129002 - DNA, 1014 bp, Homo sapiens
agaccatcctggctaacatggtgaaaccccatctctactaaaaatacaaaaaattagccaggcatggtggcgggagcctgtagtcccagctacttgggaggctgaggcaggagaatggcatgaaccttggaagcagagcttgcagtgagccgagatcactccactgcactccagcttgggcagcgagcaagactccgtctcaaaaaaaaaaaaaaaagaaaagaaaaaagaaaaatgttatgatctaaaaatgatgaattgtaaattgaaattgagaatataatttactatcatattgccaatggtctagactttaataggaatccttatctaagtatgccatagtttaatcatgcactggtcaattttgttggattctatgacctcttagaatgaaagccttctttccttttttccatcctctgttccttcacctgtcccctttccccaccctctagcctcccacttttggtagttttgcttttttaagaacaggtttatatatggaaaatacctcagggtagctttaatcagttgtgtcagtggggcttattgagggacctcatattatctaacttacacattattcagtcttcttatcactgtaagctttttacattggcacagttctgttatagaacgtgatcaaggaaagcaggtcaaattctaagtcagtttcgctctttcttactttctgcaaattgattgtggaggaaggagggaggaatgaggatgatggtggctgaaacccctgactcttgtttccaatcctgttgcttactttaatgccagtcctgctacagcaatcaagttaaaaattgtttggttagtccttgtaatttgacagtgagttaggtgtgtttatcttttcaaattttaggggaagtgctttccatgaaatatcaatagaagtctgatatttcagtattctaaaactttttggtcccaggatagctttatactcttaaaatttttgagaagccccaaaatcttttgtttacatattaatattta

SEQ ID NO: 129003 - DNA, 1034 bp, Homo sapiens
actaattgtacctagcacagtactgttttcataggttctgagtgtatcctattagtgataataaggtggagtccaacagtgaaaagcgaattcatgcttttttttcttgtatctttctttagatggagtccattgccttacctgtgcaataatgcttcttaataccgatctacatggccacgtaagtgtggatttgtgaaacttagatccaaaacatgtcgggcttatctctgcttttatgttcaaacacatttattttctgcctccccgtttcccattctctacatggttcccatggcaggtgaataaaaagaaatctttgaaaaaagaaataatttttttatttcacatgctagcacagagtatgactttaaatccatcgtcctggtgtctggagttgttttagcagtaatgtgtgtgttctgtgtcttctttgtccagtagatggcagacagagcttttacttatttttgttttctggttgagaattacagttgatagataatgatggagagaatacaaattagatctgaaaatgtgaattgtgttttccctacataccatagtgagttgaataactcagcctttcttgtgcccctcagcttatctagtcttttactagttgaaataataaaacaaactaattaccgtctcatcatctacttaagatacaagataaagtgttaaaatgtataattatatataaatttgcaagttttgtagaagtagaattttagcatttactcgaactcttcataatactctttaaaataaatgaacctgggactatgaagtaatttttgctctaagtaagtatagattagtccatatttaacgaattctgattgtattttgaagagaaaatcaggtgtctgtgtagagtatattatcccttgatttgccgtaatatatcttacaatttaaaaattacatataaaaaattgatatttagatattctgctagtcacataatttccttttttggaaaatatagtgttcccttttaagaaaggaaccatggagctctatgggac

SEQ ID NO: 129004 - DNA, 1057 bp, Homo sapiens
acacacacacacagtttatagattgtagaattagaattagatttttttcctaagtatttgcttattatatttgcttactatagcccaatagccttttttttttttttttttttttggagacagagtctcgctctgtcacccaggctggagtgcagtagcaccatcttggctcactgcaacctccacctcccaggttcaagcagttctcctgaatcagcctcccgaataactgggactacaggtacgcaccaccacacctggctaattatttgtatttttagtagagatgaggttttgccatattggccaggctggtcacgaactcctgacctcaggcagtccacccgcctcagcctctcaaagtgctaggattacaggcgtgagccaccgcacctagccccaatagccttttaaggtgatactttggaattaactcttcagtggaataaaaatgaatgtcagcataatcagtagaaagtatctataaaactgtttgcaacaatatccactttttctgaccttttcaaatgaaggtgtctaaaactcactgattctcactttttacattatattgtattacaagtttctaagtagctgaaggtaaaacctagtcagcatttaattttcaacactatttataaaatgtccatgtctggaagaattctgagatcatctagtgtaaccctttaattttacaaatcaagaaactgaggtctgggaggtgaagggaggatgtttggactggagtgtagtactgcagtgatttatcgtggggctcttttcatgcagcaaaggtactcagattttctaacaaaaacagttatcagtggatgaaagatctgtatttttgccttgcattctgatgtagtttattaaagttatgaaaaattaaagttttgtcaatatatagtttgttaatcttaattatacctataataaggaagaaggcaaaattttcatagaaatgaggctcatggtatgttttttaccatagtaagatttcttagacattttgaatgattttttttttccttcccatctcatgtttaggaaaatg

SEQ ID NO: 129005 - DNA, 1025 bp, Homo sapiens
atgtctgtcacccaggctagagtgcagtggcatgatcatacctgattgtagcctcaaagtcctgggctcacgtgctcttcccgcctcagcctcccaagtaggcaggaccacagacatgtacagataagcctggaaatttgttttatttaggcaaggtctcacggtgttgtccaggctggtctcgaactcctaggcttgagcaatcctcccgcctcagccacccaaagtgcagggattacaggcttgagctaccatgcctgacctcactttttctccactaagtttatagtgctttctaggccgccttgtcagcgtattaggaaacacttgtgaacatggaatggggtgtgtgtgtgtgtgtgtgtgtgtgtgtgtgtgtgagtgtgtttaagataaagcaccatgtgtaattgtaaggagagaggaggtatggtgtcctcattttcccaaaaacttaggcaagttttaaatggtatcaatgagagttacatctgcaagtattttagttgctatggagtgactagcatgtgacagtactgtgtgacaaggtgtagaaacgtcatctcttgggtgacttgcagctggtgacattgcagaattcaatgataagttgcggaattcaggatctcttgtggcaggacccagaaggcggtttgatcatcaatagggcaggacttttcatacctctagtgaataaaggggaggggagaattcacgcctttgctattattgccactttacttgtattttgttcttattttgagtggctagggtaaagatcttttaactgatttaaaggatgtttagtttttattttatcagccctagttccaatgataggaattcaaaatgtaaaacttagactgtctagatgacttgattatagttgaaggagaaattttaaagcgagcttgaagaatggtgccaaagtgcatcttattttctgcagactccgaagaaaggagtgtatcctctgaggggaagttccagactggcaggtctattttggcttcaggtatgctttt

SEQ ID NO: 129006 - DNA, 1026 bp, Homo sapiens
tataattgctggttcttaggatatgcatattttaagagttgttagacctagtccaatatatatcagattgtacttctgcctttaatgtatgagtgcctgtatttcttcgcatacttgactgtcctttgtctaagtgcttttttatcttaaccaatttaatggctgaaaaagctatctgaataccttaatttgtatgtctttgacatggatgagctttatttccacatgtctaattcttatctgcttaccctttttttacgaattgcttgctcacatctgttttggtctagactctggttgcagtggactgtaaacctacttgaattaattgtattggatggatgtcacaggcgttgggtttatatccaagaacaggatgcaaggaacagtgagacctcccagacacaagaactgaagggtctgcttctctctgccatctctactctccctttttttcatggcgtctttgttcctctatataactcttcattctacctggctttggtgtgccatgccacttagttcagcccctactttatgtgacctttcagttcacgtacccagtcatagtttaagtgcatgggtatccgcggcccagatttctagggtgagcagtctgttggatcagttttatcagctggtcactcctgttccagtcagctgaggtcagcatagagagctgaggctcttggggcctgttgccaggggctgtggatgaattgacttctctagccctgacacaaggatgcagtgattagaatgctcagtacaatgtattttgccgattttttgatttgttgtattaatctttctcttatgggtacccaaaagccctttccatttgaaggatagtattgccttttgtataatgggtgtttttctatccatttatcattttaattttgcttagtggtgttgccatgtaatcaaggctcaattaaatcatgatttctgctagtttctaggttagaaataccttctttatgaggaaattatacattcaaatatattttcttcaagttctct

SEQ ID NO: 129007 - DNA, 1017 bp, Homo sapiens
cgtttcatttcttcatgctcgtcatcctcaggttatctacctgtgacaattttatgaattttgttttggtatatgtgtgtgtgtgtgtgtgtgtgtatgtatgtatgtttgtgtggagctggtgggaggtgttaaatggtgatcaactattttaaagctgtttaaagctgtattaaataataccagtgttttttgttaaaaaaaaaaaaagccagtattaatattacaggttttcaatggacctctctttttgagcagtctgccctgtgctgagcattttctataaccagtttgaaggtttatagttcattagatgagcaaattcaggattggctccttgtgacattgtagctatgcattttcttgtgaatatggattgtggatattggttgtcttactgggtcacagtgagaataaaaagaacaaggtgtcaaaaccacaagactttggtctgaagtacttgggcaagccacttacgttctctgaaactggatttatttatttgcgaaatggggttaatgatccagtgtgttgtgaggctgtgagatttaaagggttaatagagactaaagcacctcgcacaggacatggtacaaagcagagcctgggtaagtgtgtgcatatgaactggttgcctggttagtccacatctagacttcttgtatctctgagatcagagtgtctctcagtggaagagtactggcgaggaggcattcctgaaagcagtgtccccgtgaggcggtgctcctcagtggagggtgccaccttagtcctcccctttcaccttcgtctctgaggactgcaaattgtgataaaacgctgtaggaaaggtatgcagataattgcactgaaattcccactcagttttctagggtgagtggaagttgtttatattacagaccaaacatggtttggggagtggaagagttttgggctaagaggcttcactgcaaaagccacagggagtggttgtaagtgaagccgagagatgaacaccagtgaaggaactgggtgaaa

SEQ ID NO: 129008 - DNA, 1050 bp, Homo sapiens
atgaggcatgctagacaagttttagtccctgggatagtaccacaccaggaagaactattctacattctgtatggcctcgaatgtcctgttggacattcatgtaggagaaaaatatgtttctaatgatccggccttaggatatgtcaataaaaggttttttacttaaatggttttaagtatcagtgagttttctaggactgtaactaccatgtaaatcgagagaagattatactttgttttgtttgcaaatttactaaaagttgtttactatttcaaagtatcacatccaagaaagcagcgctcatgctcccgcatcaccatttcaataccgctgtatctgtccacactcgaaccttgctttcagcatgattctcctttaggtacaagcaagtgtctgactaacctgagcatttatgtaatgaaaatcattttaattttatttcccctttgtgatatttagggcattatatggattattttgaattttatatttaggcagttatattgttgatggatttcactgtaggataataaagaaggcattgcaaaatgttacgaaaaggtatttttgcccttaaagagttgagaattgctgttttaaagcgatggttcctaagcatcagggcacattagattgtcctgtagaagttttggaaatgatcattgtgaacctgccctagaaatactaatttagtagttctctaggaaattctagaaactccatgaaacttttttttttttgtgattgttttttttttttttaatttatttatttttttattatactttaagttttagggtacatgtgcacattgtgcaggttagttacacatgtatacatgtgccgtgctggtgcgctgcacccactaactcgtcatctagcattaggtatatctcccaatgctatccctcccccctccccccaccccaccacagtccccagagtgtgatgttccccttcctgtgtccatgtgatctcattgttcaattcccatctatgagtgagaatatgcggtgtttggttttttattattgcgatagtttactgag

SEQ ID NO: 129009 - DNA, 1050 bp, Homo sapiens
agtctcacaagacctgatggttttatcaggggtttccacttttgcatcttcctcattttctcttgccgctgccatgtaagaagtgcctttcgcctcccaccatgattctgagacctccccagccatgtggaactttaagtccaattaaacctctttttatccccagtctcaggtatgtctttatcagcagcgtgaaaacggactaatacatatgttgtgtaggctgaaagaactcttccaaggaccatggcatatcttggttccaccaatggcctgacgtgacctttaacctttctgtgtctccttatctgcaagataggagtgacaagagaacctagatcttcaggtggttgtaaagattagtgtggcaagataaagttgttagcccattgcctggctcatagtatatagtcatgcatgactttctttttttaagaaaaaagatttaaaacaacaaaagctctctaggcagagttaattcttcacagtgggaggaggtatttaaacttctgggcaggatgctgtggagggaattagagcttgatagtgaattggaataactctaacccattctcaacctaacactgatctttttactttgtaaaaaaaggcatttcactggagctgcattagcaatatagtttgccattttttttccaaaatattatctcctcctcccaccaaaaataccttttgctgtgtgtgtgtgttgtcatatattcccaactttaatgaaagccaaagatttctaagttttttaatgttgaggaaatttttaaaggcaattcgtggtatttacaacaagctattaaatttatttcatcaattattttccttttcttctctgttgataactttagtctacaacaagattttaagaattgcaatggacctatctttcttttttttttggagatggagtctcgctcttgtcacccatgctgtagtgcagtggcaccatcttggctcactgcaacctccgcctcccagattcgagagattctcctgcctcagcctcccaagtagctgggattacaggtgcccgccacc

SEQ ID NO: 129010 - DNA, 1094 bp, Homo sapiens
ttttttttcttgagacagagtctcgctcttttacttagggtggagtgcagtggtgtgatctcggctcactgtaacctccgcctcctgggttctagtgattctcctgtctcagcctcccaagtagttgggactacagcctcccaagtagttggtactacaggtgcacaccgccacgcccagctaatttctgtatttttagtagagacagggtttcaccatgttggtcaggctggtctcgaagtcctaacctcatatgttcctcccaccttcacctcccaaagtgctgggattataggcacgaaccaccgcatccagacctctcatctttaactgattgattttcagaggacaattctaggaaagactaaatgttttcaccttttcaaaacaggtgctgttaagagaaggaagatggacggggagcatgccaggatgttggcatttaggacatgggaagttgtataaaggtgaaactatgtctgattgtctggtagaaaaattacagtctaattagaaatgctgaagtttttccagacctttagggaattcatcgaattgcaaataaaagaaaataaggaatgttggtttgccggtaattagatatattgggggaaatgaggttgtttcttttcttttctttgttttttttttttttttttttttttgaggcagagtcttgctctgtcgcccaggctggagtgcagtggtgcgatctcggctcactgcaagctccgcctcccgggttcatgccattctcctgcctcagcctcctgagtagctgggactacaggtgcccgccaccacgcccggctaattttttgtatttttagtagagatggggtttcaccgtgttagccaggatggtctcgatctcctgacctcgtgatccgcccaacttggcctcccaaagtgctgggattacaggtgtgagcccgcacctggccgaggttgtttcttgtttttccttttacctagcgtttctttctttcttcaaaaaactagatagtgtttattaattttactgtgcaagcaggaatatacataaacttttaaaattcttaaagctataggtattttgcgcactgttttaaaaa

SEQ ID NO: 129011 - DNA, 1084 bp, Homo sapiens
cacttaaggaagtacactgcttacagaaatggggttctgtgtatctccattttcaacttctcttaccagactggagctttcctcaactccttgtcaatgctttgttcttcacctgcacctccttctatccatcattccctgggtgtcacccttgacatccttactcccgcctcttccaacaccccaggtatactccctgcctgtgtttcccccatttaaagaaatcgttcagccaactgtgctcttgaagtactctttctgtcccttgggtctatggagcagtggtgggaatgtagcagacactcagtaaatacttgctgaaccaataacagggaatcctccttttcctcttcacaataaacgccagagcacacgctgactgccgacaccagttctcaccatcccttccatcccgcctttgtagcctgccccactggcgtccccagaatgagtctctctgaagtccgaggctgcctgagagctttctcagtctatatcatcctccgcttcatctcagcagggcttgacactgccctgtccctttcctctctcagcaacatggcaggacattctccctggtctcctccactgtttggttatttggggcatcagaatcctccatgtttttcgtttgtttattgtcaatcaggactctcttttccctcccctttcttctgccctctgaataaagcacctgcttttccaaggttctcttcttggcttcattctctctatgagctcatctgtaccagtggcttcaataacgccacctatagagtcattcccaagtctacatggctaatctcggcctcacttctggactccaattctggattccagatgtcgattgaaagtcctcatatggatttctagtaaaagtaaaaataacgtagtctacgcttccaaaacagcttgtttttttttttactccttaagcaaatgaattttcttgtcactacttctgcctgtccgctgctgtgttcccagttagcgagtttcaggattctggcatcatctttgagtccttccttaaatccagtggcctgaaccttcctaaattcttgaatactgtcatttcctatgc

SEQ ID NO: 129012 - DNA, 1057 bp, Homo sapiens
ctgccagaatctagtgggatggaagtttttgctacatgttatccaccccaggccaggtggaagtaactgaattattttttaaattaagcagttctactcgatcaccaagatgcttctgaaaattgcattttattaccatttcaaactattttttaaaaataaatacagttaacatagagtggtttcttcattcatgtgaaaattattagccagcaccagatgcatgagctaattatctctttgagtccttgcttctgtttgctcacagtaaactcattgtttaaaagcttcaagaacattcaagctgttggtgtgttaaaaaatgcattgtattgatttgtactggtagtttatgaaatttaattaaaacacaggccatgaatggaaggtggtattgcacagctaataaaatatgatttgtggatatgactgctttgtggagtaagaatgtcattttgtttagtttttggaaatagtatattgtgcatggaccatggtttctcagccttggcactactgacacgttagactagataactctttgctgtggagggctgtcttctatactgtgggatgtttaaccacatcccgagcctatacccactagaggccaggagcatctcccacccagttttgacaatcagattgtctccagtcatgctcaaatgtcctctgaggggaaatcacccctggttaagaaccacggggctagagggagaagagaaccataatgaaaaacctgaattattaatacattaacttgtctgttttcattagaggaaattgagaaatgatttccaaggcccctttcaactctgtgcttaatattgtcacgtgtggctgggcactgtggttaatgcctgtaatcccagcaccttgggaggtcaaagtgggaggatcgcttgagcctgggagtttgagaccagcctgggcaacatagtgagaccctgtctctacaaaaaaatacataattaggtgtggtggtacacacctgtagtcccatatactcaggaggctgaggtgggaggatcacttgagtccaggaggtcaaggctgc

SEQ ID NO: 129013 - DNA, 1025 bp, Homo sapiens
atcggatgtgtgcttgagggcacacactcccgccagactgctattgagcgcgtccttccagttagcgacccagcacagctgtgggtggtggaacctcgactgagggaactccgtcttgccctgaaattacatgctgtgggcatgaccagatgagtttccacaaagggctaaatttcaacaagctcttcagatagtggctttttgtggcttgccaacttccaaactgactttaataaatgtttacacaactcactccccagctcataagccagactgcctccatcacgctgttcccatgtgagggtcccccttcaccttgttcaacctcgaaaggccctacatcagtgcagcccagagtctctggatgcctccctcttgtcttccttcccaaggcttggccaattgtttttcctgttcggagcgttcctttttaaattccatgtgatcctcagcgaaatatttgaagattggatactggcacttctctttgactccatttttacccataagcttagggaacttgtctaggttgccagcagaaggaatattagtctattcgctgcaatggaaaccatgtacctggtaaggcggggatggaacaaagtccatattttaaaaaatgactccgtggagacttttccagactttgccgccttacaaaatctttccagttgatactaatgaaattgacttgtcatttgggagatactgtataacggtcccgtactctgaagtagaacttgagaatacttgctggggacaactttaagcaacagaaactctcttggttctactttccttgagcagtcctgatgcttgcaggagagggtggcagcaggtccccattccctgtggaatgtaagtgacatggtggaagtgacatctacctgtagattgtagtgaaagtaagacagtttcatatgttacagagttaaagaacatttaagattcatcagcccttctgcaagccatttatcaaatataattagcctgtggtgaaacttcaggaagggggaagatgtgat

SEQ ID NO: 129014 - DNA, 1014 bp, Homo sapiens
cttctgtatgttgctgtagtcaatcaaagatttcaaactctagataaaatagcaagtagatgcataggtcatttgaacttcaacaagcacatgctctctatctcaacctgcaacaggcattcttgtgaccattcacatacatcattgttttttgaatttgatcagtcttgcaaatattttaccattattcagcaaacatcctgtgccagatactattggctccaaaaggctgccaggttgtaggtgaaacttaactgcattgatttcacatgtagtgtttactgttctgtacatgaaaatgccttactcagcactgttgctgcagtcttttctgtccgcaagaaacttttaaaagtgaaatatgtttcgtacaggtttatttgaaactcttcctggtcgggtccagtgtgaaatgttactaaaggtcacggaacaatgcttcaacacgttagaacgatcagaaatgttgcttctacttttgaggcgcttccctgaaacggtggtgcagcatggggtgagatttgattcttccccttcttttaatataaaatacaatgggtcatcaacagattcatcggtatggtgaggagctacaaagcagaagtttctgaagagtactggttaagattgaactgaaatagaaggttctttgttagtaaagctaaaaggacattcttttcaccatattttgtaagtttccaggagaagctgttttatcaggaaaatcaccaagctctgacagtactgtttattgcaatccatatggtaaaaagtaatctttttccgttgtattctacaatgtgcttttgaatttagcgtagagtttatagtcttaacagatgcgtttttcctgtgcttctgccctatggagactattttcattctattcctgcccctttccttcatctgtaataattatcgagtgctattggcaggcatgggaaagtgctaggtatctcctatcttcctaaatcccctgaagtaaatagtatcccactttacagatgacgaaac

SEQ ID NO: 129015 - DNA, 1027 bp, Homo sapiens
gtaatggaaaggtagccttaaaactctgacttttctgtccattctacaccagactgtatgactggctacacctcagaacttatcttgaacgtgatacgttttgtctatattgatacatcttcatgtagagaataaccttagtttctttatttcttagaaaatctctctacctctgtattatcatttgaactccagttccattgcttcctttacatttctatagacattttgttaattcttgttcatcgttaattagaatttgctaattatgaagagaataaccaagacagagtggtcagatgttcaggtgaatttggccttctagggtgtgtggctggtgcattcttttattttccagtctttaaaatgtgattatttgtttctcagataagtttgattatgcaaactgtgataagtaaaaaaaataccccattacttcatatagttctgacaacttatgctgtaacacatttaaatgagtaattttgttttgaaataggttggccttggggaggcactattagaggctgaaactattgaagaacaagaatctccagtgaactgctttagaaaattatttggtaaggaaaattgtattctctattacttctatggtaaattaatatgctggggtaagtgttggttcagggataagctcatatatgaaaggcaaaggagctttatgtgttatggcatttaagttcttttttttttaatttagaagcattttagctgggtgcggtggctcacgcctgtaatcctagcacttaaggaggccaaggtgggtggatcacgaggtcaagagatcgagaccatcctggccaacatggtgaaaacctgtctctactaaaaatacaaaaattagctgggcatggtggcgcacgcctgtagtcccagctactacggaggttgaggcaggagagtcgcttgaaactgggaggcggaggttgcagtaagccgagatcgcgccactgtactccaacctggtgactgagtgagactctgtctcaaaaaaaaaaaaagcatt

SEQ ID NO: 129016 - DNA, 1301 bp, Homo sapiens
gcctggctgtactgttctccagcatcttagaccttgaatggagatagtcgataattcacgaatgaggtggtgtcggaatgggcaggttgctgcttccatccttcataaaggagaagtggtgcttgtagtaaaatatttctaaagaaatgttatatccaaatgtgctggatcacagggcctggttattttctttagtctcgagacctaagaccagaaagaaaaatcttcatccttataaagtaccgccagaaagaactcccacctggctttaattaagttgatttgattctattgccaattctccgtttcttcctcagatgatcaaaccaagctaccgtctttgtatagttgcttgctcgttgcttcgtgaaccctggaacggtattttttaaatttctttttttaacagcgatgcttttcccctccttgctattctatctttcttagggtcaatataaaaaggcgatagccagcctgcatcacttagcagctctccagggatccatttctcagccacagatcacagggcaggggaccctggagcatcagagggcgctcatccagctggcgacgtgccactttgcgctaggggagtacagagtgagtactgcacacatacatgcctgccgcaggtgcacggggccacctggcctttctcctttccctagcgtggcttttcattcagtgcacgtttatttcaatttgatctttctgcctagatttattacttaatctgctagtgaacatcacaatgattttgttttacgtaattttctctttactacagcttccctgaaataaggcatcagtactttttacatttcttgttcattgttccatttgttggaggatttttctttttattattatttttctttttattattattacactcttgtctcttctgttgtacttggaaacacaaggccattattaagtgggaaatggagatttatatttagcttactcaaacttcagattctctctttaaatggtaataacacgcccgggtgtggtggctcacacctataatcccaggactttgggaggctgaggccagcacatcacctgaggtcaggagtttaagaccatcctggccaacatggtgaaaccccatctctattaaaatacaaaaatgagctgggtgtggtggtgggcacctgtaatcccaactacttgggagactgaggaaggagaatcacttgaacctgggaggtggaggttgcagtgagccaagattgtgccactgcactccagcctgggtgacagagccagactctgtctcaaaaaaaaaaaaaaaa

SEQ ID NO: 129017 - DNA, 1037 bp, Homo sapiens
cagctgtaaatgtctttcttccaaagctctcttcacttcctgagtgtgttatctctttgacaaatttcagtgaactctttttcctgtctttacaattctagaaaaatgtgtagatgattaattaggaggtatctgtcagcacatccctctgaaaccattctgagcttcagctcaagcttcgtgttgcttgaaaaatgaaatgtacagctgatctgagtttgttagaaaaagatacataaattaaacttgaagaaaatagatgacaggaaagaataatgctaagagcagaagtcaatgaaatagaaaacaaaatagagaacattaataaaactggaagttttttttttgaaaaatattataaaattgataaccccctaacaagatcgataaggaggaaggtgaacataaattaccagtatcagaaatgaaaaagggagtgtcactacaaatcctactgaaatcaaaaggacagtaaaggaatacattatgaaaaactttatgccaataaatttaacaacttagatgaaatgaaaaagtttcttaaacacaatttaccaaaattgacacaaaaaataaacagaaaatcagaatgttctgccaggaacagtagctcatgcctgtaatcccagcattttgggaagccaaggatggcagatcgtttgagcctagaagttcgagaccagtgtgggcaacatggtgaaaccccatctctactaaaaatataaaaattacccgggtgtggtggtacacacctgtagtctcagctactcaggaggctgaggtgggagaagcatttgaacctgagaggcagaggttgcagtgagccgagatcacaccactgcactctagcctggtcaacacaaccagactcaaaaagaaagaaaagaaatcagaatgttcaagaaagaaagaaagaaagaaaataaataaatcagaatgttcccttagctattaaggaaattaaatttgttatcaaaaaccttccacaaagaattcaggttcaaatggctttactggtgaattctatcaagaattta

SEQ ID NO: 129018 - DNA, 1026 bp, Homo sapiens
tttacgtgtgtaacagtcataggaatgacaaccactgccttcagaattatggcgacctctgcgatggaagagaatgggatcagagaaggatacacaataggctttaactgattttgtgattattgatattagaaatgtttaaaattaagatattaacatttcatgaagctgagtggtgagcacaccagtgttatattctctctatataactttgtgtatatttgaaatgttttctcataaaaagtatttaagcaagtttaggaaagaatattgataaatgaaatctagagaccatcaaaagccaatttcaccatcacaaagtataattgtgtttcaaatataattgaaattgtgtgactgttgcatattctcttttttgttgttgttaatgaaagcatcttaaacagttgcctttcaaagctgttatctttgataataacatacattaacctaacattgtggacttctgttaggttcggatctgaagctcctgccttgtaccagcaaggctatcatgccatactgcctccatttaatgttagcctgttttaaggtaagcttaaagttgattagcttgaaaaaaaatgtaatttcaaatattattctcatgactcgagaacttgagaaccttgctaaggattgttattttagtacttttgagggcaggcccaaacagttagaaaagcacatgggctactaattaacaaatctatattaaataatgactgcgctaggcaaagagaagtaggaagttctccccgtcctcaaaaagtgtaatagtgggacagatatgcaaataaccttgactgttgtagtgtttggtaaatattttatcaatataaatatattagctacaaagaaagggaatacaaattgcggttaggttcatggagggatgatgagtttgtcattgtaaagatgtgctagattaagcatgttaggtgttgagatcaacaccagtaacagcccaacagttgggaaagttccgggacttgaaagaacgccaaggcccttggctacaggtag

SEQ ID NO: 129019 - DNA, 2054 bp, Homo sapiens
agaaatgatggtgggagtggttggtctccaccatgctcccctgaactcacaagatgttactaaaattccgggttggcccagatgaaaatgccaaattagtgaccatttatgatttttaaatagctcataaatcttgcttctctccttcaatcctcattgtagtttgggtaatatatcctctctgctgtaaatgccacgtgtagttttattttcatacttcctcctttgcttcctgcacattcagtgtgtctgtaagtcagtgttagagtttctgcaagagactgaatcctgaatgagaagaaagtactgctaaaactaaaaacatttttctttttccctcagttgtggaataaactagttttcagtggttgaaagcaaaaatccacatcttgttctatcttgatagtcttagaagtgcctagggaaagaagtaagaaatgttcattttagatttctgtaacctcagtagtttgctggtagcaaacatttctttttgtgtctagcaagaatagggtcttgtggactccattctcaagaatggaaagattaagtggttttttctccttcatcttataagtgttattaaattataaacttttaaaataaaagaacagtgctctttttaaaaatacacgagacctttctgcattggtttgcttaagcaggatggacaaggactggcatcttccaatccccatttacttttctaagatcgtgaatcgaaactttgggaagaataactatgttgttcaaaatattcttaacagtgtttggggataaagattacctttggatacggaagcccaggtaaccccttttgtattgtgatttgttttctagactttgaaactggatatacaaatacaccctgaatcaagctttttagttaattcccatcagcagtcactatacgagttaatatagagacagccatagtggaaccgaagtctgtgtacataggattaaacctgcagatgattatcactttacctagataatgcctaactgttagtgcaggtgtgagagatggattgtcaaaaaatcaacagttgaacctcagacttcattgtactgaacctttcttcttctaccagtttttactgagctgaagagtgacataagtccaagtggacaaaccctaggatgaggaatgagagcaaggggagtgttgggtaccagctagtatcacagggaagagtgtttggagttgtttgtgtaaaggatacccatcatgcacttctaactagtgagggagaactccagggtctcccaccttgatcaatacaacccttaatttcttctaactttctatagaagacaagcctcttaggaaggctgcagtttcatcagtttggaagcaggaatagggattattccttagtgatctgacctcgtagggatttgcccagtcttcactgtgtgaatctcaaggttaattacttatgcctaaattaacatggtagaaagcacactgcttaagccagagagctcttcctaactgaggaatggttggaatctttattaaacaatctgaattccttttccctttgggttccaaacaagttttctgaagccattacagaccttttgggtggtccctccagatgagtggcagagatgttgtgagcagtgtacacttctccccgggggtaaggctgtgagtctgccctagctgtggcatctgggatgcaagcaggtacagtaccaacactgagggcacccggtgcttcactcaaaggagggagaagctcttaatctgttatacagaccttttgctcttaagtattttaaaatagagaaatgtttctgtgctgataaatgcagtatcttagttgtattagagtggattaaaatggaaaacaatgtcctacttatactctgaatagggtggataataatgttctatgaggtgatcaccagctaatacactaaatctttgttgttacagaattctgcacagccatgggtcccggactcttattttcccccatctgttctcaatacgtttttgaaattgaaactcaccctttttttaaatcaaaaacattgccaga

SEQ ID NO: 129020 - DNA, 1111 bp, Homo sapiens
tgtttgaatgctgctgtttgctgttttttaaaggccttctagccctcccatggggttactgcagcaggaattcttacctgtgcttcagcccagcatacagactgctgacaggtaccaagtggaatcaacgcccgctcatagtgtgctgtttgtcaacatgttcgctgcccatggttctcagctcttcgttcctcagtgctctttttcatgctttctttcttttttaatttgttccgcattttggcaaaccatctggttgtaatattgtaacatttcttattttttttccataagttgccagtgtgtttgtgttcgatttaaaaatcattatggatctggaaaaaacaatgaaagctatataaatctgtattcaattaagtgcacattagcttaggtgcaccatgattctcttttgataaaacgttaaggctttcggtcatatatatttaaggatgctgacgtttattttaagtacatttttatttgtggatactcatatgagtgaccagtcattatggtcatattagcaattagttgcctggtatctaaataggcactaatgtgttttttttcctgctactgatgttttttcagaccttacctttctgaattgaaaatatttgataggctaaaatgccacatttattagctggtttatcctgttcttaaaccacaaaagcttactaattctctttttcatccaaacttaccaaagtgatagtgcttctaatagaaatataattgaattgtgccactctttatatatggagataatacaaattggaccctgatctgcaggatgtagcatttagttatatttttagtggtattaaaagcagggtttattagccaggcctggtggcatatgcctgtaatcccagctactcgggaggctgaggcacaagaattgcttgaacccaggaggcagaggtggcagtgagctgagatcattgccactgcacttcagcctgggtgacacagcaagatagcaagatgccatctcaaaaaaaaaaaaagaaagaaagaaagaaaaaaaaaggagggtttgccctttagctaactgtctgcaagtgccagtaacctccgcttggtcagagggtcagctccagtt

SEQ ID NO: 129021 - DNA, 1026 bp, Homo sapiens
tgatcttgaaagccaactacaaagggtgcccaacaccccaaccttgaagggaggcgaaggtgagtgggactggaccaattcaacagggttctgctcctagccaggtgctcctgctagtttcctcaaagacccactttgcattcagaccaatctttccttttaatagtataaatgatcaaaattttattgaatgtctaaaatatactttttaaatgggaagcatggtgaaccccaatctgccgttcctcaactcaactcaatgccttcctggcttacttagatctgccttggaagggacagacctgtctctgaacactgttctgttatttgatttttctatctgtgccaatgggtttccaatcaagtttgttttttccatttcatgcaggtgtattgggctgatgtatctatgacaagtggtaggtgggtattttaagaaagcttgtgtcatcatcttcaggtaacaggaatgtatgagagttgggtgccaaaacttgtggccgccctgtacaagagagaaccagactccaatgtcattgtggtggactggctgtcacgggctcaggagcattacccagtgtccgcgggctacaccaaactggtgggacaggatgtggcccggtttatcaactggatggaggtaagactgggagaaggagacttatgtgtccaaaacagtgtttttgactggagccagaaaaccggctgttctttcttccttttctcttagatttaaatattttctgggggcattcaaatcttcagaatcagcgtggatattattttatatccaaaagcaacattttgataagaatagactataaggccaataaatagtcctgccctgctctatcgtttgatattttcacagtgaatagatctgctgagaccaataactaagtgggcccaacagaaaaaagcttgtgattttcggacagaggaaagatggcatgttcagccagacccttccctaccagttggctggcctgtggacatcttatcctcaccttgacataccaatctctt

SEQ ID NO: 129022 - DNA, 1361 bp, Homo sapiens
cctcgggccgcgggccgccttggtatatctgcgcgtgcgcggcgtcgctgctgggccagtcgggacagaggagacaagatggcgctgcgggcgatgcgggggattgtcaacggggccgcacccgagctacccgtgcccaccggtgggccggcggtgggagctcgggagcaggcgctggcagtcagtcggaactacctctcccagcctcgcctcagtgagtatcagagagtaatacgtctccggtctttgctccctagcctagccctttgctcccagtcacctgcttagccagcgggtagggggtaggatttgtttttccctcccgcgtctcccctccgaccctgacccacttgtctctttagaaggagatttgcctgtacctaatatttccaggagatgggctgagggcaagagcaccagcgggaactttttcctggggttggtgggctcctggctgttgccctaccccctcccctccccagcttccctaggctggagccttcttaggcacttgcttcccgtccccgagggccacttcttgccactccgatcttaatcttcccctgacttcatttggatatctaggggtcgagggaacgccccttctcccctccccctggtgaggacctcaatggggtcttcaactcctgcggagggcagacggtagagccttcgctgacgtggtcaggcctttcgtggatggaggtcaggccagtagccagagggagatgtggcttggtgtttggtggaggggctgctccgcagaaggacacctagatatcagagaacgctagagctgaaaagtaccttgcaggtcatccagtccaaccctatcattttacaggtgagaagcctaaggttctggaaggggtaggatttgccatgcttcagacacttaattattggcagagcagggactaaaaatccaggttcttaaattctcgctgggcctttttctaccgttgcctcttcatttactgaccagttaaccaaacttggttgagtgcagggttctttggggaagccaggtggctttgcccataggtggtgtgtgtgcataggcttgtttaaatgttgtgattttttaaataaaaaggccttaatgaactaggtttaagtggatagctcagcaattccaaaagaaatggttcttgattactagagaatgcagttgtgtagcatccaacttcttcacagctttcttcggaactggcaatgagccctcgaaatagactttttaaaaaactgggaaaagcacatgatgtttccccaggtggtgagactgcattttcactggttaattgccagagtgtctgtctctaggtggccgactgattaaaaaggatttcagatgaagggtg

SEQ ID NO: 129023 - DNA, 1952 bp, Homo sapiens
gaagagataccataagcaaaattaaaagatatgaaggagagtaagaaaagatatttgtacaaggattaatatagagaatctataaaacttctataaatgaataagaaggatttacttgataagtaagaaaaggatattaataagcaattcataggaaatgaagtctgacttatcagtaatatgaatgaataattgacaatgataagcatgggaagttcctcagtattggtacaagttaggaaaatgcaaactaaaatgatgctgtttttattaaaatggcaaaaattacttttaaaagcatagattggcaaagatggagggaaaggatacttttttatatagctagggagagtgtaaattaataaggttcctttgcagagttaatttggcagaaaatgggcatggcctgtatgtggcccaccaaatggctttgggaaattctggcatgcttgtatgaggagccccatacaagaatgctcattgtaacatttctgtgctagtgtaaatttggaacaacctagaactccactggtaaaagaacagctgaatgaaaggtagtgtagttatctgatttaactatatctgctctgttttaacattaatactaaggtgcccatatctccaaagggtcttaaagcaatggcacatcatagtttaattggcaggtttctcttttcacatcacacaaaataatgatgcatctttcaataaattatgttgataaaataagtattaacatgccaaatgtcatgttaatatcaggtcaagtgaaaaacaaattgcggagtgattagtacgttgccatttatgtaaatcaccaaacttcattttttggagacatgtctttttaaagagtaaaaatggattagaggaatatatatcttgttaggagaactagattgaggatgagacttaagcattatcttattataatagtaattattatttagtaactttcttttttttttttttttgagacagagtctttttctatcagccaggctggagtacagtggcacgatcttggctcactgcaacctccgtctccccggctcaagcagttctgccccagactcctgagtagctgggattacaggcctgtgccaccatgcctggctaattttttatttttaaaaaattaaaaataaaatttcaccatgttggccaggctggtctcgaactcctgacttcagattatctgcccatcttagcttcccaaagtgctgggattacaggtgtgagccaccgcgcctagcctatttagtaacattttattcttcccctgtcaaccacatctggagcacacagttgattacacacacagcctagaaagcaatcatcatttctaggtggtgagaacatgtttatctgtacttttctgtagcctcaaaactataaaatatgcatgcagaggaaaagcaatacatttaattcccatgttttcatggatttaagacccttcttctgtaccttatgctttgtttgctagtatatgtgacagtgatgtttgctgtaaggacttaaactacctgagggtattgaaagctctcagcaaaaacctgtgtctgtgaagagtagagggttccatattcagacacaacatgggagagacagagcatgtgtagtaatttggggggcttgtaaaatgtcggatattgatcctttatttttttctctttagtttcccaggtatgctgaaattgtccatttgaccttaccggatggcacaaagagaagtgggcaagttctggaagttagtggttccaaggcagtagttcaggtaagtttcagctggccagctgaactgtttcctagttgcctacacatagggaacactgcttgtttctttctgtgatgatcattgcataagtgtttttagagtctttagagattggttaccggctgcagggaaagaaactattattgcatgtttttttgctcagtgtcactta

SEQ ID NO: 129024 - DNA, 1066 bp, Homo sapiens
ttgtccattgagccattttcttcaaagtcagatttgaagaaccgggcagtttccatgtttacctaaataacaataacttcatcagtgctgggagaagaaaaatccttaacatttatttctgatgaaagccaagctacagatttgaattgttccttcttttaaaacctcaagtaccccaaaaatcttcacaaaaaccaacagaacaaagagccggtttggggcacaaacaatattattcttaaatttcaaattagtcaaatgccaaattttagtccttaatttggccaaaatgccagattgcaaattctttacctaaagaaaaattcaactatatatgtacagcttactacaatgttctcacgacacaagcaaaattttacatatcatactaaaacaaaaattctacttacacccatagcagcaaatacaattgcaaaattttcctcactgtagtctactacatctttggatttctttaccaaaccagcctggcgacagatctgagctgcaatctgatgaacaaagtagaagaattcagttgaaatctaaaataacatttctacaacaaaataacttttaccataaactttttggaatcgtaatcataaacgaaaccaggatgttttagggtattcattcaacaaaactattttgtactttttgcaaagatatgcaagggtaagcaagaagacatgtgcagaaataaagatgtgaggtaactggattatacaaacaataacactgagtatttattttgaaaaccctttattcggtttctcagtaacagtgatgcattatagaaattcttgtctgctaaacttcatagcaaaccgatcccagtcctcacctcattgtgtggtagcccagcagcagagaagataggaattttctgccccctagcaatactgttcatcccatcgatggccgaaatgccagtctgaatcatttcctctgggtagattcgacattgagggttgattggctgacctaatgtatttccaaaaaggaaaatttcaacaagttgccgcattattcatgaatgaaattagatatcatatcaaattaa

SEQ ID NO: 129025 - DNA, 1004 bp, Homo sapiens
tgttattttagatttcaactgaattcttctactttgttcatcagattgcagctcagatctgtcgccaggctggtttggtaaagaaatccaaagatgtagtagactacagtgaggaaaattttgcaattgtatttgctgctatgggtgtaagtagaatttttgttttagtatgatatgtaaaattttgcttgtgtcgtgagaacattgtagtaagctgtacatatatagttgaatttttctttaggtaaagaatttgcaatctggcattttggccaaattaaggactaaaatttggcatttgactaatttgaaatttaagaataatattgtttgtgccccaaaccggctctttgttctgttggtttttgtgaagatttttggggtacttgaggttttaaaagaaggaacaattcaaatctgtagcttggctttcatcagaaataaatgttaaggatttttcttctcccagcactgatgaagttattgttatttaggtaaacatggaaactgcccggttcttcaaatctgactttgaagaaaatggctcaatggacaatgtctgcctctttttgaacttggctaatgacccaacgtaagtaacagagctatttctttctgtggcccagactcgggatcaaaagtgtgtcttaaggttggggaggtaaaatgtggtaataacagcatttggacctaacaatgaggtaaccctgtatttaaagtccagccctgcttcttggtagttatctggcactgggcaaattacttaggttctgaagctcataagatgtgacagctgatacttgtctcatggagttgttttgcatattaaatgagatcatacttataaattacctaatacacaatcaactctctgtaaatgattttttcctcctacctcaaaaatctggctttcatttgtttcctctctctctccttcctacctgcctgccccaccccagtgttgagaaaccatacaactgagaaatttgggacatttataaata

SEQ ID NO: 129026 - DNA, 1581 bp, Homo sapiens
cttcagcacttttttcttcagaaaacccagtgtttatttaggaaaaatattaagattctagcaggctgggcacggtagctcattcctgtaatcccagcactttgggaagccaaggcaggagggtcacttgggatcaggagttcaagaccagcctgggtaacatagcaagaccctttctccacaaaaaaattaagatattggctgggcgtagtggcacacacacttgtaatcctagttgctcaggaggctgaggtgggaggatagcttgagtccagtaatttgaggctgcggtgggctatgattgtgccactgccctccagtctgggtgacagatcgagacctgcttcttaaagaaagattataacagttacccctagaagttttggggtatttgttcagtaatacaaattactgaaattttgagtaagttacttttttaagcacataaaaagattctgaagagacaggcttcttaaaattccttcagtgccctcaccatatcttactctgctatattgctgtttcagactaactctagtcaaggactagtttttctcccccatccatcacagaccaatacttttgtaaaatgcaataaaattgagttattagaaaagtgaaattttaactatatatataatttacaaatgcagattttagaattgttagattcaacaggcataaaattattctgccaaattgccctgaaagtttctaaatgcttatcttgctttctgtgtgatcattgcatgttgataacagttggtctgcagaccgtgctgtgaggagcaccgctgtagcacgctcctttgaagatgtcagagtagcacttagaagttggatttcataatgctttagggttctagttgattgtaggtgaacatgcacacctatagtctggtatccatgtctctaagggaaagatcgtttatcaccattcttattttgtgcagtgcaatggactcctgactttgtgaccttcagaaattgtttaatttttctgacccttgattccaactgttaattggaggtagcaccttcctcatagggttgctgtgaggattaagttaaataatgttgtaaagcgcagcagatgattcctcgtgtacatttccttcccttttgacctttttgggattaggttagataaatatggctagttccaccacgtggaataaatcttgtgaaccaagaatcttttctgttttaaaattaacttcctttgatttataaaattgcaaacagattttcttctagcaaactatttgaaaacttacattatggcaatacgattttagcaaaaaccttctggtgccccattgtcaacatttttgttacagaatactttgaatttatgttgccgggagatttttctaaatcattcttaaggacagtatttaaaatgaacatgatgggattttcaactttgtactttggcatgttgaaacaaacatgttgtaagcaagcttgttgtaatatcgtgcatgatactcttctgcttgacctgctgtcaggtttcagcagccagggaagaggtacctggtcgacgaggttttccaggttacatgtatacagatttag

SEQ ID NO: 129027 - DNA, 2017 bp, Homo sapiens
tggaggaaaagcaattttcttcataatttaagtttttaactttattaggtactattgagtgcctgctgtttgcaggacactgttctaaatgtaaagaatttttgaaaagaatttatggtctctacttaatgtaagttactcagtctaattggggatgttttttatgtgtgtgcaccggtaatttaacatggccatgttcagtgccacatgaggagtacaagtgggaaactccacaaaactgagagacagatttttttaaccaagggctggttaaaaatgactttccaatgcctgtctgtgtgtgtgcccaggatggggtacgactattcagaattcctctcctgtgttgcctctttgtccttatttcagtttttgaacaacactttgacaaaatatggtaagttattacttactgtaattgagcactgttctgagtgctttataaatattcactcatttgctcctcatagcaactttgaggcagatgctgtttgaggcacagggaggtcaaatgatttgttgagattagcaagtgatagatttaggacccagtttgagttcataactcacactgttactctgtactgcctctgacgtgaaaatgatttgttccaagggagtagctacaaaatgatgtaatttaacagatttggaaatgtgttgctttgtgtgacctttttggtgcagcctgtgtagtgttgtttacttgtctatatgcctgcgttttgcatggtgaaatgttgtgtatccatccgacatagcttatgaactaagaatgttcttagtatacatcaggttggcaaatttctataagggaactttgggtttaaaatgaaactttacttatattgagaggggagagcgcttacctaggggagagagtatttttaatgaatgcagccagtttacctcatagagccaacacatgtctaactgctgcaaccaaactaaactggccagtatggttgccgctagccacatttggctgtttaagttcaagttaactgaaataattgaaattaagtttttcagttttgttagccacgtttcaagtgttagatagccacatttggctaatggctaccgtactgcacagcacagacacagaacattggcagcatcacagaaaatgactctaagaacactcttctaagtaatgttacaggtagtacagagggactttttgtgggtttggttctgagagatggccgctttaaaactcataacctaaagatgccatgcttaatgccaactgtcttcctctggtagatatcactcaccccatcccagacttgactggctacattacagaggggcagatctatgtggacagacagctgcacaacagacaggtactggacgggagcagtgctgggaagcttgcagacctgctcatccgttattctttagtgacttggattttgctcttaggaattgctttgcttagaaagtatcaacttgaattgtttttaatatggttataaaattgtcatttctattatcttaaattctggtgtcggcagagcgccagaattaagaatcttcttaacactttcctttattgtgtcttaaaacagagtcacttgtctccaagaacttttttgggaattctgttccataatggtatcatctaccaatcttgttattgatagaaaaaaatgacttttccatgcctctctagtagatgctgacttctaaaatcagcttttaggaattattgttaattttttttattttgtgtataattttttgagtcagttcagaagaccattttgactcgataatgtggtagtacttatcaaacagatgttgaaagttgagttttttaaaatagtcttgtacagtgttatagatgacacttttttggatttgattctcgaaagaaatgctatgctataaagtgtttcttactaccttttcttgccaggaagagacagtaggattcatctaggagacaaatgcagcggttgtctttgatttaagttgtaataatgagtttcaaatgtttttttattac

SEQ ID NO: 129028 - DNA, 1681 bp, Homo sapiens
ttaccctcgagactctgcaaagcattagctgctgcttctgcattgctccgcgctcttgtgaaatactggttctgttttctttattccttttgcactctcggttcccacctttgtgttggagtttaccatgttaccctgtaattaaaaacaaagaataggtaacatattgtgccagtgttgcaacgttttaaactgctaacagaccttaaaatatccccctacctgggtcctcagtgctatgtttaaagtgctgcagggatggagtggcgttttcttattgctgtatgtattgtacatagtggagtagttagttacctgataacagtcttgttatttgggtctcttagaccttacctctcaactccctcaagagtaccagtctctgaagttataatgctttggtctctacattaggggcaagatccagtctgagagaagtctcctttgagaagggccaagaggctctttcctgagtgtttgctttcggtttgttggtatgcctgtattgctgggctgtgctgctgctcgaagcagatggttttgactgtctttttgctctttcctatataatgaatagatgagtgaaaggagttttctttttctctttagtacttacgtattgggattcctgtgtcttacagctctccctctccaaataatacacagaatcctgcaactttttgcacagctggtatctgtctggtagcagtgagaccccttgtcttggtgatccttactgggtttccaagcagaggagtcacatgattacaattgccagtagagttgttgtttggggtacaagatgagaagaaagaaaaacctacagcctttctacattctgacatgctaacagtggtttaagtttctaaagtgtttaccagatgctgaaggcaaggggagggagcagaagcacttatgtttacggatattttaaactctgttagagagcagcctttgaaaatccccaatttggttctgctttttgacctctctctaccttttcagggtaatctttgtggcacaaacgatagcatttccaagctttagagttttctgaattcctgcgccttcctgacgtgagccctgagcgatcttctatgcagttctgccatgcgtcctgttggtctctctgtgttctttgttacttgggtgcaatagcaacttccctaccccgtgcattccatctttcatgttgtgtaaagttcttcacttttttctctgagggctgggggttgggggagtcagcatgattatattttaatgtagaaaatgtgacatctggatataaaatgaaaataaatgttaaattaaatggaccttaactaaagtgactctctatcttctaacgaggaaagcaacaagcaaatatgtaatcacacatctcttcaattcacagctctgagcatcataaccaggattgggaaccagcccttgtgttgcagggacatggcttccacactgcccttgtcattctttttggtactgtcccttacagcatgctgtagtttgatccagggctgagcattcctacaggtgctccccagcgttcctcatttcaggcctagtcaggacctctagagcccatctgctgtgagcaaaagagggtgctaaatagtgaaatacagcttgaagcaagccaaaacctgtttcacataaaatctcacatggatgtcctgtatat

SEQ ID NO: 129029 - DNA, 1104 bp, Homo sapiens
tatcataagggcaagttagcttaattcagtattaggagccaacggaaaatagttccccagactacatttaaaatagcatttagagactacaacaagaaatacttggcaaggcagttcttgagggaaaattatcctttgtgggaaaacttaagaaggaagtgggtttttttaaaatgaaacagtcatgttccttactcagctaccaactgtagttttatttcaagccatttttccagtttggggttgaacacctgcctcacactcaggcaaaccttgtggtgtccccagctgccccctcctccatatgaagccctgcagtggtaacaaggagcgggtgactgatatttggaaacaatgagaaatcacttccagtcactaatgggtcacagagctttgtatcctgagctagtggcaaaactcgtccagaaaacttagtaagtgtttttcagacacgtgtgaaggctaggaattgtgggaccctccctgaacagtctgccacatttctacttaagggaaaagcaaagcatctgaccatggctatccctgaggctgaggcacacatgaacaatgcctaggtctcctttgtaggagcctgagggtgcctaacctagaatcaagcccgtggctgtttgctgtggttagcagctacaagtagtgcacatgtgatatgccactgttctccacagaatttcatctctaaactcctagagcattttctaaatccaataaattacagcgttccaggtaccagtggtcatgtagccctttatccacagatgcaactggaaaatgactcgtccagggtcacaagggaatggcagaacacgagctggaacctgggtctttaagcgtgggctagtgctcttcccacagcacaatgttaacatccaaaggccactccacacatcaaaatggtcttcacaaatgtcaatctcgctagaaaccaggattttgtattgtggctaaagttccatatcctggtggacagaatggtagcgtgaatgtaaaccaaaggccctgactgtctggacctaggaacttcagggctcacactaaaaagttaagcttagggctcacactaaaatgttaagcttttaggggaag

SEQ ID NO: 129030 - DNA, 1002 bp, Homo sapiens
tgcccaggaatgggggagccgggaagggaagatgcttcgtagactagaagacctttggcttcaggcaaggctggagaacaggcagccacagcgggggctttcctcctttcatctgagctgccacatccatgcacggtgcagcaggtggctcatcggggtgcagaggcaggttccttgctgggcagaagtacctggttcatttggcagggctcaccaactgatgtgatcaatgcagacccctggggccgctgccctgcagccagccagaggagccctgggaacagtaacagttctgagaggaggaagctggggagggggtgggcagaaaggagccaagagaacattcagaaggagtttgccatctctcctactagactgcaaatgttcaaagggcagggttcatactttacccagtccattgttctatccttgacacttaacacaatgcctggcactaggtaggtacaaataactgtttcttgattggaaaaataaacgaagcccactttgcctttgaggaacacaggtgatctccagtgtgtaatgagctgtggtgctctggaggactctctctccataaatacacccctacagatgccaagaatcccaccatttacattttgggaagagtgccttccctctcctagcaggcttcttttaaaatgcagatgccgtggggtgaggcatcactggagtgaatgaggtctccagggcccccagagggtgagaatggtctagagcaggacctgcagttggggcctgcttggtgctgcatctctgatgcactctcagaacctgggagccaggcttgcggatggaggcacagacagggcatggacacttttcccacctctctccctgttcctatgtcctcacctcggcccccatcctgcagtggctggggccttctggaagccccaggggctgagaaactcctcatcatggagatttcaaggagcatgatgtctgatccagaaaggtcctaatagcacttcagcctga

SEQ ID NO: 129031 - DNA, 1097 bp, Homo sapiens
actgagaaaagtgatagacttaatggagaaagggtggggggctacaaatgaagctcaagagactggcattgtccccctcccacaccccacagtcagggaccactgggggtggaaggggcagggatggggtccttcagaatacacgctcactaattctttcgctcagtccttcacccgtctcaggcccacatcagttctctgcctatcctatacgtacttacctgttgtgtgcccagaactaccccttagctagcttccctacctgcacatcatttgagggttacctaatccccaagccggcccaaggagtcagacacagtctcctctcctccttcctttgttgccccaaagacaaggtcccagccctcttatgttaggattgggttgctaatcactgcagcagaatagtaatgaaaatttcttggagctgtggttcctgactcctgctgagagaaactgttgtaagggacaggatcccagtggcttagaatgagccacaggtggggtttggagtgccttttcctttcccgtaaaaacaaagacaagccaagaggcaccctcaactcctttacagtgctttttctacacatcattggtgcctgtggaccctaagggcttctcattctgtgcgcttctgctgtgtcttggagcaatgtctctgggctcctgtttacagggtttccccatggctaggcagaaggtactggggttagtgcttctacatcagggtcgccacaaatcctgctagggacagttgaaggggcctagaaggactgcaagggtgttgctcttggtatatactctgctgccctatcttctgcagtcaacggctaccggagaactcctccagcttccataagcaagggatgacaagggagtgtctggattgcctggggttcaggcctccgggtttaaacaactttcaagtaatctggtaaacttgggtgcccccctgtggttctgagtggaatgtgtccattttgccttcagggaaggcgatcaggttagcaggggacatcctctgtcaccttgctactcagtgtgctttgacccacccaccaccggcagcatctcagggctcattccagacctacttt

SEQ ID NO: 129032 - DNA, 1032 bp, Homo sapiens
ataaccaccgaatggtggtgatgatcaaaacatacgaaggcacagttctggcttcccaaagacattgtcctcgttgccaatactctagactgcctcccgagagggtcagatgctggaagaggcagcggggctggtggttaggacccctaggctcggtcttgtggaggtatgagtgggaaagccatctctctgggtcagataaggtcagcccctgcatgctgaggccaattccagtcttcctcactaggaattatctgttagataatgccggttcctgttttccattggattccactgtggcttccttttaaggcccccaggttagatcatagctggattctgagagcactgattgtttgaagtttgtatttacaggggactaccatcatatgcaaatgatggtggtagtgaattacacacccttggtggatgtagtggaccggtgctcagcattcatttcgacttccgtcctcctagtaggtcttcctggtttgcagaggtagggcacctggaaactacattacccaaacttccttgcagctagggttctgtatgcaaattaggctctgccaattaggctgactcagagaagatttaagaggcagaagatttaagtggcagagcttttgactgttaacttctagcgagcatagaccttttcagatgttgggtttttgtttttccccaaaacctcccagcgtccaatcattagctccgagcgtataaagaggcggggtgatggggtcagtggctttctgaacctggcatcgggcaatgaaatattctcagagtcacaattgcaatggaaattctttggattccctactggactgaatagaggtaacagtttcacagtgggccaggcccaaatttctgtccaccctcccttcccccacccccgcaccccaacctccccgtgtttctccctgtgtcttcccttcctcagtaaatggtaccaccattcatccagttgctcctaataaacactcaggagttggttcttcaagtcttatcagtccccaacatgcaagt

SEQ ID NO: 129033 - DNA, 1329 bp, Homo sapiens
gaaacacggggtggaggggggtgtgtctgaaatgagagatgcagggttgggtgcagacgttgctcgggagggtcttgatccggctcaagagctgctcctagcgtgctgtggggccaggccactctcctcaaagacaggcacaggccctagaaagggacagcccataccaaacccagtagcagatggaggactgcagggtttaatttcttgcaaactagataaagtttttcctgtctgtgccagagatctgatatttttatgacagttattgatgcacatccattgtggggaaccttccaattttctaggtaaccaagtgcacaggttttgtgttgtggcaaggaaagattagagggcaagaagtgtcgcctttatattctgtggcatcattcctcaagtaagaagaatgatctcattcttaatacgtctacaagaatctggagtggtgtgacttctgcccctttctttggagagaagggactaaataaaagacttaattttcaggccagagatcagtaaagtagatcttcggagtgtgcgggacaagttgtcaggacagaattatagcaagaaacgtaatcacaggtggaaaaccacgggatttgtgtttcaaagccagtaccttggcttaattcagaagtgacagtaaaagttgatacaaggagatgataataatgataataataatagtatagcaccttgcgttttatagcagtcatttctaagaagcatgaaatattttatgtgatttttaaaaattcttggatcttacaagactcaggcaggaattacttctgtcatttaaaggaacaaaaaccaaagcacaagaatgataatgagatttggttaaggtaagtctaagtgtcccaaagtctttggagtttgggtccagtgcgcttccttactgggggttggggggatgtctatgagcattctagaacaggctttgaatagatagcctttgtgaaccatgcttcggaatgcagagggagtcagtacttttatgaatatacatcgtgctatttgctgtttcccgtaaagaaatatctcttaatgtgatctcccacattttcgaagcataaaggttgtcattcctgtgaaagtcaggatgcatcaaagcaatcttcacagcatttgtcgctccaacgaaggtctgtcttatttttagtaagatgttgttctcccactcaccactcaaaaatctacggaagtaagaatttattaacttttcaaaacaaaggggagcatgttgatcagtgttttattggtaccctttatttacttttaagagctgcaatctgttggtctaaattagtgcttagtggtctt

SEQ ID NO: 129034 - DNA, 1398 bp, Homo sapiens
tctctcaggctgatgtcttggatatctctcttctaaggatatgtattttatggacgattttaagtgctataaaactttagtaatgggaaaattataatatttggattgccctttagctctgttgatgttacaggcaagtgtctgtagaagtgtgcccttaagcagctcctcgatgtgatgggtttcttactcttggtcttagataaccttatctaactttcaccctgaaggcagggtggttacaaagctttgcgtgggagaaaaaaatcaaacttacttatgtgtgtttaattatgtttagttgcccttcctttcatgttttttttaacatatctaaagctggtaagttatcgcaaagagatgaagacaacgctcagtgaacagtggtgatgaagaagattaagaaggatcagatgttagttttaatagtgctagctggtgttcaggagctcgagaggaaaaggaaggaaagaatatgatttatatatcgaatatgctatttaatatgaattatattagttttaccataaataatggaaatgaagactgattccaggattttgctggaattactacgttgttgtgttgggtcttattatttactgggctttgcattatgactgtactaggagaatgtactatttgcaaagtagtcatagtttgttttaaattccaggcacagtaattaaatattgactaccagtgtaactccagggagttgtgaagaatcattacaacttgtcaggttaaattttagcagggtgcaaaaagtcggcctgattatagcaaaagtgatggttgttttttcagcttttaacaatatgcaaggaaatgataagtgctatgggtagtccattttgaaaagggagttccgtacaacttttgagaattttaaatggaaaaaacataacttttctaacttttttccagttcgactaataccagaatgcttagtgtgtgcaaggccctttctgtgctgggcacttcagaggattcagaatgagaaagacactggagccagactgctgaaatatccaattctgatgctcttttggcaggcttcaggagcacacacgtagatacaagaaagaatacattgatttcaaaacatgctacatctgtgttgggtgataagcaataactatatcccatcacccactcccaccctgattatacctctttcgtgggtttatacaaataatatgtgtgtattttatttcattattttactcctattcaacaccacactggaaatgtctgtatttaaaacatatatatctatatatttacttgattactctgactttagtatatttcctgagaagccttgagaaaaattaagggatgtatatatacgtgtgggatcattcaaacacttaacacagaaaaaacaaaata

SEQ ID NO: 129035 - DNA, 1050 bp, Homo sapiens
aatgttcctggagagttacatgcaagctgaatttttaaatattgaaataaattcttgaggatgattaatggtgaccacttaagcatctactaatatcccatttttgttactgtgcagacacatagaaggaaatacaagatgtgatattctacttccagggccttacattgaattgagcatcacaacaagcctggtcattgagttgtgaatttgtagtgagactggttttgtcgacatgtccctgaatggggggcagtcactaccccgttatcttttcccccattccaatacatgtctggaatacattcattcctaacatttatagtgactcattactaggaaattctcaatggaatgggattggtacccaggaggcatatcaaaatcttgggggagggagagagttgtaaaaaacctagatcctaagtatttctgatatttgcttcaatggctgttcaccccttcgcacatgtgtgcatgcacacaaggacacacacacactcctactgccataaaatgggaaggatgtatttaagagaaggcagaattggaaacttcatgctagcattaattgatatcatttaatgctcaccgcagcaatgtaacatcggtatagagataatagtaatagaattttccttgaaataagctgattaaaagacctggtatccctggaagactggagaactcgctgttggaagatttagatgatgttcatggtggtggttattgtaagacttactggagtgtgacttggttggtcatagggaaagggggataccagtattaactgagtgtctgttatatgccaggcaccatgctaagccttttatagtgttatgccatttaattgggaaactcgtttggtctctgagcctggattaagtgatctgtgaagtcccttgtacttcaagcattctggatgggatttccagttgtcatccttgtattctctccccaatatagcaccgtgttctcaattcatatgtacatgtttgtaaaattccttaaaatatttatgctcaaaccaacatttccattttatctatc

SEQ ID NO: 129036 - DNA, 1068 bp, Homo sapiens
gttttagaggcacccagaaggatatgttttaaaacaacttctgccatttctggtttcaaacatggtttttgtcacattctctaattgaccaaatgtattttatgtacaccctaaatgttcacctatttaacagaatagtattgtttagaatggtattatccttctggttatttggtgagatacacacatcagtaaacattccctcatttggctggtattgtttgatcatgtactgtgtgccagattgttaggcaatgggaatataaatgtgaataaaatacagtgtccttgctcaaggacctgaatagctagaaatgtatgccaataagggttatagagtgagatcggtgataggacacatctatgcatagaacataagacgtaagggtcagtcctcccttggagatccaggaaagcctcttaaagtggtgaataattaagccagatctgaaaaggcctggtgtcctccagattgataagagcacaccaagcagaataccatagataaagctatatgtatgttcacttaacattccaggaaagcaaatatggcttctgtggaggaaatcaatgtaatggtaggaagagaccaggacatgaagtgcctgttgtagcataataattgtaccgtaggtgtgtggttgaaggtttttaagtagagtaactgaataattactgcaacaatgttataggaagttgattatctgttatcaagttgaattagaacccacatttttttcatagtgaaattccatttcaatagcctttagatgttgtaaatatctcagatgtcagatactgttgcccaagctagagtgcagtgttgcgatctccgatctcagctcactgcaacctctgccttctgggttcaagcaattctcccacctcagcctcccaagtgaggctgggactacaggcacgcaccaccatgcccagctaattgttgtattttttggtagagacagggtttcatcatgttggccaggctagtcttgaactcctgacctcaagtgatctgcccacctctgcttcccaaagtgctgggattacagccatgagccactgtgc

SEQ ID NO: 129037 - DNA, 1775 bp, Homo sapiens
ctgttgtttcaagggtatctagaaaaggcttcttttttaaaatcttctattctgctagaagattactttatttatttattttgagacgaagtcttgctcttgttgcctaggttggagtgcagtggcgcggtcttggctcattgcaacctccgcctcctgggttcaagcgattttcctgcctcagcctcccttagtagttgagattacaagcacccaccaccacgcccaggtaattcttgtatttttagtagagacggagtttcaccgtgttggccaggctggtctcgaactcctgacctcaggtgatccgcacgcctcccaaagtgctgagattgcaggcgtgagccaccacgcctggccagaagcttcttttaaatatgctgtttgcctggtcttccttatttgctgacttgattaataaaaagcattttctatagatcatacagcagtataaacttgaaaagcaaattgatattttacaaaactattaagggaaaaatgatttagaattccagagaatgagaaaactagcaatctgtggggcgtgtacgtcaaaacttcttaagaaacatttacttaatattcttttttacttttttgtttgtcagagggtaaatatgaaaccctgaattctttgcttctgtaaatcaaaataaagggttccaggattaagtattgtgattgcttttatctttcttccctttaatgttctgtttcgagtttcttatgcttctttcttgccgaatcttctaaagaagtacacgtggtgttttgggttttctcatgcgaaaagggataaggagggccaaaaagctttcttttgaatttttatgcaagttaaaactgtctgtcttcttcctttatgcctttatttcttatctcttcttttattatttctaacgtttaaatgtttagatgacaattggaccacaggtcagtaggccaggggggatgctaaatgttaatatagtctagcggctagtcgtcaactgtaggctattcattgtttatacctgtgatatagaggtgtatacatgagtaaataacatacagaatgggagcattcaaggaaagttggctgtaatgtatatttaatattcacattgacctctgtttaatatttaatattcacattgacctttgttagagaatcaaaggtgtgtttctacgggcaaggaaatattcattggcatgtggtatatggtagtattttactgccgggattataggcatatatcacattctaaggttttagaacatgatggaaatttacttctccttttgctggattttttttttttttttttttttgagatggagtcttgctctgtcgcccaggctggagtacagtggcgcgatcttggctcactgcaacctccacctcctgggttcaagtgattctcctgtctcagcctcctgagtagctgggactacaggcatgtgccaccacacccggctaattttttctctttttagtagagatggggtttcaccatgttagccaggatggtcttgatctcctgacctcgtgatctgcctgcctcggcctcccaaagtgctgggattacaggcgtgagccactgcgcccggcccctccttttgctggattttacagtgttattgttgttactgttatttaatagataatataatacagtttgaaaatttctctaattttaggcctcaaggctatatatatcattagtttcctgagtacatgtacaagtctgtttagcattgaaatattaccctgactcttgtttttaaacagagac

SEQ ID NO: 129038 - DNA, 1034 bp, Homo sapiens
ctctctctcaatctctctctctctgtctcgtctgcaaatcccacaaactcaatcagctttcctcattttttggtagttgccactattctgtcccttggggttttcttttctcaaaacctttttgtggagtatttctctccaaaacaaccttgtagaacccttttttgccccaattgctacaggaaagatcgactgggcataaaataacaacagtatttattgagctcttaccacctatcagacaatttgctaagtgtaaattcctttagtttccagtcttttaatgtctgctaaccctacctctgctaaaattgcctgggaccactcttgaacctactgaatcagggtttcattgtggcatgttaattttttttaagatcagcaccctcaagtcattccgattagcagccatttgtggatcactgataattattccttctaccatggcctctgtctctgtgtccagaagatgcagtcaatcaacagaacaatttttgcccttttgtttcatagatgtaatttgaatctcatagtctgcagtcttgcccagtatccatgtcactagatttctgccctgtgaagaatgtttgatgcttattttcaccaatgttactatatgtattaaatgatacatactctaaagatagtctcaaaagattaatctcccaattttgatgactcttcaaatttcgtgaagccacaaaagcagaatttcctaagtatttttttggctcattggtctatcacctgttgcccacaataaggattatttgatcttaaaagttggaaactatgtattgtatctttctcttagacatttttggtgtatattagcatactaaagactcttaggagttcttctgtttaaaaatgattttactttggttaactgggcagttcccaaactggaatttttttatcatgtaatcctattagtggccagtgtgaaacactcactcctttataggtagaattttctgggggtttttctcttcttttttcatttgaaaaagaggaataatatttacttcata

SEQ ID NO: 129039 - DNA, 1015 bp, Homo sapiens
cttctagtttctgttttactgttgtatcacatttttcagaaaaatctcatgaactgacacattagttccagaaattaacattatacataaaattgtttattctcaccctgtgaagtttaatttctgcatttataattaagtgactttacttcctagggtagcacgagtcatggggattccgttattgctctgtcagccatcaaaatactgccccaggcattcttagcccattgcctgcctagaggcagttgcccatatagctgcccttgtctgaagcctacatactgatagcatggcactgataattcttggattcttactatgtgtgatacttctcccattattgccactcagatggaaattctttttatgcattaattgtgtcagagtagttacagaatgggttaacatttaagaattcagttaaaagcaatgtggtgggggaagaagttttagaagagcaatatggtgaacattatgggagtgttacctatagtgttaaaggccacgtggttcatgactttctttcccccatataacaacaaaggcatggcagccactgccctctgccaggagtcaggtgaagctcagtcatggccaggctgtttgttgttgttattgttgttgtttgtttttgagatggagtctctttctgttgcctaggctggagtgcagtagcaccatctcggctcactgtaccctccaccttccagcttcaagcgattctcctgccttagcctcccgaatagctggaattacaggggaacaccacccagctaatttttgtatttttagtagagacagggtttcgccatgttggccagactggtcttgaactcctgacctcaggtgatctgcctgccttggcctcccaaagtgctgggattacaggtgtgacacaccgtactgggccctaggctgtgtttttaaaaagcacttggccttggtgtcttcagtctcttgctctcaggtattgttcagttctgaacttgactgaccactgttggtcattttt

SEQ ID NO: 129040 - DNA, 1048 bp, Homo sapiens
tttgacaatgaatgtcagtgttataacgcctgtgttttcagctagagaattgtaaccattctgttgccctgtcaggtggtagggagtgggagttgggcatgaaagctaagatacaaaatgtcatgttttagtattaaatattggttagtaaactagccagcattaagatcaaactgcggaaggaagaataggacttcttaaactggcaaattagatgtttttactagactttattttttagagcagttttaggtttatagaaaaactgagcagaaagtacagagttctcacataccctgttatccgcccctccccctctctccccacccctgcccccgcccattaacgtcttgcattggtatggtatattaacaattgatgggccagtattgatacattattaacaactgaaggtcactcttagtgttgtgctctgtgggttttgacaatttacagtgacatgtatctacaattacagtatcataaagaacagtttcactgccttagacatcccctgtgctctgcctctgcctcttcatccttccctccctgcctctgtcaccatcatttctccccccctgcaaactcctggcaaccactgctctttctgctgtctctattgttttgccttttccaggatgtcatatagtagttggaatcacccaataatgtagcctttcagattggcatcttaaacttagcagtatgcatttaagttcctctatgtctttttgtagccaagttttggtaattatgaataaaactgctataaacatttgtgtacaggttttgtgtagacataagttttcaagtcatttgggtaaataccaaggagcgcaattgctggatcatatggtaagagtatgtttagttttgtgagaaactgccaaactgtcttgtaaagtggctgtaccattttgcattctcaccaacagttcctgttgttccacatctttgccatcatctggtgttataaatgttttgggttttagccattctaataggtgtgtagtagtatctcactgttactttaatttgcagtttcttg

SEQ ID NO: 129041 - DNA, 1929 bp, Homo sapiens
agatttttgtggccttacacccccaaagataactttgttctactcacacatgattccttccttggctaagtatagccttctatgctggagctctttctctagaggatttcgcaggaattgttctgttggcttcttgtttccagtgttccttttgtgatgtccagagccatgtgattcctgatcctgttttgttttctgtgtttctctctctgctaaaagcagcatatggaatcttctctttgtcatcaggtttctgaggtttcccagtggtgtgcctcgggtgtgggttgactttcatgtattatgctggcattgggtggacactccattctggcaactgatgtttttcagttctaggaagttatctcaaattattttattgataacttcctttccttcaccattctctgttctgtctttctgtaactcctgttaattggatgttaggcctatggaactgggtctctgatttttttaaactttgctctttccctcttggtccttttgctctgttgtctgtgagattttaacttttattttcccacctttcaatagaatatttttgtctctgtcatcatatgtttattttctaacatctctttttatgttctttgaatgtcttttttttttttctttttgtgcatcctgttattccacacttgcaattttgggcttaattgtatgttttcatcttttgttttttggtcaagtttccttctccctatatagtttttacttgttccagattgctttttgcatgcttgtttagctgtctatcttccatgttaaaggctttcttcagatttctgataatacttgattatttgctcatgatcaagattaagataatacagagttgactggaacctctgaaagcgtggcgaggcttgtctgctgaggcatcatgggagagtaatcaggtgtgccatttgtggagtaacctgcatattagtgtatctgcaactttttgctttgtagctaatgagattctcgggaaaatcttccaaactcctgcctaaagagtatgtctgcacactgaaatttctcggtggatcctagtgagggaagactcagcggcactcccacttcattgacctatttgttacagggtgcccatagcttcagatgtgcttttgactggcttggtgtctctcagtccaaagagagggacagttactgagaggcatacagtgaggaggactatctgggaatcttaacttctcaaagatactttcaccctgtttctccttctttgggccaccccacttcaccttaacatctgagcatgtagcataaatgaagtttgttcagcttttctcactgctggctagggatttggctttcttagttcatttaagtcagttaccattgatttttctgtatcccaaaattatgttgctgttgtcctctttcctgtcttccctatctatccttgtgggatcctgagggtttagggcttggttttgttttgaatacctttagtgttgtgttagttgggtttggggagggaacaaaattagatatgtgatcaatctgccattttaatatgaatttcctttggaagctttaagagttagacttatccaatgttaagacgttcttatgaagctcctactgtgtgccagacactcttgtactttgcatttccatcccagtccatgcactgtgctcactgggattataggcatgcacaaccatgcctggccttgctttgccttcttgtttcagctttcacactgtaaacaactgtaaggtcctttccgggttttttttttcccactgccatgtttcttgcagttttgtgctttttgttggtaattccactgcttaaaatggcccacagagtgctgaagtgctgtctatgtctagttcctaagtgcaagaattatgaaaagtcataattcatgcataattaatagaaatggcgat

SEQ ID NO: 129042 - DNA, 1048 bp, Homo sapiens
actgaagttcctggaagttaactcacccacagtcatacgttaagaccggtatctaacgatccagtatcaaccgaactcttctctgcctaagttttacatagttccttgtgttttaaccgaatttggtgaagcagtagtacccaaagttcagcccaaatctgttgtcctatcatgcatgacactttttaagtttgacatccaggaatgaaccactgataggagacagaattgcaggagagcaaggggagaaaacagctgtctacagaggagccgtggggaactggagagagcctgcccaggaaagcactccctctgtgaccctttgcagacccagtgctttcagagcttctcatttttcacaggaagctggaaaaccagatagtgtgaaatattgccagctgtgtcactttaaaaccacagtgcaagacaaaaaccaaaaatgactgtgggcccgtttcagggcgtcagattgaaacctctcctttagaggattcaccttgccctgcagctttctttcctctgcaccgttagagactatgagaaggaatccaagccagtttctggtgagcacttaagagaatgcttttgggttaaacttaaaagtcaataaaccattaagtgactaggtacattctggctatttacttcatgaaataatttgtttgcatgtgttttggccacatattacccacaacacaaagatcatctgtgtttattacaagttagaattgattagtattttgaagtaaatgtagaattttgcagtctcatatggtagtggacttgccatccttatctcatgcacgccaggctctggcatagcattatcacttgctgaaaataagtattttatcttgttttaccgtagtagacatacacagcatctgcaaccaaaagtgttactcactctcttagtcttaccttagttcttcctgagaaactaatgggagtcgtggttgtaaaagcatttagcgttgtaaaactaaagcattctgaatctaaagtgcagctgtaggttgttgatgaaaacttcttttccattagtatt

SEQ ID NO: 129043 - DNA, 1931 bp, Homo sapiens
agcatagtgtgatggtttcctctaatacttcttttcttttttccccaatatcatgccatagaaatattttgaggtgaaactgtttgaaatatcattataacagatactaaggggagatttcttggtttaaatgaggggagagattttttctaatctctatttttctgaaaagatgccctctagtgtctgtccctcagagtgaagcagatacctgtattagattcagcttgatcagacggttcactttatcttccccgttgttcattgttgaagtcagctaataaacttatgctatgtggttcatttttcctcagagcagtagaccctctaaaatccagaggatcaaatctgccaaaactgattgccttttcttgaatctgagcagagatctccaagttaaaaaccttgtgactggcttactcaatacaattttaagtcctttttccctctcttttcacagtcctcttactcccagttactggcagctacatgccttaccaagcttgtatcacgcacaaacaaccccctaccattggaacagcgaatagatattcgtaagtggagaattttctgttctgtcttgaagaaaatagtttgtttagtgatgtgctagtaatagtcaaatgtacgtgtttgttcaatgatatgctgagattgctaaccatacaaaatgtctagaatccagttcgtttccagaatttggggcttatgaaagtgaagggcccgacgcaataacttctggataaagcctaagtcctcccttttgttatcgggagatttcttcattcatcttttctttactgccactaataactaagaaaaacattgttaatgattttgaattctgtgtagaccacgttctttagctacctagggatagagtcaaagcagctatactgcaaattcttcatgagacaaaataaaattctgaattagaacacctactaatcttaaatttaaagtcccatttggaacagtagcataaataattaagacagtttgggttaaatagtctaaatttataatttcttggccatttagcatgtctaaagatatacacccttctctggcagagctttctattatgtggattggttttgtttcttgtttttttttaatagggaactatgtgctcaactaccttgccactcggccgaagttggctactttcgtgacacaagcacttattcagttatatgccagaatcacaaaactgggctggtttgactgtcagaaggatgactatgtcttcagaaatgcaatcacagacgtcacaaggtttttacaggtacagtgtatatatttgatgtaatgggaatgggagaaccagcatatacatatatataaacacacacacacacacacacacaacttaacacgcttatctactttttaaacatgacacaaaatagaattatatgatatattctcttctgcatgttttttacccttaataggtcttggtagtgtttgcatgttggcaaaaacaaaccatgtctcagtctttcaaattcctacatatggtcccaagcaaaaatatgtttaattaattagttaatattttatagatgggcatttctttcgagtgttaaattaatacttcagtgaatagcccagtacatatattttgaataagtgcgtttgtagggtcaattcctagccttggaaagatatttccaagttatcctcaaaaaagttatacagcttgcacttcatgatgatgttttcgtcaacagtagaccacatatacaacagcagtcccgtaaaattataatggaactggaaaaaaaatggagcctagtgatgtcgaactgtcttaatgttgtagcacaatttattttttaagtaaatttagtgtggcctaagtgtacatatttataaagtctgtagtggtgtacagcaatgtcctcggctttcacatccactcacca

SEQ ID NO: 129044 - DNA, 2033 bp, Homo sapiens
gggatacacgggtgaacaaaacaaagtcttagcccacatatgctaacagaagaagacatatcaggaaacttacaattaaatatactggtagaatagattttaaaatagctgtaatatttgctatatcatataaatactactatatgaataaattacagtaagtgatataaatatatgaaacatttgtataactttgctaactatcggttagttgtgctgaatgatcagtttgacagacgtggaaatgaaaatttcattagatttcctttgattggtaacaataagaaaacaagtcagtcacgtcttaggtcgtgcccacttctgctataatgagctttacagcctcagtgtgatcctcctgggcttctgtttcaaactctgtccattgaggctaataatgtcatctcatgtgattattattgtgaacatatgagataataaatgtgactgtcccttttcaaagtgactttaaaaaattgtttctgaacattatgcagacgtatcattctgaatcatgacctgcagcccagaagttaaaaagtagattctaccccttcccccatgccatctcaagtatacatcattcttgaagtatgttaaggcacattttacattttatttttctcctctgctactgccagagtttatcagacccaaacaattaccatgagttttgcagactactggcccgattgaagagtaactatcaactgggagaattggtaaaggtggaaaactaccctgaggtcatccgattgatagccaacttcacagtgaccagcctacaggtttgtctttgattacttgtgtcttccttcctaaatactggaatctcttgcttgttggttttaaccatgtaagaatatatttttttttcttggcaaaggtaaccataagtccagtatagccctacagagtagttactattgtggcctgtgatttacatttacacaagtgcaagtagtgtggggagaggaacatgtgggaattactaggataatatttagattcatcccagagagaattagctcatagtcaccccaaaaaagccaaggtcggaacagggagctagacagaagagtaaaaagagagttgatgccctctctttcttagtcatgtaatatagaacaatgggtctcaaattttatggcttgtatcacagtcatctaggggactgatgaaaaaatatagattcttgagtcttatccccataatttctggttcagtaggtccagggtagagccttggtgtttctaacaagttcttcaggtgattgtcatgcatactaatggttgagacccacttacatatggctttccttatggtaaggcttacacagccagcatagagtagcccttctcattagatgcttaatcttgaaaatactaataaacacattaaactagatgccatacacagaacaaagcccacaaaagtctatcctctttttttaaaaaaaagaaaaaagtctttatcttctgtgtcagtggcatgggactaacacgtacagaaatgaaaaatatgccttctgcttttctacttttctttagcactgggaatttgctccaaatagtgtgcactatcttctgagcctgtggcagcggctggcagcctctgtgccgtatgtcaaagccacagagccccacatgctggaaacttacactcctgaggtcaccaaagcctacatcacatcccggttggaatctgtgcacatcatactgaggtaaggaaacttagcctcattcattcccgcaccagtggcctgttgtcacacttcctagagatcagacaccccattggcaaagaggtactcgaagcgtgtctcattggagccactactgttcatggttcttcttccttgtcagcagagtagcatgagagcataaagcctgatagaatagtcttgtctcttgaacatttatattctattcatattcccccttttcactgtccatagcaatatctttgaatagagtatatccatataatgtttgtccttgccgctgtttttctttcaatgtgagaaacattta

SEQ ID NO: 129045 - DNA, 2890 bp, Homo sapiens
agtgattttagctttttttcctggccctcctaccacccacacatacactttctcgacacataaaggagatatgtaaactgaggtcccgggtattgctacagcaaagacggtggtcctgattcccacgatactgccagattatacttacgtcatcagagtggctctttgagatccagatgatgtgagttatggtgaagtcacctactgctactcatactgcagataaattagtagtagtgacaacggtagcctgccttcaaaaaaaaaaaaaccttcagatcctcaaggaatgactacataaccattggcttgaaagggctcagtaattctctgattactggcttgcattctgcctctaactcatgtttttacctttaacttcttttctttttttcaatagagcgagcacttttcatttttgggtattaacaatcagtccaacctgacagacatgcggtgtcggactaccttctacacagcacttgggcgtctcctcatggtggatttaggtaccgtaagaaatcgtagtggctcatgaagtcatctggcactcttctaaatttttatttgaggactgaaaactagatgttggggaggccttttctgttttttcaacagtaacaaaactatctgaaataacagcctgatttcaccaagaacagatcatgctgtcgaggtccttataactggaagagagtaacagtctgctcctgaagttttcatctgatacgcagtggctttaaaattctcttcacattcttcgggtgttaaataagggaattgagattcctaaatgtatctttttggccagataacttctccaccccacaatgaggtgtaaacccacttgaaacagtcaacaccactttttattatccagttttctagcacagatgagccagaagggctttatcacttttgtagcagtagtggtgatattagcagtttcaggtcagttaataactaaagctcagtggtattactctaatttcgagctgtttaaatttaatcctactaaaatgacataaaaccttctaggtttatgagagatgactttttaaaaaattaagtgtgaatgaaacctccgtacccattaaagtttgagtctcatctggttctcatgcacaagcttcagtcctttctccactgactcgctaattctcagcaaggataaataaataacatagtaccttacacacatatgaatctcttgatactgtggctcagcatcaacaaacctagcctagactaggtgatttctgttgtcatcttctagtttaaaaattctgtttctatatatacatgttgctcttacattgctactaatacctgttgggataataaagggacccccttgagttcccctgggtttgctcctctttcatcccatcttcccatatatgcacagctttgaattcttggtattggggttacaccctgggatgtttcctttacaggagaggatgaagatcagtatgagcagttcatgctgccactcacagcagcatttgaggctgtggcccagatgtttagcaccaatagtttcaacgagcaggaggcaaaggtgagtgagtctttcacccagtaattaatcagcttctggtttagggcagtctctgattgaaaatcgtgcttgactgtaaactatccactgccatagctttttttaatgtcttggacttctagggttttggaattgcagaaccagtatagatttgtaaacttctgtttttatattacaatgtatttacttaagtagttcttaggatttttttttgtctgagttttcaaatatattagcataaagttgtttacagttttcttactgcatttttaatctcggttttatctttaattgcatcccattttcatttttaatactgctcattagtgacaagttaggttttcttaaaattgtggtaaaaaacagaaagtttaccatctttaccatttttacatgtacagttcagtgatgtcaagtttctacattgttgtgaaatagatcttcagaatccataattttaatatggaacattttcattattcagttttttgtgatttctaatttccattgagatttcttctttgacacttgagtcacttagaaaggtttaagaatttccacatatatgggtttttatttttgattttttttagagacagagtctgactctcttgcccaggctggagtacaatggcatgatcctagctcactgcaagccttgaactcctggctcaagcagtcctcctgccccagcttcccacgtggctaggattataggcacgagacacgatgcccagtgaatttccacatatatggaattttaagttcttgttttctagctcttagaattgtcatttcttgattgttgctttcttcatctttttacttcatacatactgttctcttgacctgtatagatctgtgtccaaatcagaagacaccaggatgttactattggtaggactttttacagtattcctcagggcaccaaggctgaatggtagaactaccagctagccagggtattgccagaaaaaaatgccaggctttacctagcattctaaagctctcctttttcatctttagccttttctttttccatctacaaatcagcagggtagacagaaagcaacaacacttaatgcaaccctctctcccctaattatacttgtattttagagtctgagataggtaccattcaaagcttgggttattgtggaacatattaccaactttaggctagagtatcaaccaatatcaaggatttagggatatcagtgaatatcagccctttttcccattatatggtattagtttcatgtaaagcaagtaaaattaaccaaaagaacaaccttggtaatggactacagctgtcacccacttctt

SEQ ID NO: 129046 - DNA, 1079 bp, Homo sapiens
tagaagtgatgaaaggacaaataacagtatgaaatacatcatgctcttcagaagaaaggccctatgtaaactaaaatgtattatgagatgcctttcacaggttaaagaacacaaaatcactttagtatcttctggttagaaagactccaagattagcaagcaagagacaggaacttaaagaactgtagtttgacaagtttttgcttggctagtgctgaaaaactattttaaattctgtacctttctggaatcagaaatctttccttagcttctcatttacagatatccatcctatatgccaattctccaacgggcaattgagctctggtaccatgatccagcctgtactacacctgtactcaagttgatggctgaattggttcataataggtaagcaggaggcagagcttgcaagggcacatctgccctgttatctgagagaatttgctgtatctagtgctttgggcagattgtgggaaataataagattcactactgcattttaaaattcgaaaagtttttgtgtttttgtttgtgtgaaagaatagtattcctaactacacaaaaccatagtcaactgcaggaaataagtcactttttttggtttgtttgtcttgttttttttgaggcggtgtcttgctgtctcccaggctggagtgcagtggcacagtctcggctcactgcaagctccatccccctgggttcacgccattcccctgcctcagcctccggagtagctgggactacaggcacccgccaccacacccggccgattttttgtatttttagtagagacagggtttcaccatgttagccaggatggtctcgatctcctgacctcgtgatccgcgtgcctcggcctcccaaagtgctgggattacaggcgtgagccactgcgcccatctaataagtcacttttaaaaagagtctccagtggggcatggtggctcatgcctgtaatcctagcttcttgggaggccgaagtgggcagattgcgtgaatgcagtagttctagatcagcctgggcaacatggtgaaacccacctctacaaaaaattagctgggcatggtggcacaca

SEQ ID NO: 129047 - DNA, 1034 bp, Homo sapiens
tgggattacagacatgcgccaccacgcccggctaattttctatttttagtagagacggggtttctccgtgttggtcatgctggtcttgaactcccgacttgaggtgatccgcccacttcagcctcccagagtgttgggattgcaggcgtgagccaccaggcctagcagaattaataagttttaaaacaaccttatggagtgggtaatatttaaagaggctataacctcccaggagacttatattcaagagttactcatttataaaatagatacttgagagcacttactctttgccaaactttcctagccactatgccagacaaaatctctaccctctttgatgttacaaatggtggggaagacacacaataaaaacaagtatggaagatctttccagtgattaagtgccatgaaacaaaataaaacaaggcagtaaaatagaggggaattgaaggacaggagggtcagggaagacctctcagagaaggtaatattaactaggatctaaatgacaagaaagattctggtagccctgcaaagataaggagtcttctaaacagaaaacatctgcacgagtcctgagataggacaggcttgctgggacttgtggcaggagcctggttggtggggggaggctgtgggagcaggtcagaccagtgagcagagccagatcatctagtgccttcgcacagcagtagtgaggagtgggcatttattctcattgctgtgggaagccgctagagtgttttcagcaaaggattaaaatgatctcatttaagttttttaaaggctaccatgtgaagaatgggactaaaggcaggtaagagtagaagcagagagaatgtaagggaaaggtggatttggggtttattttagagttagatgttgatggattcagtgtggtgggggggaggaaggaggaaggactcctgggcttttgaggtcttaccaacttgaatctaataaagctcatcaaaatgtggagcagacaaaagagtcaggaacttaaaaccaagatggttacaaatggcctt

SEQ ID NO: 129048 - DNA, 1642 bp, Homo sapiens
atgagctgacacctccttggactctacctgtacagagcagcgtccctttggtttggcccagaggggcgaacaattgcaagggagagggcctggctgatcctggctcttttctccaggggtgtggggaaaatggcaaaggtcaactagctgcttccccagggaataggggtgtgagtacactcactagggggcagggcgctgctggttcctgggggactgggtgggaagggtggtgggaggagataagagatacaaactgagactccagcctctcctcctggggccacccaagtggggagaacccctagtgtcctgccacaacctgccttgtataaacatgtacattttttcataacattttgaacaaggtttatattgactcaagtttaaaaacaaaaagtgtgactgaaaaatttttacagagtctagtgcaccaatgctgatgtgaggggttgtgtatgcgagtgaagaaaatgtgtattctggtggcctgaagctttactggacaaggatgtgtgagagtgcagagatatatttagtgacacagtagagaggcaaaaaaaaagctaaaattccaaatgtatattttttcgtattgccctgtcctcacccagaaatgatcaattcctgttactgtattaacccttgttattaggaactctaagccatgccagaacaccgtccctccccttggaccgtgtagattctgccctgggtccctagccccttgcagtgataaataactccagctaaaagtgtttggtgttcttatctccaccctctttcctactttgcttaccctcatcctcagacagatgcctcttgcttttaaaagttggatttaacgacgtgttgtagggttcttggtctgtgtgaaggcagagaccagagagaaggaagtgagcccactgctctcctgggagcaatgtgggtgagtccaccagaggccctgctgtgtgtggccaataaattttagtcttccccagccctcgaggcagtgtgtgtggatgtatgcgtgtggatatttatatatgtaccctgcactcatgaatgtatgaactggaggaagttactacagtggaagggttcttaataacaaggtctacctagcatgaagtatttaacattctcccatcccttaaaaaatatacatttttataaaatgaaaaccataataaatgttttgaatattaaaaaaaataataacctacagaggaaaattaatggagacagctatttgccttgtactttttccacaattgttgctgctagttgtacacatctctagttcagctcttgcccacgggacactcatcaattaggttttatttttatttctttcctctacccccagaaacaagcctgttaattttttttccttctcctctggcgactgtgtgatgaatcctttcttgcgtgatcaggttgcggatagacttgtaagggtgtttgctgcatacagtgtaagcattgtgaccgccaataaacttcaatggtttctactgacctggcttcagcaatcatgtccagtgtgcgtccaaggacatgtctcactcaaaacacatgaagctgtgtgaaacattctttaaaagcccgtgaatgacaggggccccttcacctgatcaaattgacttgtttctca

SEQ ID NO: 129049 - DNA, 1013 bp, Homo sapiens
caacataagaaataagtttttcattctctaaaacattggctttattaagggactttttcccctccccccaactccccactggaaaaaatgttttagtaccttttgaaatttcaactaagtacatcaacagaccactttccaaaatatccatgcttgtggggtaacatgaattaaatctagaaagccagaaaaactccctatatcatatttgccaccagccaaccctgtccaggccaaccctagcccaagatttctggctagacctacaagcctaaattgacatataatgctgccaaaactctcgaatgccaaaggaaatatagttatagggaccctgtaaaagccacaagtttgttgattaggccttgaaaaatgtaagtgattataactacttaaaagtcctggtggttctttaaatattttttaagtatttgaaaggatgaaaatgtgttcatcagccataattagatactaggtcatgtgtaaaaagattcttgcctctgtagcttgtcctctgggtccattacatttatcttgggtgtcttcaccctgaactcactggtcgcctgccacttgggtgcttttcaggaagagcagatcaactaaaggaatcagctgccagacaatgggacgtgagactgtcaaggtagaggatgacatcaagtttggaaaatcattccccttcctcagaaaagccttctggttctcaggacagcctgactgctaccctttgtcatctgttcatcaaatacttattcagcatctattatgggccaggtatctttttgatggtcaggaatggaaaaggaaactcaaaagcagaaaaagtcacttgcaaggcaaatttgcctccattcttctgtttcatgatcactcagtaatacaaactgactctaaaacatagtaaacagtacttacaaaagcaccatgcacaattattttaattctacttgatagccatgaagacaactcagcgcacttaagcatacggcagcatgcatatggcctaaaag

SEQ ID NO: 129050 - DNA, 1024 bp, Homo sapiens
actctccattgggattcttcctagatctccatctgtacctgccaacccacctctgacccccaacctgttgcgcccagtatttgctgccgatcaggacagccttaacccctccttcccgggcaatcagctgctccaagccaagcccacccctgccccctggagggaggcggctccttttaaggctgcttctgggaatttccactccagagccagaaccagagaccccagccccacttgacacctgcggctcacccttggggaggtggggcgccagacctgagtgcaggagacgcagacctggaagggctccccctccctgacctgccacacatcgagtttgtctgcgtcgagtttggccagtctgtgagggtcaggaatagagcaggagacagcagggccacctccttcagaaggcccccaccgctccatccctgcactgggtggcccaggagagactggcagcccagagggcacagcgcgcacgcccccacccgcatctgctttgcagcctcactggccaggaaggtggacacctcatacctcagtctcccaattacgccctcctcctccccctcctcctccctcttttctctcctcctcctcccctttctctcctcctcgcccccctgaaaacctgtggctcggagagaccttggcttctctgggactctacccctggggacttcccacatctgctcctgagcttgggggcaggggggcaaccgcctgaggaacctctccagcgatgggagccgcccgcctgctgcccaacctcactctgtaagtgtgctacctctcccactggagtttcgttgccatttccagcctcagggcagccctcctcttcccgggactcccacgcgtgcgtgcacggggctggcagggcgggggcgggggcctgggtgcaccctaggcttgcagctggcacccacacctgggcttacctcctctccccacacaggtgcttacagctgctgattctctgctgtcaaactcaggtaggcgggcattcccaccggctttc

SEQ ID NO: 129051 - DNA, 1090 bp, Homo sapiens
tctgtcctccctctgaggaccctccccacttcccctgggtctctgctcctcttcctccctctccatcgggttcccccagacttgagggatggagcctggagcggttggaagcaggtggaggtgatggctcaggtgaggcttgggtttgccagtacctgaaaggacaggttttgatgcaagaccacttgtatgtccttctcgccaccccactcccatcaatatggatgcctggggtgggggtctcgtgagcatgtccagaatgcctggccagggtgaggtgactcctcacctagagggcacagaggtcaagcccaaagaggtttgtttgggacgggatgcagggttcgcttctccacactccccccaccccaagtcggccccccacctccctccatgcacacctcccacccccaagtctcagcccccagtgcgaggcttgctcccttttttgtgatcctccataaaagtgcagctattaaaatgcactggtccagaaccgctctggggagagatcgcttggctttcccaggccagaggcccgcttctcttcatatccagtggggactttttttgaaggtaaatgccttttctctgggagagggaaaggggcagcctttgaagcagtgggggggtgggagagggagagacaattcccccccccttccttcccccttttgctccagccccgttccaggccttttgcttcacacatccagggggagccagaagaaagcccccagcctggctgggagggggctgggggtgggcccaacctgttctggaggggaactagcacaatggtgcggctggccgggcgtttatggcctggctgaggccccattcaggactcagggaaggtggcaaagcggtcctttcccccttgaagtgccccctcacccccctgggagggggggccagcaggccggaccacagccatgcttgaggggctgtctgacaagcagctgtctgcagtggtggaaggggaggtcctcccgcagcgggaacatgaaagggacaggctaggtcccgcggggagagggacttgtgggttgtgggctgtgggggggcgtggggctgcttttgtgaaaag

SEQ ID NO: 129052 - DNA, 1173 bp, Homo sapiens
gtttttattttagagtccgggtcttgctctgctacctaggctggagtgcagtggcacaatcatagcccactgcagctttgtactcctgggctcaagcaatcctctcgcctcagcctctgaagtagtagctggcactataggtgcatgccaccatgcccagctaatttttttttttttttttgtagagatagggcctcactatgttgccctggctggtctcaaactcacgggctaaagcgatcctcccacctcagcctcccaaagtgctgggattacaggcgtgagccacggagcccggcctggtttctctatttaaatgagtccccgggactctattagccctctgaggggactggcaagccactgggatctgtggggctgatgtcaggagtatttctccagcaggcatcagtaagagcttagcatctacctgacactgcagcctctgggtggaggactaagagctgttgagggtggaaagtggggcacagatgtaagacaggaactcccccaagttcagtggggccagtgggctccagctagcaagatagacactaagcagctgcccctgtgaccaaagcacacggtaggccgggccctgctgggtgggagaattccacttcgtttgaaaccaggcaatcccagcttcccattcggctgtcgctgaccaaataacctttggtttgcttatctttgtcaagcctcaggcttcttgtctgtagaaatgggcacagacccctgattgcagacagagtgggatgggtggctgcactggcacccttctttcttctcattggaggctgctgcctcctctcccatgcccagcagcacccctcacctaggctgcatgagcatttcagtgctaagggcccgtgcatgctgggaaatgccgcaggtccttgatcttcacctacatctcaggaagctgaggcccagcctggttcaggaccgctaaacgacaagcctgcaactcagatccacaaagcgtgttcttgttggccactgttgcctctctaaataggatgccatctcaccaggcagagttccctgggctcacggccccgttgttcccgttgtccctcctcagtcgtccaaaataggccgtaagggcgacaccccagaccagggtaggtggacaaatgcccttcctgtccttgcttctcccgcagccca

SEQ ID NO: 129053 - DNA, 1021 bp, Homo sapiens
cccacttcatcaagcgcctctaccaaggccagctgcccttccccaaccacgccgagaagcagaagcagttcgagtttgtgggctccgcccccacccgccggaccaagcgcacacggcggccccagcccctcacgtagtctgggaggcagggggcagcagcccctgggccgcctccccacccctttcccttcttaatccaaggactgggctggggtggcgggaggggagccagatccccgagggaggaccctgagggccgcgaagcatccgagcccccagctgggaaggggcaggccggtgccccaggggcggctggcacagtgcccccttcccggacgggtggcaggccctggagaggaactgagtgtcaccctgatctcaggccaccagcctctgccggcctcccagccgggctcctgaagcccgctgaaaggtcagcgactgaaggccttgcagacaaccgtctggaggtggctgtcctcaaaatctgcttctcggatctccctcagtctgcccccagcccccaaactcctcctggctagactgtaggaagggacttttgtttgtttgtttgtttcaggaaaaaagaaagggagagagaggaaaatagagggttgtccactcctcacattccacgacccaggcctgcaccccacccccaactcccagccccggaataaaaccattttcctgcaaatgggttatctgaagcggggcgggggatccgaccaccgaacacccctggaaacgagcctgcccgtccccggccgggcgtggccacggcaggtgcaggcgcggcccgcagcgctggggcccccaggaggccgcgggctcggccccgcgggaggcgggcgcgtccaggccgggcggcccctccctggcgcgggctcgggtttcctgggctcgcgcggcgcggcccgtgctacctgttggggaagaaaacccgagcccccggaggggccggggccggggccgggacgtgcatccagccgggccccgggccccaggccccaggcccgag

SEQ ID NO: 129054 - DNA, 1002 bp, Homo sapiens
ctgcccaccgacgccagcctgcttggatgacttgcctcgtttcataattcacttactgtctgcaccagccggcctccagcctggctggaccctgctgcctgtgtggcccggagccagaggcccccacactcccagctgctcttctacagatgccatcaacgagcaggactctgggtggctccactgtctaaggttagcacgtgggacccccaagtcccacattttgattgaactgggatctttggtactcattgaaaagagcacttggctttggcctcaggcaggccggggtagggattctggcttggcttctatttggggggccttcggcaagttcacctctcagcttcatttttgctcatctctaaatgaggagaatgtcgttttgtgtgaggtttagagacgatgtatgaaagtcccaagtatacaggggctgccaccaagcaggtagtggttggctggaaacaggagcacagctagaccaggggccctccaccccgaagttgccattctgcctgcggaggcttcatttctaaaagtccaggggagccacagtctggatcagtttctgcctggaagaagagcgcgccaggatgagtgggcacaaactcggagggcccagtgggcgggtcttatcacccacatcctggggagctgtggagaggagagggtggtgggtgaggtggggctgggctggtggctcagataaggcagggacacacagctgggggagggtggggctgagatggagggcgagcggctggctggcgtccgaccagggccaggggcagctgagctgtcccttccgtcacctggacctgccttcctctgtggtgctctctcttcctccctccctcccctcttcctgctgcagctcgccctttctatctctttgtgcacggaggtcgctgggaccttggggatgcaggcacagacaggcggggtgcatggatgggagaggggtctggatgggaggaggtggagtgagctggcacttgacct

SEQ ID NO: 129055 - DNA, 1597 bp, Homo sapiens
tccctgcccctcaccccagagggtgaggaggaatgaggggcattggtggttaggccggttggctgtcttgaacagctggagggaagatgcaggggtgggaagcggccaggcagaaagagctccaggctcttgtgtcgcccacccagccctcccatactcactcctgacagctttcctgcactgcagcctcctgctcctctgactctagtgggaacaggccccagctcagcctccggcagggaggtcacccctccacttcagcttgccctgacctccgctcgcaaaccccgagcttccaagccttttgctccagccctgcggcttccccagaagcctgggcttagggtggagatgccgcctacacacgatcctggccctccacctgcctccaggccacgaaatgggaattccagcactaagccaggcaccgggcagaagctgggccttccgcctcccttggatggggtcaagaggccaggcctggcacattttggagtgtcctggctaccagctctcacctacacccacgcacccccccacacactatgctctctcaagaatgtaatttattggggcccccccagctgctttcctcacctgcccctgccctaccttacacccccagcttgacttctttccagtccacgtgtgtatataatgatatctatatttttgcccaggtctgggtattgctcctgcccagaccctgacatccctttccactgtgtgtgtgaccatgctgggggagggggactctgcttggaattaaaaggttgcattgggtccctacatctgtcttttccttatgagccaccagacctgggtgaacgagacaagccatatcaggcagagggaagccctgggagcaagggttccaatgcaggggccgcctagggctggagggctggagacacagccccgcagtactctttcccccaagcctgggccacagaagcaggggctgtctagacaggggcctgtctgcctctccttcagggactctgtgatgggggcaggaacccttgtgtttggggccagagggaactcacacctcagggaggaggctggtagagaactggctgggaggaaagactgccccagccctccaccaaatcccaacgtgctcgccttggtagccaagctcaacatcagacatggttgtccctcccaaggggcagggtgctcatggttcaatggggaggccgaacacagaaaaggtcagcaggatgtgagtgtgtggtgagctgattgccaagaatcaggcaggggaaactaaggaatggagaaatggcagttggaggacgagtcaagtggaggccaagggaggaagatgggaatttggtcttggttgacttggtaaggcctcccaaggggaaaagacagggaattgcgtgttgcgggtgggaggtgggagaggggctgcggatctgacgggaagaccagaaggaggactgcctgcaggtgtgggtgcttacgtggggaggggccagccccacctggctggagcagaaccatgtgtgggcacatgaagaggcgtgcagtcagagggaccaggtgagttggagggtgcgcaacttgtgaacctgcgactggagct

SEQ ID NO: 129056 - DNA, 1035 bp, Homo sapiens
cacttgggaagctctcccgcattcccatcctcacccttccctggcattttccatctccagcacccgcctcgtggtgccacagtcatcgctgtatttatgggtccatctccctacctggaatgtgtgcactgcgaggcaggggcaagtcctaaccacctctgaggcccctgcacccaaaggcaaggcgttcgttgaattgtactcagcgacaccttttccacctaccaacaatggcttagtctcatacttggttcttagaaaaccccactcctggctgggcgcggtggctcatgcctgtaatcccagcactttgggaggccgaggtgggaggatcacttgagtccaggagatggaggctgcagtgagctgtaatcacaccactgtactccagcctagatgacagagtgagaccctatctcaaaacaacgacaacaaagtctcctggaggaaatggcacctgagcatggttaccacttctggtagcacctagggcttggagggaaggaggtggaggaaagaatgtgctagaagtggtgtggattaataattcagggccagtggggaagtccctgggggcagagctgggtgtggggcaggaatggtggagctgaggcctccaatgtccctggaaggctttgctggagaggatagtttctacaaggaggctctcgacagggctgtggagtaagcagggggtagctgtcgaggggcctgtctcccttccctgggggggccctctccatggaagctgctccttgcttctcctgcccctccttggatccttcccacgtgaagccttccattggggcctgttgccttcaccctctgaccctgttctctccgtggtcagcaggccaagggccagccgtgacagaggacagcccaggcattccacgctgctgcagccgttgccaccatggactcttcaacacccactggcgatgtccccgctgcagccaccggctgtgtgtggcctgtggtcgtgtggcaggcactgggcgggccagggagaaagcaggtaggagaggggctggg

SEQ ID NO: 129057 - DNA, 1685 bp, Homo sapiens
ccgctgctgtgcaggctgccaccaaggtgctctgggcccccagccctccagcagcccccatcccacccctaaggccctttgggctcattcagctcctctgccagggagcccagagatggcagccggggagcaggggtgagaaggtgacgggggggtattggcagaagcgtggagctggagtcagaccttccttcctggctctggcactgagcgtaagcagcggctcctgctctctgactttggtttcctgttggtgccacattggcgcggggccagaagcttgctgagcagttttcacttctgcgtctcagctccggtgattagctggttggccaatatccctgggcagcctccccgctgaagcctcttccccctcgcagagtcagggggcgctggccggcaggctgcggagcttctccatgcaggacctgcgctccatctctgacgcacctgcccctgcctaccatgaccccctctacctggaggaccaggtgtcccaccggaggccacccattggtgagcgggcagaggggcccagagccatgccaggagggatggcttccttcactcacaccatggcttcccccaaggctcgaggaagggctggcctggtcgcaggctttcagcttcacctcctcctccacacagggtaccgggccgggggcctgcaggacagcgacaccgaggatgagtgttggtcagatactgaggcagtcccccgggcgccagcccggccccgagagaagcccctaatccgcagccagagcctgcgtgtggtcaagaggaagccaccggtgcgggaggtcagtgtgggaggacgacaggagggaggagggctctgctggctggtgctccccacaccctcatgctgtgcctcccctttccccagggcacctcgcgctccctgaaggttcggacgaggaaaaagactgtgccctcagacgtggacagctagggtctgctgcatctgcccccttcttacctcgtgccctgcagggctccagggctatttggagggaccttgggctgcacatctggcctgcctgcaccagctgcctgggccccaccctcctgactcctgctgatggttaagggccgggagcagatgctgccaaggccacatgcagggatgcacccacaatgtaccaaagcaggctgggcccagggttctatttattgccttgctctgccctctcccttccccggttgtgggacaagagccctccctgaacccctgcaaccctccctgaacccctgcaaatgaaaccaaacgtccacctgggtgtgttcattccttcctgtccttcaaagtacttgatagcctttcataaggcctggcacatgtgtcctggttgtgtgtgtgtgtgttggtgagtgaggtcaggtttgcgagtgttttgataaataaatacataaaggggctctgtttctcctgattcttactcccgttgctcgcctcacacccttgaaatgggacagcccagtcctagcctaggtctaaggctgaaggagcccagtcctctgggggagacagaaccattgacagagagttgtgatgcagcacatggtttcacgaaggagcttttggggagttttgagagcactgatgggaaagtggggacgagtccagaggactggtcagaacccgaaacttcagttaggccttggcaggaaggtgcagctat

SEQ ID NO: 129058 - DNA, 1050 bp, Homo sapiens
gcctcgtgaccttcatcccttcttcactcactcattcaacacggagactccaggaggcatattgataccagtgagaccccagggctgtgcccttaaggagctctgggctagctggggagaagaggtcccccaatgtggattagaggcaggacctgctgtatgattcagggaggaaaaaaggcagttggaggttttttttacctgtgtgaccttgggcaggatattctccctgaacctcagtttctcatctgtaaaatgggcacagtaacagtccctccgccacaggcttcacatgaggattgaaggagaaatgaaagaggggtccttagtcagggaacagcacgtgagagacaccagcccagtccatgtgctctgaaggaaggctctgtggggttccagccatcggggagctgggtgggtcttggggctgagtggacaagtgaggctcacagccagcttcttcccttgaatgcctggagtctgtgacaccctttccttcccaccacagaggtggacgagtgctctcggcccaaccgcgggggctgtgagcagcggtgcctcaacaccctgggcagctacaagtgcagctgtgaccccgggtacgagctggccccagacaagcgccgctgtgagggtgagtgcccccagactgcctctgaccctgttctttccctggcaccagcccacctgcccagaattttttttttttttagacaggcttttgctctgtcacccaggctggaagtacagtggctcaatcttagctcaccatagcctcccattcctgggctcaagcaatcctcccacctcagcctcccaagtagctgggactacaggtgcacatcaccttgcctggctaattttaaaattttttttgtagcaatgaggtcttactttgttgccgaggcttgtctcaaactcctggcctcaagtactcctcctgcctcggcctcccaaagtgctgggatcacaggcttgagtcactgccaagatttcttatgcccttggacagaccccttcttggaaaagctagatggataccccaacact

SEQ ID NO: 129059 - DNA, 1049 bp, Homo sapiens
tggacccccagaattccatagatgaaccatgaggtagaaagatgtctgctggcactgagctggccaggtgggggtctgtgcaagggggcctattcctgatccccatcaggactggggcccaagcgctggaacatgggcttccagaaggtcctgcttctccaacccaggatcaggtaggttagacccctaggggccatgggaaccaggccaagaggtggagtccccaagtccttcccaaggtttcttgctcagttaacacatcagagggggcctgatcgagagccctccatgagctgcctttgaatcagccctgcagaaaatgtgggggtgaagggcaccctatgagccatcctggggttcactaaggacaacatctccagtgactgtgctagaagctttggggggcccagcttacggactgagcaaagccttcgctccaccccttcctcacatttgtgccctagaaacctagtccagtgcctggtacacagcaggggtaaaattacacctgccaaatgcgagtgaacgcgtaagtgaatggctggatgaatgagtgggggaaagtgagtcctgaggaaggctgcttcagtgtccggggcaggagtgggcagcctcacctgggagctggggggagcaggttgcaggggggtggggtggaggaggtgggcatgggcccaggcaaggagatggcactcaccctacagtgcccaaatgccccggaaggtggcaggggtcagactgaaggtcttcaggctctttcttctccttcttggcttagggtctcctcggtgggtgtcccaaaagtccaaatagctcccctcctggggggccagagtcagatgccccgggccctgagggctgagcctcgatgcccccagtgggggtcctctgcaggtttcttgtgcgatggggcaatgtgtgtgcacatgtgtgtgcgtgtgggcgtgtgtgtctccgtgcagggctgagggtggggcgggcacagtgtcgaccagggcatgggggcagagcagtaactccaggcctgatagatgtgagtgtcggtcccc

SEQ ID NO: 129060 - DNA, 1057 bp, Homo sapiens
accccgcccgcccccgcaaaaagaaattgagttggggaagccatgcttttcagaggcagaagtcagattgccgtggattgaggagacctgccgtgagagtgtggccatagcgagtgttctcgaaggctagctggaaacaaaaggagagcgatgggctgtagctggaggggcctgggagagctctttcaggatgtgtgaaggttccgaggctgcagagctgagtgagagcgtgaggctggatcatttgtggtgtgagggttcccacgcgtgggcagcaatgagctgcacctcccagaagggcagtccatcctgacggggaggagggacacttgctctgaggcttcagggcagcagggtagcagggtaggtgggtttgcaggtcggagtccagaggttgaagccattcatggtggaaggccctggctttgtcaggaggtaggagagaggtggtctgccactgggagctgacacagtggcttgaggagggggctggatgtttgcagcagttactaaggaggtgagagatggagctggtaaaggccaatccaaagagtatcaagtggtctgggggcccaggtgaggctggagccacaggtggagttttctaagatagtgctgtgcagagccggggatgcagggccacgcagggtgcagaggagcaggctgggtggtcagccctgcagtcagttaagtcaatcgaggaggaaatagtgggagagaatagaaagatcaagaccctggaggtctctctaaaattaagaggccagccaggcacagtggctcatgcctgtgaccctagcactttgggaagctgaggcaggaggatcgcttgaatccaggagtttgacatcagcctgggcaacatagtgagaccccatctctacaacaagcaaaaatgaaaaaaattacccaggtggcatgcctgtagtcccagctacttgggaggctgaggcgggaggatcaattgagcctaggagctcaaggctatggtgagctatgatcgcactactgtactccagcctgggtagcaaagtgaggacccatttttgtttttgtt

SEQ ID NO: 129061 - DNA, 1032 bp, Homo sapiens
agtgtggccgtgcagacggcagtgaagcagagcgatggggagtacctggtgtccggctggagcgagacggtggagttctgcactgggggtgaggccctgctatcacacccctgtcctgctgcttggcacgtcgggctttgctgtggtcaaggcgggtcttcctcgtagtccagcaaacactgatgaacaccttctgtccaccaggcagcgtgcttgggccacaggggagatgcacgggcatgacaccctccctgcctccaggagcccaacctttctcttctctcactggaggcaaatgcgaaccccactaatcacgctggcaagaccacttccattaagaaagggagttacttttcgggcttggtaccagatcacaggcatctttttaaaccttgtggtcaaaggtgcatgacgtaaaatttgccgtctcgaccattttgaagtgtacagttcagtggtattaagtatattcacattgttgtacagccagtctccagaacctttcttcctggaaaaccaaaactctatacccattaaataaccgccccccatttccctctgctagctaccattctactttctgtttctatgaatatgactcctctaggtgtctcatatcagtacaattgtataggatttgtctttttgtgactggaatataccaaaatttccttcctttttgaaactggatagtatttcattgtatggatagaccacattttgcttaatcaattatttgtcaatgtgcacttggtgaggcaatcacatttcacttgttctgagccttcacgtagcctgggaaaatggcccctggtcaatggccccgcaaactctcttagcagaacttaacttgtagactccatcacaaacaaacagtgggcctatgtgtgcttggtccctcacgactcagggtctgcccccacaagattacattcttttggtgttcacggtgagagctgctccagatctctctgtcacacagaagagacacggaacattctcagccccgggcctctgaggctgctggctcta

SEQ ID NO: 129062 - DNA, 1071 bp, Homo sapiens
tgaggggtagaagagcttactgatgtcctggaatcctggggagcagcggaatctttggttagaaagggactaaagcagactttgatccaggtgcatgtgctagcaggctggatgacccagactctctttggcagttcctcgatgaccccggcctgaggaacgacactcgaaatatgcctgtgcagctgccgctggctcactcaggatggctttttaaggaagaaaatgacgaaccagatgttaaaccttggctggctggccccaaggaagaggacatggaggtggacatacctgctgtgaaaggtactctgtcggttaacttctcatctccaattccatggctgctccccaggaatcccgtgcatcaggcatcccttgcatgtgcccctgactgctgctcgtgagcaggtcctcccattccggctgtaagatacatgagctgaacaaagatgctccattctccctcgcagagggttcctgtgttgacagggagcagtgggcctagcctcagatgtccctttttagataagtcatgtgagacttgaacgtgttgtctcttgcccctctgtataactggtgcctccttcccactccctggctgagtgacagtggagcagacaggggcaaagggctggtaacagtgagctggtatggagggtggtcacttgatagcattccatgtctatcacccgggcagtgaaagaggagccacgagatgaggaggaagaggccaagatgaaggctcctcccaaagcagccaggaagactccaggcctcccgaaggatgtatctgtggcagagctgctgagggagctgagcctcaccaaggaagaggaactgctgtttctgcagctgccagacaccctccctggccagccacccacccaggacatcaagcctatcaagacagaggtgcagggcgaggacggacaggtggtgctcatcaagcaggagaaagaccgagtacgctcagacagaggcctgcgggaatcaagtcggggactgggacgggaagtggtgacctgtagtgggaagcaaagccgtgtcaccctggctgaaatgggacaataa

SEQ ID NO: 129063 - DNA, 1044 bp, Homo sapiens
agagtcagaccttgtctcaaaaaaataagagaacgtaaaccgccatgtaccagaactcagcttcagcagtaactgatattttgtccgtgtatgtatttgtttgctgtgggttttgtattttaaccatagcagacagccctaggagaaggcactctttggggagctcattttgacctttgctgtgcctttctcttggggagtagaagggggttcatgaaagatggaggaaagagctcctagcccagtgtccatcctctggttttctccgcaggaagccaaattggcagagaatgcttgtaccctggctgacctgacagagggtcaggttggcaagctactcatccgcaagtctggaagggtgcaactcctcttgggcaaggtgactctggacgtgaccatgggaactgcctgctccttcctgcaggtaagagcctccttaggggcaaggagggaccctttcaggagtgaaggaggattgaagagccactgctaaataagggagggggtttctgggagtatcatgtccccattcacagctctacacgccgggcacgtggtggtggttctcatcactgtctctgttaattggcaggagctggtgtccgtgggccttggagacagtaggacaggggagatgacagtcctgggacacgtgaagcacaaacttgtatgttcccctgattttgaatccctcttggatcacaaacaccggtaaaatgagcaggtggaggaggacggcgcctgtgcccacggctgctgcctgctccagacattttgttcttgaatctgtgagacccagaaggggcccactgagcccactcactccagcctttggcaaccattgttccaggtcccccagggcttcctcccacagcagctgtgaatggcacagtgaccttcctgcagcgtggagatggcacatccttgctgctggggacttggccctgctatttatttttgtatttatgtcttaatctcttccactgatgcatcctccaagggtagatggggagggtctgtgtgaaggggccggcttctcttggt

SEQ ID NO: 129064 - DNA, 1052 bp, Homo sapiens
ttgcttctgggtcctctcagcagacaaagctaggaaacagataattcagcacctatctgtatatatgtatgctaaagaatatgagtttgtactgataacgcttattctgatctaacctcaaaaagttcgttttattttagtctttcccttttcatgatgacttctttctccaacagtgaaaaaccctctcagtcattttcttagttggggtgaaggttattttccactggttttgctcctattatcgtggccctgattaacacacatttccacatgtggactatagattatttgactcaactcgcctttgagatgataacatctggaggcagaggcaagtgtttctgattttacatactctgtgattctgcacccagagctgcactaggatgtactgaatgcttgatcagcatcttacctgctgaataccccatttggatctgtgcccgctcggctatgctctccctctctgcagttcacaactctcctgccaattgtatttgtcttaaacaatactcctttcccgttcctagctttagaattctttgtgagatgagaactgtagcctaatgttagaagctctaaagcctgcccggtccaagatcagaaaccactaccactcatttccataccacctgctcttggtaggcatgtgtcagtagaatggattaattggaagtaaactggaataggacagagtgcagagacccatactgcctggccctgccacctgtgaccagaacttgtcacttcactgctctggggagtggaggtctatcagagcaggcaagtgtgttagtatgacacacttagtggcttgaaacaacacccgtttatcatttctcaattctgtaggccagaaggctgagcattgcatgactggcttcattgctgggggtcctagaagactaaacttagggtgtcagttgggttttcagggcctctgccaggctcagatggttgtggaaaattcagctccttgtggctataggactgaggtcccctgccccctcacccctattttccattgctggctaccaggcaggggccac

SEQ ID NO: 129065 - DNA, 1051 bp, Homo sapiens
tcctgtgccctgtcatcccaggcccatgtgactccaattggcgtatctgtattccaattccaatgctgaccgtttctccagggctggctgttttccatctgatgggctgggtaattctcaggataccaggtccctgggcagcaagccacgctgttcccatctcccttcccagaaagatgcaaaaagtacaaagtcacccactcccccaggcccgggctgctgaccaagtgccagctctcagaacagaaattccatgtctcagttcctgttcccagctcctcggccgccccctaacacccagcagacgctctgtggtgcctcccacggcagaagccttggccgtgggtgaactggtgtgtgcagtggctctgctggccagctcccggctgtggccatggtgactctggcatcactccctcttggcagcactgggccccctcccccagcatttcaggatgtgtgtgatggcagggaaactcaaaatttccatgagccactgagaaattctagaaacagcctgtacttgtggactttcctttttcttcctctgccacagggaagagtgggaatgttatttttggtgggattatcagctggttgaccttctcagggatgtggaaagggaggctgcctgcccgcccgggcctctctcccactgcctgcctttgtgtcccccaccccacctcactttatgttttaaaaaaaaaaaaaacaactctggcgggcgcggtggctgacacctgtaatcccagcactttgagaggccaaggtcgacagatcacttgaggtcaggagttcgagaccagcctggccaacatggctaaaccctgtctctacaaaaaatacaaaaattagccaggcgtggtggtgggtgtctgtaatccagctactcgccaggctaaggtggaaggatcgcctgaacctgggaggcggaggttgcagtgagccgagattgtaccactgcactctagcctgggcaacagagtgagactgtcttaaaaaaaaaaaaaaaaaaatcttggccgggcacggtggctcatgcctgtaatcc

SEQ ID NO: 129066 - DNA, 1093 bp, Homo sapiens
cagcctcaaactcctgggttcaagcaatcctcccacctcagcctctcacactgctgggattacaggggtgagccaccacatccagcccttgaaccagtcttaagtgtgtaacagtcccgcggggagagcctggacaccttccggagggtggatcctgggacatgcatttccctggtgtggctcatggcaaggacagtgtggttctggagcaggcggcttcttgtgccatagctatctggtgggagcacaggcagcagctccatggcatcccagctctgcaacgtgatctttgcaaataggtagctcctgggacttagcctagagtcttgttaattcagctcttcgaaggagcctctaggccatttaatatcctgtacaaaacccctgtctgccaaaatagcctaactgcaccctgatctatacatcccccttgtcatcatcattcaggttaggttccttgttgaattgtttgctttccctactttgttgagggcaggtgctaggtcctttgcatccccaatacctagcatgacttctggcacataattggtaagcagtgagtatttgttgaatggataaactcttggagtgagtttttaaagccagcaggtaatatgctagcttttagttcaattaatgtaaatgaaattcaaggtcagggagttgtttactctagagaagtgcataataggtggtcctgacacctgacttcagatgatctgggttaaagttggtctgtgggccaaggaggatagaatgtccttggaaagtggttctgagctccctgttcttttttttttttcttttgagatggagtctttgctctgttgcccagggtggagtgcagtggcgcgatctcggctcactgcaacttctgtctcccgggttcaagcaattctctgcctcagcctcccgagtagctggggttacaggtacccgccaccatgccctgctaatttttgtatttttagtagagacggggtttcaccactttggccagggtggtcttgaactcctgacctcgtgatccgcctgccttggcctcccaaagtgctgggattacgggcatgagccaccgctcccggccagggct

SEQ ID NO: 129067 - DNA, 1142 bp, Homo sapiens
gatggatgtgagtaccgcgtttcctaagccacatgcccggcctcacggtctgacaaatgggagtgaacttggacgacagggagaattttgcaactgtctgggaagtgttgatggatgaatgatgagaagtgaggtgactctggccctggcctcgggtggggaaaacaccggctggccactgtgggcccttcccgggtccctgcccacctgactcagttgctttgggaagtcccctttgctccagctccagctgggctggagcaagcctggcaaatgtgctccctccctccctccctcctcctggctccagcgcctgggcctggctgtcattacactcactccgcgctcagcgtggggctaaataagccattccctgtttgtctgtgccgctgcctggggccctgaccacccgtctctgcctcataacctcctcccacaggcgctggcacacacagtgggggctcagtaaatattagttggtgaacagcaggctcaaggttctaattttgttccctgcttctgggtcaccagagtttttattattatttttcttagttttcccatcctgcccctcccatcagcgcgaggtttcacaaggagagtgagtgggctccgctggccgccctcctgcactgtctggaaatttcccaccctgggtgcgctttgactgtgccaaggcttgaggcgaaggtcctgggagcaggagctggaggaagataatgcatcctttcagggtatggaggagagcagtaggtgggagggcaagaggaggcagggggagaatgggccgattaagccccggggcagggccaagcgagggttggttttccaactgtgagatttgctgtttgcctgagtgaaggtgtcagcctaggtcagcttgtctgaggggagagtggcttctcacacggtgttctttgggtgagtggggtgggccatgggctggatggtttttctcaaagctctttctacccccagagaagcctgtagggcagtattcagttgatgaccaagctggcagatgtttgggtttctgatttcgtaaactgggactcacacagatgactgtatcgttgttagtttgaccatgaatatccagagtgtattaatcaagcatttgtaaaacatttggcagtttccgt

SEQ ID NO: 129068 - DNA, 1054 bp, Homo sapiens
tagttgggtgtggtggcgggcccctgtaataccagctacttgggaggcctgaggcaggagaatcacttgaacccaggaggcggaggttgcagtgagctgagattgcgccactgcactccagcctgggcaacgagtgaatctcccgtctcaaaaaaaaaaaaaaatcataaccgcattgctgtttgtttttttttttttcatttttcaatctagtcaaaactgttgaatttgtcctttttattcgtttttattctgtgctttcaaaagaagggtttttctcaaaggctaattcaagaaggagcagagaagcagagactgagggatagtctcaacatgttcagtgtgtggcgggcgggcctggcgcagttgccggcacacagggagaggcctcagcttcacctgcctttttctctcacaggtttattcagtcaccatgaagctgctgctgctgcacccggccttccagagctgcctcctgctgaccctgcttggcttatggagaaccacccctgaggctcacgcttcatccctgggtgcaccagctatcagcgctgcctccttcctgcaggatctaatacatcggtatggcgagggtgacagcctcactctgcagcagctgaaggccctactcaaccacctggatgtgggagtgggccggggtaatgtcacccagcacgtgcaaggacacaggaacctctccacggtaaggctcccctgtgagccagcagctctgctcagccccgtctctggcctctcagggttccctgtctagttgggcccagggcagcctggcagcttggcagaggtaggatgaggcagacaagtctcgatgatagagtggacaggctgattctttctctctcattgtctgaatcagcaaattctgagtcttctgcagcaccttctgaccccctgcataggtgttctgaagcccttaacaaaaggcagcctggggctgggcacagtggctcacgcctgtaatcccagcactttgggaggccaaggcgggtggattatctgaggtcaggggttcgagatcagcctggccaacatg

SEQ ID NO: 129069 - DNA, 1036 bp, Homo sapiens
caccatgttagtcaggccggtctcgaactcctgacctcaggtgatccaccttcctcagcctcccaaagtgctgggattataggcttgcgccaccgcacctggcctacttgtatggtttttaggcttccattgctgtttgcatccgtctctccatggaaaaggtgtttctcttggatagcaattttgatagtttccctaggcttctccgcagcatctggtgagagatggactcagcaaatgtttactgatgggttggtggatctcagtctgccccatcacacctgaattcagaacagggccgccccaggcagcaggagtgtccccaccctcagtaatagaggccctcgtctgttcttgttcctccacagtgtggggctttggttttctcagtgtctcactgattaacctggcctctctcctgggagtcctcgtcctgccctgcacagagaaagcgtttttcagccgtgtgctcacttacttcatcgccctgtccattggaacgctgctgtctaacgcgctattccagctcatcccagaggtgcagtagaacagaaacttgcgcgtcctctttccctggggcggcacagctgagccaatcccctcctcccctaccctgggctccaaggcacccaatgactgccacctgagaaatgaacctgtccctcgtatcaaagccacaaacgacttctaactctggatctcagggcccacctctcactcctctggcctctgcaggtgctgtcagatgcaaggttcttccaatttccctcctcctggggacttgacagtctcccctcccttgttaagccccatacataaggcatcaagggaaagcagcagctatcgactgccgtccatgcctttggtgctaagtacttgctctattctaaggagaaatcctggcagtactcaggtctgggcaccaagagcttatccatctggaatgagatggaaggaaaagaggttaccaagtgatatgtagaattggcctaaaaagcgagtgttctttaattttgagcaggccatcgtttctagc

SEQ ID NO: 129070 - DNA, 1210 bp, Homo sapiens
tcaggctttcccagtcaaaagactcacccagaaaagacagcagatgggatgccatgccttgcctgttcttcctggttgaatgtgaaccatcttggtgccatctcaaaattctgcatggctctgacaaacactttgcaggggaggcctcaacttgggctattttttcagctccagcaatggaatatattaattttttaaagatttgaaatgaaaggccttgtgacctcctggaatggaaatactgtaattgtgtgtgctccacccctgtggcctgccagggagtgtctcatcctggtctggttctgtcttgccctcttttgggcctggacagagtgtcacaactgggaaatgttcaaggaaatatttttgtgacagggtgttcctggaactctgttctttgtgcttgagcccctctcagagcacatggaaatgagcaaagaagttgagaggttaagacactgaattttatgggcattgggcatgaattaatcgttctccatcccttctgccctgcacatctggcttggttgtgtcttgcacaaagcaaaccaagtggtcgtggtgtcacccgagcctgcgccgtgtgaattggacatgcaaaagcaaacgcagcagcagagtgatcagcctctttccacctgcttgcatgtcctataaagagagccctcgagtccaaagtctgtcctggacagcctctgtgataggtctgggcagaccttgggtgtgtgacgaggcagcaccctgccctgccagtcacaccactggcaggaacgatttggggccaccagtggccacaggggcagaagtcacagggttccaaggccaccttgaattcctctttcttctgaactgattgaaggaaatttcatcagatgtgaatcactaacaaattttctatttctctctccctccctacttgtctctctctgatttttcttttttgttccgttaatatccaccaaacttttccttgcgacctccctatctgctccaccttcctcccgctaaatggtggttgctgtgcaatggggcatgtgccttctctccctgccctgggtggggctggccctccctccgcacggcagtgtggggatacggtctcctctgtgtgaccgtcatctccctctgctccctcctgggggccagcgtggtgcccttcatgaagaagaccttttacaagaggctgctgctctacttcatagctctggcg

SEQ ID NO: 129071 - DNA, 2800 bp, Homo sapiens
tgtattcaggacagatccagattgggtagggctctgccaagagcctgtgggactggaagtcgggccctgggctgcccgatcgccagcccgaggacttaccatccacaatgcaccacggaagaggccgttctatgaaaaactgacacagactgtattcctgcattcaaatgtcagccgtttgtaaaatgctgtatcctaggaataagctgccctggtaaccagtctctagctagtgcctcttgccctctcctcacctccttttctctcagtgactctggaacctgaatgcagcttacaagacaagcctgacttttttctctgattaccttggcctcctcttggaaccagtgctgaaaggttttgaatcctttacccaacaatgcaaaaatagagccaatggttataacttggctagaaatatcaagagttgaatccatagtgtggggcccatgactctagctgggcaccttggacctccagctggccaatagaagagacaggagacaggaagccttcccattttttcaaagtctgtttaattgcctattacttctctcaaagagaacctgaagtcagaacacatgagcagggtgagaggtgaggcaaggttcatcctgaatgggagaggaagtcgaaccactgctgtgtgtcttgtcaggatgctcacttgttcctactgagatgctggatattgattttgtaacagcacctggtgtttcacggctgtccgagtgagctaacgtggcggtgtggctgcctggacctcctctttcaggttaacgctgacagaatggaggctcaggctgtctgcaagaaaacagttggtttggctgtgattttgacctcctcttccccactgccatcttctaagagactttgtagctgcctcctagaagcacattctgagcacatttgagacctctgtgttagaggggagactgcacaaactatcctcccccaggttgagacgtctgcagagtggcaagctgacttgtagaaatggggtgccatttatgctctacttagacaagggtaatcagaaatggaatcagtgcaggcaaaatttaggatttgccgcttccataaatcaaagcatgactaatagggggtctctgaaatgtaagggcacaaacttcacttagggcatcgcagatgtttgcagaatggttggcctaatgattatgctacagatgggttttaaatgacccgtctaggttactgcttccttgcaaaaaaagtcgaatcctgcattgaattgaatatgaatttctctaactctctccagaaaatggatggagataacttgtctttaaaactgtaggccagccttagccactgtggagcccttgcctccgagctctggcttcaaggggagctcttctccaggttcactaggtgaattgatttattattatcatattgataatgtgagattctttagccactttggggagcctgtctctccagaagcctttcttagtggtgcccacagttggagcccaggggccatgtttgcaaactgattcatgtgcatggctgacaggagtactggttcactaccaatgcctgagcttttctcttacatagaaaaactgtccgctctcagtaatcacaagcagcatccgttttgttttctcttcttgggagacatctgtcaaaccaggaatattcttgaaaagaacgtgagcaggaaaaactgctggtgatactttttttaagttttgtttttatcttgcctgttggcttcaatacatttgagaatacgctgaagagggaaaatttcagtgatggagattctagattaaatatcaggactgatttcctggtgggattatggtccagttttaccaaagaaccaattccttgaatgttggaatctaactttttatattgtcattattattgttgtttttaaacggttctttgtcttttctgttttatttttctcaagctgctttcaggagctagcagaaaataactcaaagttgaagactctggaagattttgctttaacctaactcgcattgatgtattaaatttataattttagcattcccaatagatcctatcattccttaaacataataccctttgtcttggagtagaatactaagttagagttagtggatttctagtttaggagaggagctcaaaactataatctttaacaaattgaaaaatgaaatagggtgttttccctttttgtgcacacctatattaccttaagaaatttccttccatagacagctgcctcaaagggaaatcctctttaaaccgtagttggcgcagaggtcagtcctagtcggagcttaggaggggcggagacgctcacatcgtctgacttgagtcgccactgattgtggcaacagctttgcctcatgagtcaaaaattggcaatttcttttgatttttagttgttgaatttgctgtttcaagcatttgtacatattagaagtctaaggagtagcaagtcagtgggaggactttttcacccctggcattagcagcttcgacctcattttccagatgcaccagctcctattaataagttagcaaggaaagtgtatgtcacgtgcaggaacagtgaggcagggacaggggttctgctccttctcacttcaccaccggcacacagcttgcccctgtctttgcccccaaaggtattttgtgtctagtgtcaaattggagctattcttcactggtccttaaccttgggttttaaaaagaaggcttctctgtttgggtagcgtaagagctgagtatagtaagtcctcttccaaagagatggcaatatgctggg

SEQ ID NO: 129072 - DNA, 1048 bp, Homo sapiens
agttatttaactagaatataattactgctctagtattttttccctagcactttcaaacgttactcaaagaatccttctagctctttgatacaaattttagaacttcactattaacaaatatcagctgggctcggtggctcacgcctgtaatcctagcactttgggaggccgaggcaggcggattgcttgaggtcaggaatttgagatcagcctgaccaacatggtgaaaccttgtctctactaagaatacaaaaattagctggccgtggtggttctcaactgtaatcctagctacttgggaggctgagacaggagaattgcttgaacctgagaggcagaggttgcagtgagctgagatcatgccactgcattccagcctgggcaacagagcgagacaccgtctcaaaaaaaataaaaataaaaataaaaataaataaataaaataaagtaaaataaaaatatatatatatcactactagctaggattttaggaaggctacctatagaaacttagatatatttagttatggaatgttttgtttttcagttggtaatgtacactctttcagtgtttcaaaggaggatactggataattcgatttgaattgtaaatctccccaactggtgttggagaaaccagaggagttgatgattttatacacagtctttcctacctcttattattgagaaaagagtgttaattgtggtcaatgaatttcttcaaagtttgctgcttttaaatcaaattaaggaagtcagcaactataagtagaatgatatgaataaaatgtttcattgttatgaagaagtgttagtagcacgtggcattatgtgtttcacatattgaagttgacaccagaaatatacatttgtaattttttttttttttctgagacagagtctagcactgctgcccaggctggagtatagtggtgcagtcatagctcactgcagcctggaactcctgggcccaagtgatcgttccgcctccacctacacctcccaagtagctggaattacaggcacatgccactgtgcccagaccatt

SEQ ID NO: 129073 - DNA, 1033 bp, Homo sapiens
aaaatgcaaaaattagccaggtgtggtggcatgcttctgtaatcccagctactcagaaggctgagacagaagaatcgcttgaactcaggaggcggaggttgcagtgagctgagatcgtgtcactgcattccagcctgggttgacagagcaagcctccatctcaaaaaaacaaacaacaaaaaccattataatttatgcacacacaaatatttaaaatgactgtcacctttttatacttagaattgatcatttatgatacatagtatcttagaattttttccccacgtactggtgctgtggatgtgaaatcatggtgatttattaggtttaatttgtcatgtaaaagaattgtgttctgtttgttctctatacatttaaatattttaaattattattattatttttttgtagctgtcccctttcctccaacccaacggcttactttcaaggaagtatttgagaatgggaaacctaaagttgatgttttaaaaaaccatttggtaaaggaaggacgactggaagaggaagtagccttaaagataatcaatgatggggctgccatcctgaggcaagagaagactatgatagaagtagatgctccaatcacaggtataaaaagtctttgcatgatacttttttacagtatagatttgcatgagcagttttgagaaataattacaaataaccagctaaaaagtggtgtggtaatttttctagaaattatgagacagtcaggattggttaggatatttgttgttaattgaagaaatacaattttaagtgtctcatatttccagtagaactatttagtatgagtagattgactacagttttacagcagtcctgtcaaaagctggagtgatttaagttagaagttaaactgtgatcccttttggtgtaatgcccttcgtcttctaaggtataatttctcacatcactttatgctttttttcctagtatgtggtgatattcatggacaattctttgacctaatgaagttatttgaagttggaggatcacctagtaacacacg

SEQ ID NO: 129074 - DNA, 1049 bp, Homo sapiens
atgaaagcagccctcactaagttcaggagagctagctgggtgttgtgtttacatacagaagacagctgctggaatgatcacttgccatttggcaggccgaaccctgcaccctaaggtggcccacagcattatcaaaagacatctttgctgtagcagctttctttgtgaggtttgtttatgtatgtgtgtgttttattctttgctgtgctctacgtttcacaaccacaaataagttcctacctctcatagatccacccagtctgtcttttttgtggcctctcattttttacttcatctttttatcttctgagtcattttttctcttgctccttagaacttcctgagatttttgtttgtttaaacaaacttaagccttcatttctgttttttaaaaacaattgtttctttaacttaagacacttcatcctgaattttttaaaggcagcctattaacacatccctttaacttacttattctttgtattctctaaggaagcactacagttcgtaaggagatcatcaggaataagatcagagccattgggaagatggcacgggtcttttcaattcttcggtaaggatgtctgtcattacagtgcggattaaaggcattttgagagtaaattagacgtcgaattcagaacagtttttttataattggaatgtagtattgaaactgcaggtctttaggttgagtgcaaattcaatgaacatgtttaagcgactaaaaatgttccagcaaacattgatttgttagtagcttagatgtagtgaatgtagtggtttagtgtggactttccaacccgattgcctgtgttcaaattctggctctacctcttcttacctgtgtgatcttgggtttcatctctgtgccttagtttccttgcctgtaaagtaataataggccctagcgcacaggttgttaggtgtattaaatgggatacaatatgggaaatgttagaacagtgcctggctgttaaacacttctaattgaaaaacaagaactggctgattgtttaaaatgaaaatatttgtggaaaacatccctt

SEQ ID NO: 129075 - DNA, 1095 bp, Homo sapiens
tgggacttgggtaagaaggaggccagggttggggagtggattctgagttgggagaaacagaaacacgttgtggccaaccatagctgctttaaaatgaaagggctggagagacgaaagagagaggtcctttttattgtgatgggattccctcccttgggaggggaattccttgttatcatcagagaccagaccagacatcaaaagccaggctttctcctggggtctggaattattaaatgagtaaaagccaaatataagtacctccaccaggaaatacaggaaataaagacacagggagccaataaagttatcatttaagggtgttttcttctttttttaaatcttaagattacctctaatttatagtacaaaagtcctaacaaattaatttcttgttcacaaaaaagacattagatgatttcggccaataagtaacatttccctcgccttctttaacataactgaaagcaagaaaaagtaggcaatctctaagcacaagcaaataatccatcattcagaaccttgaaaaaatatcacaccaccaactggtctgacgtcttgaccacctcaccatttaggaaggaatactggggccccttcttggaaaatgcctgctgacagaactattgggaaaaacagctatgggggtcaccatgcactgagaaaataaaagttagggatttacagtgtcatcctcaaaaagttctgtgacaaaaacacatctttattgccccaaatcaagatctatgacaggcctgctcctcattacatgcatttcatgttaagagtatttggagacatctacgtcaagggagtgaaggaatgtgggcaagaacttactggaaggcagtgtgcttggccctacttcagagctgctcagagggacagtccgcctccatgtcctcacttcttaatcttaagccacctagacttgccatgagggcatagaagaggagatgatgcataaccctgtctcagacaaaggtgttatttagcaggtcttgccaaggtggcaggggcgtgaggccaaggcctcccgggagggaatatactctccagtatcatctttacctttgtgactgcatagatgaaggc

SEQ ID NO: 129076 - DNA, 1044 bp, Homo sapiens
gatggcagctgggaaaccagagagggctccccggggaccctcggcggcccctcccggcgccgcctccccgccggccaggcctcctcggcagggggccaccagtgtccccgcgcgcgccccgacggacggagagcactcgcacgtccctcctctccggcccagccccggcccgcagtccagatccgagacccaaactccgcccgccccgccgcgcgactctcacggtccggcctccggcgcgcgccccttcggcctccctcttcctgcgccggcgcccggcccggcccggcccgtcctgacccggtcacgagggccgcgacggcccgcgcttctccttgcccttcctcctcgagcgcccgcgccaggcagcagccgggcagggatgctcctgcgctcccgggcggcctcgggcccagccacctgctcgccggggaaggtaggtccgggcaaggaggggcggggagtaggcgaggccggcgggagggatccgtgcccaaccccagggaatcgcacctagcccctccccggggtccgcgtcccaaactctgggaagtacctcccaccagccctcataccagaaaaagcgaaattcaagaaaagctgtccttgtccacgtggccttgtcgctgagaaatacctgggaaagctcttagggccaggcacccaaggtcagggcagtgttcagagcagggaggccagtgcccaccccagcagagccgcctcccctctcccgctccaggggcctctccccgctcccggggctggctgcctgcctggaggggaggtctgaattctgggaggacccctccgctctctgctacatgggggaccagtccccagatgctgccctcttccttgtaagtcctccctaagtctcctgacctggctgccaagagaaggactcggaccacccttccctggaggttcctgtggtggggggcgacacaaggggcagggttgagaaggggcagatgggggcaccaagggtaagcaacctctgactacgggtcgtgggggacctcctgccctacccatcctccaaga

SEQ ID NO: 129077 - DNA, 1022 bp, Homo sapiens
ctgtgcgcatccaggagggccggtaccgccaccccggctgctacacctgtgccgactgtgggctgaacctgaagatgcgcgggcacttctgggtgggtgacgagctgtactgtgagaagcatgcccgccagcgctactccgcacctgccaccctcagctctcgggcctgagcccgccatgccctcagcctgcctcactgctgggccagggtcatgcctatataagttggcatggcagggacaatggtgggcagttgctcttacatgagctaagtttggagacctgaggcccctttgtcctcgctgggtgggccaaggtctgggacctgtcttggactgtgggagactcaccctcaccttgccaggcctctcccctgcaggactggcattgcactagtctgaggtggccactgcctttgatcaacctttgtgtgcgagggtctaagtagggtcgaacacagaagtgggaaggagaggggtgggccaggggctaatggtgtcactgtgtaaagtttttgacatactagctctataaatatatgaatatggacaaaataaagtagatgtcccttccttctttttcctaccgccagccctgggtatgacctgctcccaccactgggtggagggtctttatttatgcaacatacgtttcttcttcttttccctccctcaaatcccacccctgccagttgcctgcacctgacatttcccatggaagggccttgcctcttttaggttgggagtcatgtcattccttaacctttttgtaaagatgcccgttttacaggaggacgcttgtgctatggagggaatgagattgtcactggaagctttggaggggatggtggagggcgccaagcggagggacaggaggaagaccaggagacccatccagccaagctggtgagacaacctctgatcctgaggaccggccgcccaccaagggttgggcccccggggccaggttgatctaccgacaccttccacttctttcctgggagagactgctggcttcattgg

SEQ ID NO: 129078 - DNA, 1109 bp, Homo sapiens
catttcttgaggacttggtctgtagctttcctgttgtgtcttcaaagcttggttcgcagtgtgtgctcattgagtgctgactggaaactgaagcccttgcctgtgaacgtggtgtctgcgtggagttgtcactaaagaagttagtacctccttttgccatgtgcaggtggcgctttgccgagtttcagtacctgcagccgggacccccccggcggcttcagacagtggtggtgtacctgccggatgtctggaccatcatgcctactttggaggagtgggaggccctgtgccagcagaaagctgcagaggcagctcccccaacccaggaggcacaaggggtaaggctgtgccttagccagcagcgggggatataggtggcctaatcccgggacccagagggtctcatttcagctgttgtcacaggaaacggagcctactgaacaggcacctgatgccttggagcaagcagcagacacttctagacggaacgcagaaactccagaggccaccacacagcaggaaacggacactgatctcccagaggcccctccaccccccctagaacctgctgtcatcgcacgccctggctgtgtaaacctgtccctccatgggattgtggaggatcggaggccaaaggaaaggatctcttttgaggcaggtgtcaagagtcttggggaggctgtgggctgggatttgtgggcctgaagcagtctttcttcctgatgctcatggaccctcccacctccccatcaggtgatggtgctggccgagctgtttctggagatgctccagagggattttggctatagagtttataagatgctactgagccttcctgaaaaggtcgtgtccccacctgaacctgagaaggaggaggcggccaaggaagaagccaccaaggaggaagaagccatcaaagaggaggtggtcaaggagcccaaggatgaggcacagaatgagggcccggctacagagtcagaggccccgctggtgagtaccctgccacctcgggctgtcatagtgcttaccgtgaccgcgcacctttaccccgggctctgttccgagcgcttcctgtgccttagctcattccctgcacccttgctcggcat

SEQ ID NO: 129079 - DNA, 1113 bp, Homo sapiens
gccttttccttataacctttgtctgcctctgtagaaggaggatgggcttttgcccaaaccactctcttctgggggagaggaagaagaaaaaccccggggcgaggcttctgaggacctgtgtgagatggccctggacccagaactgttgcttctgagggatgatggagaggaggagtttggtatgttgagtggtgagaggggagcttgcaggcttgggatgtggctttccacctgtggccaagctggttttcatttttgtactgtggagttgggtgggccctgctctccatttatcttggcctttctgtagcaggagcaaagctggaggattcggaggtccggtccgttgcctcaaaccagtcagagatggagttctcttcacttcaggacatggtgaggcctcttctcgaccactctgggtctcagtggtggtgaggcttggcaaggcctctggcccactcctgggagaaggatgcttaccagtgacttcctttcttgatggacccaacacacagtgtggtccttggctcatggaagggcacgttcataggctccaggagaacatttcagtgtctgttggggtgaatgggagaggggtatttgatcctctcctgagagaggagcacaggagcttttgccaaagtgggccagagaggaaggctggcttgggcgtgatgaacatcaggcaaggtgcttgatgttttgttttttagagacggggtttcgctgtgttgcccaggctggagcacagtggttattcacaggcatgaatatagtgcactgcagcctcgaactcctgggttcaagtgattctcctgccttagcctccccagcagctgggacttcaggcatgcatcactgcatgtggcccaagccactggattctggacaggctgaatcctgggcgatagagccactgagggaactatttgcaaatcctgctcatctttgttttctttgcagcccaaggagctggatccctctgctgtgctccccttagactgtctgcttgcttttgtgttctttgatgccaactggtgtggctacttgcaccggcgagacttagagaggatcctccttacccttgggatccggctcagtgcagagcaggta

SEQ ID NO: 129080 - DNA, 1049 bp, Homo sapiens
catcctgaattctttttcacggttctctctaggaaacctggacctgctgccccctcctgggaaaagcacgaagccaggtgctgcccccacagaacacaaagccttggtgtcccacaatggcagcctgattaacgtggggagcctgctgcagcgcgcggagcagcaggacagcggccggctctacctagagaacaagatccacacactggagctgaagctgggtgagggcctggggctgcagccaccatggggtcacatgcagaccagtagggaacctgctgcttaggctcaggccctgccctgtgctctgggccttgatggagcagccgtccccgtttccttctccaccttgcagaggagagccataaccgtttctcagccactgaagtaaccaataagacgctggcggcagagatgcaggagctgcgagtccggctggcggaggccgaggagaccgcccggacggcggagcgacagaagagccagctccagcggctgctgcaggagctccgcaggcgtctgacccccctgcagctggagatccagcgggtggtggaaaaggtaaggtgggggtggaccaggaggcagcacagctcctttccctgagctccaaaagtccccagaagggcgcttgcccgtgtcgggagtgaccagagggccagcaggcaccggcttcgtctttccatcgcttgccaggcagtgtgcccctggttgcaggttctctgggaattgagcagtcagcagcgtgcagtgggagcttcccagcaggaggcagtccgcagtccgcagtcctcagatcaccttgccaggcccgattctgggtacatcatctgtttcaaacaggctgacagctgggtggagaaggaggagccggcacctagcaactgacggcctcgcacggaactgccatcctgtgagggcagcggtggcgcccggcaaagttggagcccttgcggtaccagaaagcagcgagagcgagacctgggagccagggcaggggtggctgaccccatgctcagcctctaggggacggcaggccatcaggctgg

SEQ ID NO: 129081 - DNA, 1020 bp, Homo sapiens
gggtgggatgcaagttgggagggaacagaaggctagacgggcatcccctttcttgcctgtgcctctaaagctggcttagggctttgggagccatcagcctaccatgctgtctttctgccatggacaaaagccttgggttctcccctagcttacaaaaagcagtaaaactccagtcatggtgcccatcattccacagtcgccctaggaggcccatgccttcctgcacctgctgctgggggaaccaggagcccgaagcaggggcgcctccacctccagccactgaggccctgttgctccccggctccttttggttcagtctcagctagagcccttccgtgccctgcatatccccaaaggcacgctgctgcacagctccagatgggtaagggcagggggtagcagagaagtgtgagcctctggccccctgaagcacacggttccctggagccagcacgtgccaacccctgtcgcctcccccaggttgtgtactactcggaaatgcacaagatctttggagacctgtcccatcagcttgaccagccaggccactccgatgagcagcgggagcgggagaacgaggccaaactcagtgagctccgggccctctccattgtggccgatgactgaatccccgtcactcttggaggactcctgtgacgtggtcagcctcattcatccttgcccttctcagggctagctgctcctctcacaggctggggacagaggtggccctggttcacttgccggccctttgcaatgaatgactcttcctgagcctggcaccaggagccctaggcaggccgccgtctccccactcacagccccagcaggtaagcagtgtagacaaacccttggggcttttttatttggagaaccgtccagcatgcatcctggcccacggcctgagcaagctgcagcccttctgaggccatgggcttcgttggctaagttgggggtcttagccttgcatgcgttgtgggcatcaaatctacctccaaaagacccatcctggggagccct

SEQ ID NO: 129082 - DNA, 1054 bp, Homo sapiens
tccttgaggttctttctccaaggccttgactttcccaccccggagcagcaagcacttgaccaaaggttgatcaatagcttcagcactccctgcgcagctctggacagctgacttagctctacctcagttccgtcacccgagaagcacaggtaacgccaatccgagtggcacaggctgttgctgaagatgaagttggatgagcaacgtaaagcactgagaacagggcctggcacgggtcagctctcggggtgtccgctcctgtcatcaccgtcgtcatggtcggcagcaagcctccctgactgggtggactcctgcagctccttccctgggtccagtggggaagccgtgtctatataccacactgggacgaggacctgaaagagacttgggtatggccaggactgcccacttcctctcactcagcagatgctgaccgagaacccacgtgcaccaggcactctcagcactagagactcaacagcaagacaagatgggagcttacgttctaggaggaagacctgcaagaggtccacaagcggatcggtatataatgacacgtcgtggcgtgcaaggtcaataaaaataaggaggtggagagtgacagggtcaagggaggccttcgtggggacgtgatccctgggcagagtcctgaaggaatgaataacccacacaggtagagccaagggaagagggcctgaaacacagtggacagcaagcgcggaggccctaaggtggtgcacgctgaccagagatgcaggagaggcagcaggagggtggagaagccatcttcagtcccctcggccactccagctgctgaataatgccatgttatggctgtgaagaaatttcacctccctgagcttttctgaccttgagattggcagggcacatgacacacccattttataaatgggcatgtccatttgataaaggaggaagagttcagctcctcttctccaagtccagggccttgtctccacagcgaagcctccccatgccccactcattcctttgcccacccccgtgcccgccaccaaactagaaggtgaccgaa

SEQ ID NO: 129083 - DNA, 1044 bp, Homo sapiens
gcaacaagtgcagccccgggttcaggactcacccatttggtttcagtgttgctggctctcaagagagttgatacccggtcgggaatggagagagcctgacctgagtcagtagtcacagtgtctgtgtttgatgcatcccaatcacaaagcacaggtgcacgattgttcctgacccaccctgagcccagcaggggcaggtggccctgagtggagggccgcgtaggaggggaggtgccctgcatggacctggaaactaggaaaaggcagagacagacccccaattccagacccgccctctcctctgcactctgctgccttcctggatggggtccagtcacgttctgagcaccctgactgcctccagcctggggtgaggagggcatgcagcgagtgccttgctcccagctgggaagagcagagccacagtccgctggcacctgcctggctggaccctctgggaggggagccttcctccgtaattcaaacacttaattaacttgggatctcagaaataccgtgtcaggagcgatctgtcggtgcttgtgtgaactggaccatgttgttttctgcggactggggcagggtgtggagagagtttcaggaggctgggaggttttttccaccgtgttgtcatttctccgataattgagttatctctctcgtttcaggtggagagagactttgaaagggagtatggaaaacttcagcagtgagtgtcaaccccagaaagatgaggtgggaggcagggagggacaagggccccctgccaggtctcacctgtctgccccgtgccctgccccgtgagcaccctggaagctgagggcagctcaggtcaccaggctgctggaactgttccctggcaatggccatgtgagagtcattcactcatagcctttgggtgtagtggcacttcagtcagcgggaaaagtccccgtggagaagatccctttctcctcctccttggcaggccctccagagcacctgggcttcgctcaggtagggggaaggaaggggaccccaagcagcccgtcccctgccttgcag

SEQ ID NO: 129084 - DNA, 1076 bp, Homo sapiens
agtccggcaaaacgggtcagacgcggagtcccaggctaagaggatcatccgccactctccccgggagtcctgctgagagactgcgactccggaaagcaccgagggaacgaccctagggcaggggctgtcgggccttgctctggggcggaggggtcgcgcgggaccggagggagccgggacgcggcactgacacagggccaggggcctcgcgggtccgcgggtccagcagctcccgccgcctgggcctcactcaccagctcatggtcccgaacctgcgtctgccgccggggtcctcagccacaactcgtttctctagggtcacttccggattcaaccagtctccaggaagtgacgtaagcccgcctctctgcccggaagaggcggttgggaggcggagcccggcgcgttaacccttctgctgctgcgtgctcgccgcggagtttcccttgccggcgactctctggctctggccaagcgcttagacacacaggctgcaacgggggatgaggggaacctctgggggcgttttctgccttcaacactgactcctaaagatctcttcacctgaccatgcagggcccttagccgggctgtcccctctgtcaagtggtttctaatccagagacagtggcagcaattgtctgtgggagaagaagccatttgggatggagaaagtggaaaacttacattctctgaatgctctttcctatcttttacagtttgtacaccacacatgcattacctgttacaaacaaacggacgtttcccttccaagatggcacagggctctgaatatcaatagataggtgcttttcaggttggaatgtttcctagagttattcaacacaataagacgcagagtatgagttgttccctgcctttcagcccttccctttggtctcctctacaggactcaaatgatgtaaattgccccattcgttctattccttcatttaactaatactagttgcactaatattagtgtcaggtaccgagccaaccttaggatacagctatctcagagaagtatctgccctgctcttgttccttcccagagctactttcctggagggaga

SEQ ID NO: 129085 - DNA, 1058 bp, Homo sapiens
ggagacgtttctaggtggagctggaagcccggtctgaactcagtcactattcttattagatcaggtgagaagatcacacaggattcagatggctccgaggtgacaagctcaggaataatcccagcttcactgttagaaactgcattttctgggtcttaagacatggaaatctccatccaatgaggatgtagatcattgaacagatgtacaccctctgtactgcactgcatcaggagtcaggagacctggcttctagtcctggctttaacatgaggacaaagctctataacatctgcaaagtcacagcccttctctgggtcttgaagtccctgttagaaaatcaagtggtcccactagagaatccatacgatatcttcagccctaaagtgcagaagtcccaagactgtcactctgtgcaagacccacccccatctcacagctggggactgagccagggctcagcaatgctggcatgagactcaaatgcaaagatcctgcttcccgttgcctcaaagcaccagctctctcgctccatcctcccaagagcctccaaggcgccattggcttcctgggactctgagtctgccggcctcttttcctgactccagtttcttctggcctgagccaatggggcatgttctgtgactgcatttgcatctcggattgtgtttttaaacccattttctcccatatttgcctgaaaaatatatagaaactgatatacaatccaatcctctggtttggggtcccattcaacccaatgccagaaatgcttcgcagtggtttgcggtactcggatcacttcttctccatggactggaaagccctggggggtggcaggctcctgaatgtagctcctgccctagtgagggagcagcaggggccccagaaggctcagaatctctgtctttggggccctcctgagaattcctactgctgggagtcccccgttttgggatttcagccttaaatctaccatctgaaccactgccctacctgctgggttttcctcccagatcaccaccacaggtccctccatcatctcaggaaaggaccca

SEQ ID NO: 129086 - DNA, 1034 bp, Homo sapiens
gagacgagatttcccaaggcccaggccatctgaggcttgaaaagtacaggctgtccaggccctttgttctaggtcgtgcgattgccaaaaatgtcacaccgtcttgcagctgtgtgtgtgtgatagtatctagcacaaagctgcccctgaggaatggtagctggtgagatgggtagatgaatgaatgaatgagaggccctgtgttggagatagaaatttaattaagacacaggtcatggtataaggagcctctgatctgctagaacagatagatcacaaagaaataataattacaggcttaaataattgaggcctagaggccatgctggggggagcagagatgaaggaagagataactgcttgggggtagtgatcagagaaagttattgaaaggaggctagatatggggccttgaaggatatataggagtttttcagttctccagtagacaagataaaggagatttctcttaggttgagaaagctgcctaagcaatgtataaatgtgtgcatgagacatgggaagatttcaaatgacttgggtgtccgttgaagccagaaccagcatgtgagtcttcaagaatctcaagagaaggctagaaatgcaggatggggataagactggaatggtaggcagtgcctctgatttctgagactcaaagctctcagcaacctaaaccctgggtccacagatcccaggcaaggcttcttctcttctccaaatgatcagtaactgtgtcccaggagggccaccagagttggttggctgagctgccttccctgtcaagagaggaggagggtgggccccagctgggggacactgcccacgtggcaggtcagagcaggatgctgctgaattttgtcatcgatggcctcactcagagcaggtaactcttggacccccaaacccaaacacctcccttttacaaacagtaatttttgtttcaggtaataaaagggctacatgttccttgtagaaaaattgtaaaacacagaaaagcactagaaagaaaaagcattccctggatcctacca

SEQ ID NO: 129087 - DNA, 1038 bp, Homo sapiens
gcagttactttatttctgaggggaggtgggggtggtcagccactaccctttgataggccagaagaccagatgaatagagatctaagctgggtaatgttgctgcaccattgccctaaagggctgcctcttcacgcaggcaaccaacctccccaccccagacacacacagaaagaactggattccacgggcttctgggggtgcaaggggaaggggctgccatatctagtgggctcctggagaagctcgggctgaggagcagagaagggagcagcctcagagcttctcatcttgtctccggtcctgcagtcttctttcctcacccgcaaatggtagagagaggagttttgagccgtacaaataaagcaaattcatatctgctcattgccatcctgtcctcatgctcaaccctctctcaaattttaatttggtagcttttagaaaggcaaatttatttgtgacaccatccaaattctattttattggaatcctcttctccaagggtgcgatcgactaccgagaaagctgtgggcttctccttttgatattttcccaagctctctgtgcgttcgcgcgtgcttgtgtgtgcgcgcacacgcatgcacattcattttagggtcctctacatattttacgtacaaacacataatgcatattcacaaggcagccgcggaagtgtagatatattcatcacatatatgtgtaactcagtgcagactcctagaagccaatatttaagttatcatatttaatttattcaacaaacatttaataagcacttactcttcattaaacactgtcctaggccctgagtgtacagcaataaacaagtcagacaaagcctgtgcactagggggctaacatttaaaagcactggattcttttttttttttagacagggtctcaatctgtctcccaggctggactgcagtggtgtgatcatggctcactgcagccttgaactcctagactcaagtgatcctcctgcctcagcctctagagtagctgggactacaggcacacaccaccacgcctggctaa

SEQ ID NO: 129088 - DNA, 1062 bp, Homo sapiens
ggctcacatctgcagtcccagcactttttgggaggccgaggtgggaggattgcttgaggccagtggttcaagagcaacctgggcaacatagtggggccctatatctataaaaaataaaagtaaatagctaggcctggtggtatgcacctgtagtcctagctacttaggaggctgaggcaggaggatgacttgggcccaggagttggaggctgcagtgagctatgactgcaccactgcactccaccctgggcaacagaatgagaccctgtctcctgaaaacaacaaaaatgcaaggcagtttttaccccgtgttggaagtcctcccacagtctgtgtgccagactccttgcccaggcctggataaagaccggacattggcggttctcaaccccagatgcacattttttctttctttctttcttttttattatgatgaggtcacttaacacgagatccaccctctttacagtttttaagtgtacagtatggtactactaagtataggcaccgtgttgtacagcagatctccaggacttaatcatcttacattactgaaactttacacccgttgaacagcaacgccccatttcctcctcccttcgcccagatgcatattcacatcccctgagaagccttaaaaataaggatgcctatgctccacccccagagattctgacttagctggtctgggtgcagcttccttggtgattctaacaaacggttagaacctccatccttcctggtctcccttgctgcctcatgacctcatctcttccatgctgccccgtgaccaccctgctgcagccacaccagtccccatctgattctggaacacgccagctccttcctgctgttccctcggcccggctgccctgtcctcgcagggttgcctggtgaattcccactctgctcacaggtttccttctctggggaactttctccccgctctccttctcatctccacggttctcaggactcaactccatcctaacactccccactctgtaatggagtcattgatttttctcctctgctcccctcaccagagagggagctccttaa

SEQ ID NO: 129089 - DNA, 1001 bp, Homo sapiens
ttatctggtgaaaggagtagaaatagagtgttcggactgaagaactgcttgtgcaaagtcccagaagcttcctgtatccttgtggggacctgatggtgtcccttaaggcctggacagggaggctgagagactctaggctttccagattcagctccttcaccctgctggggctctgcatcttgaaatgcctctgcttttgctcatggctggttctgaactttgccccagctgcagggtaggaacaccacgtgccccagcctgcacatggcaggggatggggggcggagctcatgtcacaaggcccatggggtgggctccgcagaggctgtagtgttccaggagaggggtgccatgaaagcgcggttagtagcctgcaaagtgttgaagggtaaagctgcctgtgaagcaaagggaaggtgcaggttggaggatggactgagccaggcggtctgcgttgggctggcactgggaaggggccttcacagccacagggagagcaacgctggtgggactggccggggagcctgctgcgctttgctaagagccaggatggaggtttctctttccccagaaaagcctcctgttcacaggcaggcatctgcccggcttcaggaaaacagcagccgcgtgatggcctggaggagggtggtgtggggaggcatagagggggtgccttctggggacaggttccaggggtttatgtcactggggaggtgggtcacaagagggatttggtgagggaagagatgctggggttgggcaggggcaggagattgtagaatggaacctgcctccatgctgccaggaagcccttgggctacagccacgcagccaggcacatggcaggacattgccagacccaccagcagaagcagatttgggaagccagcaatggggggagtcagtgctcaggctgaactgctcctcggaatcacaccagtgtttccaagctgcagcaaatgggcagagagggctggtgtgtgtgtgtgtgtgtgtgtgtg

SEQ ID NO: 129090 - DNA, 1070 bp, Homo sapiens
tacatcatctcaaactgtcactttctcatatcctatcaacttgcagcctcacaaaaatcccaatgtttcatgatcccatttttcagatcgaaacagcacggagggtcacctatccaagctgtgcagttagttggtggcagagtgagtgggaatccaggtctcctgagtgtagcacttggactctgtcactctctccctcagggaagtagagctaaggttgtggtcagacactgcaaggctgtgtgtcaggaatggcaggtgcacacaactcaggttgcccactccccagtcctgatccagggcagacattgctaatcaatcacagcactctctcctctaagcccgaataggatctcagaatccttctcaacacagtgctccaggaagatgttactggttgattggaagtggtgggagagaagaagaaatctatttgcataggtcaatcattagacatgttataaagacgaacttctgaatttagacttttccccagtttaaagagcaattaatagagtagttctgcacagaagctgaggagatccgaggcttaggatgctgggatttatttggcccctttgctctatgggccttcgaaatactgttaggatttactctcacacttcagagaagtttccagcagagaaaaatgaggagcagaattgggatcgtcaggtacagaaacgggatgagaacacaggtgctgtgttcctcaggtctctcgggcttggaggctgaggcaggattagagctcagggaggtcttctcgggatcgtcagagacagaccatcaggataggaagggccttggaagtattagtatctcatctaaactctcctgtgatggttcattttacgtgtcaacttggctaagccacagtacccagatatttggtcaaacactattctagatgcttacgtgaggctgtttttagatgagattaacattttaatcagtagactttgagtaaggcagattaccctccataatatgggcaattcttatccaatcggttgaggatcttaaggggtaaaaaaaaaaaaaacccaaaaaacctgaggcctcccaag

SEQ ID NO: 129091 - DNA, 1011 bp, Homo sapiens
tgtcttaggaatgagctgactgggaagaaaaatatctggttgaagactcccttgaaatgtggcaccgtttttccactctccttggagatttagagagtgccctggcttgtcataaacaatattagcagaaacactgcgttgcctggggaggccaagctcccagagggcgtaagcagctattttaaaggcctgtctcttctggatgccggaatgaggagccacagggcaggggatcccaggcagcttctgctcagggctcaggacctcccattggagcaacctgggacccacccagcccatgggagacagtcaggctcagtaaggatgcaggaattctcctcttctctccctaaacccctttcttaggccccaagaaggaccactggggaaggagagctggagtcagggttaacaacacaagagcagggtctccaagcatcttcccgttatgtaagctgcttaatggaagtgtttacaaccaggatactgaggtcttgggattattcattccatgtcacagggaggacaactgaggcagggaagggtggctgctttgcctcagaccattacacagccagctggtgggaatgcgtcgggattagacccagagcctcctattttgttgctgctctgtgatgggggcgggagggtgggaactaggaccagagctcagctgttctcagctgagtcactctctttggagagggggcagtgggaggaagtgcagctgatgtgacaaggcttggagattccctagcgtgtcaatgggagaatgcattaggcacagatgccagcggggaaacgtgttcagaccagagcgggtttcaagggagcaagctaaggcgtttagcgggggttgagccttgggctgggggtcaccacctccccgaaggactgagttggttccttctgcacaaggcacatcaggaacccccaggatcagtcttgagcccagggtgaaccccagtgtgcagagcaggagtggaccatgaaaagcagagcccagcccct

SEQ ID NO: 129092 - DNA, 1032 bp, Homo sapiens
cccgcgtagctctttccagcggggtctgctgagctcctccagccaggccttcttcctcctcctgtggtggccaggtgctgggggtcacaccttccctgcagcgagcctgcactgctgcccaacgcaggggaaaggatctgtgaactgaaggtcagcccgggccgcctgccctgtgaagtgcagtcttgatgctaggcagtaactttccttctgggcatgacagttacacactggaattccagcccagcctcccgaggtgggaagagacagaagagggccggcttgtgggctgggtttagacctcaggccctttcttggctcacccctgtccacgtgtcttggtggcacgggtcctgcggcctgaatgagggctgtaaaggatccaggatccaggctggaaggcataatcctgcccctggcagcattccttctgctgtggtggaaaggaaacggagccaagtgccatcactccaggcccacatactttccaccgccttgcaggacctgagagtagggcctggctgtggaccctgaagcccatggcgaggagacgtgaatccctgggcacccaaagaatggttctgttcaaactcgtggttcatttgcatctcagttggacagggctggggcagtcggggtgctgggttcctcctgccttccagcccggcttggaccagccccacctcccagtccctggcccgcccacagtgtgtgtgtcttccactgcacctcggggtggccctagggagggaactggagtcagctggtattctcatctgtaaggtggggatggcagtagctatcaaccacctcattacagcgtgcgagggttaagtaggagaatgcaaggaagacacttgacatagggctgggtacctggtgcatgctttgcggtagctgttgctattatatactgcaattcatggtgtttgtggatccatgtgaagctggggacagtgagggggctggaggcataagtggaatcagtcctgaatggccgagagcatcttgctcaatattagggtattacat

SEQ ID NO: 129093 - DNA, 1025 bp, Homo sapiens
cattccgcgattctatttactaagagtctatatgtagccagggcttgccagctaccaaaagggacacacaaagcaagtagttctaaggtgacctattttcccaactgaaaatctgaaatgcaaaagggtgtgtatgtggataacagatgggaacctggtttctggcccaggtgttgcagatacaatgctttgaaaagtataaataccattataactctgtgagatgaaataaaccaatacataacattctatttatttgttagattgcacacatgaataaggaggcttataatttgttttagatgaaataaataaatgaacaggatgtactcaaactttgaagaatgtgattgggtgcttaatggcatggcagtttggagaagagagaggtgaatgaggaaacctgtgggacagttgctatctggaggaagtgggggcttgagctgggctggaggaagcctctccctgccctagatgggcaggtccgctctgcagggaggtctggtgatgtgactagggcagagtgggcagcggtcagcctggttctgcaatgagcctaagtggcttatttgagtcacctcagccatgctgggtgtcagtgccaaggaatcccccgaccccatccccaggagtccgttgctaaggatctgtttattcattcactcaatacattttgattcagcaccagaccctacactagacatgaggataaagggagtgatggaacggaccgtcttgcccatcctgagcttaccatccagcagtggagaaacagtctcatgcctcatgactgtgttaccatggtgatgatggctgtgaagagaactaccagattcaccatgaggttgtgtggtgggtggtcaggcctgaccaggacaggaggaactgctgggtcacaggggctggttgttggagcaggtgtcccgccgacttcctgctgacagcagggcttgcccgttctccaaaaaagcagcctctgttacctacccaagtggctgcctgcttggaaaatgaaacacagagca

SEQ ID NO: 129094 - DNA, 1042 bp, Homo sapiens
agagacttagggaactttcattgatgatcagtcccctgcaacttcttccctttggtagccgctgaaagtaggtcatgaaagggcctagacctcaggatgtctggggagaacctccttgagttgccagaagattcttgcatccagggctttgtggctaaggctcatgcttactggcagtgctggcctgatgggtagagaaccgcctggaccacctacgtgggatatttatgggatgctgagacgtttctccaaaataccttctggaatggcctgtatcagtagctgaagtcataggatcattcctcccagctaaagaaatgcctgctattaaatttttgtggataagaggaagagacatagcttgtggacgtgcagttgggtgaagtcatgaacatactgactaatgatacccagggtgaactgctgactaatttgtgtaaacagagtggatggtctctgatggtgagccctagggctctgttccggcctccccatcatgtatcaggaatgttcatggaaattaaaaggtatactgataaaatctatgggagatacaaaactaggagagattgctggagtataaaattatggaatgaactttcagaaaaactgctgtaggttgaaataatgggcccaagctgtaacatattagggatgaatagaaggtcctatatcaaagttcatggggaaaaaaacagtcacagagtgcagactttagggagagtaactgaaaaactattgatctttttttttaaaaggcctgttgggttggctcacatctgtaatcccagcactttgggtggcagaggtgggcagattgcttgagcccaggagtttgagaccagcctgggcaatatggcaagaccgtgtctctaccaaattaaaaaaattaacgtggcatggtggcatgtgcctgtggtcccagctacctgggaggctgaggtggaaggattgattgaccgtaggaagtggaggctgcagtgagccatgatggtgccactgcattccagcctgggtgacaacagggcgagaccctgtctca

SEQ ID NO: 129095 - DNA, 1151 bp, Homo sapiens
gaactaggcacaggcttcgtagtatctctaatctgcacacagctgtgcagctgaagtgtcattgttagccccactttactgataagaaaaagggcccttgaccaaggttatacagctaagtggctgaacgagaactcaaacccagcttggtacccaaagccccgctctttccactatcccatgcaacttctgggcttaaatctaacttctatcctaatcatgttaaatctactacattcccagatcacatcaggtgcttactgtggtccaggaatccccatggtttagagttatgtgcaatatcttaatataataaaaatggatggccacacacagctgccaaaattagagaaaaattctctttccatgtgagacactggtgccccgcaaagactcagacctgcattgacgcagcacttggtttctctcctctctgcctccttcagggcccatctggttagacaatctccactgtactggcaacgaggcgacccttgcagcatgcacctccaatggctggggcgtcactgactgcaagcacacggaggatgtcggtgtggtgtgcagcgacaaaaggattcctgggttcaaatttgacaattcgttgatcaaccagatagaggcaagtcatgtgctcttgatgtttccttcatgcaaacatttttcctcttccatgcaactcgctttttgcgtattgatttcaagaagtgtgtgtgagcaggaaggagggtacctcacccaatgggattagatacaagggcagtttagggaaggatttctggagaagggaatcccatccatggggaaagggcattccaggcacaaggaacagcatgggcagaggcacagaggtgtgaaggttgggctggggtaagcagagcgtgatctcagggagagtgcatctgggagtagggttaactgaagctggaaagatgggcatgaaacacctccggtgccatgctcaggagcttgccctttgggtgggaaaatgtattagttatcaattgctgcgtaacaaattgcccccaggttttgcagctgaaaagagtgaatctttattatcttgcacagtttgtgagagtcaggaattgaggaagggcttagctacttgattctcctcagcgtctctcatggagttgcactcaggctgt

SEQ ID NO: 129096 - DNA, 1020 bp, Homo sapiens
cacgtagcccagctcccggcagacgacgtgggcagcgtggatggagaagtcgtcatcgcacacggtgccccactggccatcatagtacacctccacccggccctcgctgtgcttcctcttctgcccagccaggcgcagctgaatcttggccacgttggcgggggcctggggctggtgatactcaggagccggttgctggaagtactcggggtaatggggccagctgtcatactgtgccaggctcaggggggacaggagggccagcatagccaggcagctgcagaggtgggagcacagaggcctctccatccctgtcttcgggctgatgatcccacgaaggggccctgcgcagctgggagggacaggcggggtacagaagcagcaggagctttctggaagagaggagagatgcgttaggatgggaacgtggggctacggagacctacatagagaaccagcgatttcataccccttggcttaatatggaaagctcgtccattctcgacgccaatccagccccactcctacatttccaccatgcagggctgggaggtcccacctcctttacctactgccttgtcatctctctagaatgctttttccagtagagttcctggcagggaacagaacacactccaacttaatttaaggagagttttttaagactacggacatgccggcagagttctgcagaactaacaaaggccggtgtcacaccctagggctggcgactcagagggggctgtgaccaccctaggcttgaagggagcctgcgggggtgagaactggagactggcagagggagctgtctcttaggagctgtggccctcactggagggtctcagagccaacccatggcaacggcggggacatgggagggagaataaatacctgactccctttcctcccgtctttgaatcattctggtgcctcctattaggcaaacccagcccccttcaactcgaagccactggcaagggagctgagcccattgagggagcccgtgtgggacagcctcct

SEQ ID NO: 129097 - DNA, 1090 bp, Homo sapiens
gctaggcagtcagctccatgggaaagaagacctctactcccagcagggcctgaggtatagtaggagctcaatgaattcttgttgaatgaataaatcaatttagtactgtgagctggatggagatgcatgataatagatttcctcatccaacattcccaaatatttggggattttctacttgttcttttattaatggtttatagctgaattctgttgtagtcaaacaacatattctgcataatatcattgtatcttaatatcttaatatgtttgtatcattatatgttccatgtgtccctggagcatagctgccttctgcagttgctgagtacagtttatagaaacttgtgaattaggttaagtttgttaattatgtcattcacatcttcaaccccaggatttttctgtgtcttctatccgttactgacagaggtgtgtaaaaatctcccactctgattatgaatttgtctattttttccttttagttctatcaatatttcttttatatatattgaagctatgcacgtacgtttagaagagttacattatcctggtggattgactttcattatcgtaaactgtccctttttgtctctggtaatgtttcttgtgttaaggtcagcttgatcgtacaagtttccctctggttaatgtacgcatggtatatctgtttccatccttttacattaagcctctgtgtctcttctaagaaatataaagctggattgggctgggcgtggtggctcacacctgtaatcccagcactttgggaggctgaggcggatggatcacttgaggtcaggggtttgagaccagcctggccaacatggtgaaaccccatctctactcaaaatacaaaaattggccaggcgtggtggtacatgcctggaatcccagctactcgaggggctaaggcaggagaatcgcttgaacccaggaggcagtggttgcagtgagctgagatcgcgccactgcacactccagcctgggcaacagagcaagactccatctcaaaaaaaaaaaagaaaaagaaatgtaaagctgaattgttttgttatattcgttctgatgatctttgtcttttaattgg

SEQ ID NO: 129098 - DNA, 1009 bp, Homo sapiens
gtgcaagtcatgtaccttctttaagctggtttcttcatctgtaaacgtgaacaaaagtacctacaacatggggttattagaaggtttaaatgagataatgcatccagtatatctaatgcactgccaggcagctagtatgttctcaataaatgttactgacatctttattaagttccttggaaaaatgctttgtaaattcaagtattacaatttgtttttcctacctcccattccagacatgcctctagagactgttacactctttgtaaaaaatcatgtttttccctctcaatataaagtaaaaaatacatagaaataacgtttggaataaatactgaaaaatcaagattaaaaatttcccatggattcatcacctaaaaaagccattgttagccttttagtgaatttctttttttttctactcatagttttaaaaaatatggttgttataatcttagtttatatgatttttgtcctttatttaacagtgcatgagcatgttcctccataagctattgattactgtaactaaccttcccttgctattatatatttagatgacatctagttttttctgtcacagaatgacaaaggacatctttgcatatagaaacatttccatgtttaggtgtatttccacagcataggattccagaaataaattatgtcagagggtatgaactattttgctgactttctctttcaaaaagtcataacagtatcacaaatttgcagcccatctgaaatttcctaaatcagaattgtcatattgaattatgagtgatgcttagaagggtccttgggaagtgcagaagcagacatttttgtcccttttagatgagactatttttagacttttctttttagtaggaggctaaagtagcttaagctattaaggtttgttatgcttatgtctgcaggaagaagtagctaaaaacttgttagctgaatttaacttgggatgtgatgttcaccaaactgagcatgtgtatcgagtctatgtggccac

SEQ ID NO: 129099 - DNA, 1732 bp, Homo sapiens
cagtgagagcaggtttgtagtgaaagttgagttcagattttgccatgatgcattgggggtggctgtgaggacaagcaagggcagtgtctggtggacagttaccccacgctcacctggaggctaatgagtgctgcatggctggtggcacagttcggagttcatggcatgctgatggtgatagcagcctcaggagggactgagctcacctgaggagagggggagcacgtttctcgagggcaggcaagagcccatgcgcatggcagtgacacacagcagatgctcagtcaggtctgtgtgctttgatgaagaagaaaaggacatagcactgaatagtgccaccaacatttaagtaaggtctgcagaagaagttgctagaaggataggaaaaactaaggaagtgtaatgtgtagcatgatttccctaaaattagccactctgaagaaacatcacatgttatagctaaaatatctgcttcttaactaaagtatcctgtttctctaggcatttcagaatttgctacctctccagagaaagtcagtgattacatttctccacttttgaactttgctgcagagcatgtgccacgggcaaaacacaaagagacacctctctacattctctgcacggctggaatgagaatcctccccgaaaggtgatcctccacagaagggcaagggtgagggtgggttcctggaggggagagggggtgttcttctcccccttcctccttctcctctccatcatcatcatcatcattgaaaggaaaatattcaaaattctttcttcaagtctgtaacagtaccagaactattcctttagccagaatccaccaaatagcctttaattgacttaggactataggcaacggtaaaggtgtcatttttaaaaacctaatctattttacgtagttaaggaatgcttgcagttgtagttttacatctagaaatcacataattcacacaacttgttcattttgaaaattcattcctaatataatctttccaacgaatttcttttttaaaaaaattaactgtttcatacaagatataccagatccctggttttgttttttgtttgtttatttttttccttttctaaacagaagataccaagctgtaatcttttgatttgtaaatgtttttattactttacagccagcagaaagctattctggaagaccttctgaccgatatccccgtgcactttgactttctgttttctgactctcatgcagaagtaatttctgggaaacaagaaggttggtatattggtcttcagtttaaaatttgggaagctgttcctttaaatcctccccattttcaccaatgtaccctttgttatactcctattgtcttaacatttgggaaataatagccttgaaatattacaatttttaaattactaaatcagtttcttatatgactagtctttgttgccctaacattaagccactgaaagataaccgtttgtcttcaccacatgtagtgacatagcttgatataaactcactttgatagaaaaggcttgtgtgccttgcctaagttgtgtggcttcctgggacgttgatcattattgagctgttggagcttcttctcgactttgatacactgagaaatatcaaatctttgttctattttcaaagaaatgattctccttgagaatgaaatgtcaagtcaatgaaattatttggggtatagcttgctagaaatgtataccaaaaagtatttcaaaa

SEQ ID NO: 129100 - DNA, 1072 bp, Homo sapiens
agctagttaactgctaactaccaaatccatatcataagaggtcctggaataattatttatacataagcgtctcgtgtaatatgttttaagctgatttttgagttggtagtttagaaatagaattttgcattttggaatttgtttgaacttctgtaatggagtgtgtgtctgatttagatgatctttatcatcatcacttgttttgttttcttttgactcttcaattattcaacagttgtattgatgttatagtggtgctgctacatagcttagaaattactgacttggtatttgctgcattttctctgttagacttcaggtgatattctttgtctaaatcaaagcatacgtgtgtttctatacaaggtacctggcacgagttaccgacattgaagctacagacaccaataaccccaatgtgaactatgggatcgtggtggactgtggtagcagtgggtctcgagtatttgtttactgctggccaaggcataatggcaatccacatgatctgttggatatcaggcaaatgagggataaaaaccgaaagccagtggtcatgaagataaaaccgggtatgtaaatgagaacatctgcctggtaaccagggtgtgtaccttcattctctgtggcgtctttcatatcgttccctttctacaccatggccctgagtcaaacctcacaccaggacctgatgggtctccttgtttcactttcttttcccttttctgtccattttgcaaagggtgactaacaccttgataaaacatccaaacagacatgtctttttgtctcccatagcattttaaatagtgccttactcatggtatctacgcagatgttgctggttggcattaattatggagagttttttcctatttagtaaccattggtctctatccttaatgacaaggtaatttcagataactcatgaaaatctgtaatatattggcatatatttgtcacttttaaaaattgctggccacatgtagttctagtcatctagattatttggtgagtgtgaccacagaacttagagctaatcataattatgtatagtttttaaagatactgt

SEQ ID NO: 129101 - DNA, 1048 bp, Homo sapiens
gcctggaggctggaggaggagtgataatggtggagtcggagaactgactagggacaaagtgccttgcacagtactttgtacataaaagggcagtctaatagacatttatcaagtgaatggatatttcaggttcacattcagcttattctgcctttctcctacctccaccccaaatctcccttgtaccataaggtatttaaggcctatttgatatcctgatattttggggtcacagacactttaggttagacagcactaactagtaccagacgattatcatctcttttgatttaggtctatattggacagtatgaaattaacttagaagtgtgttgctcagaataaacccttccaacagcttcagtgcaaggatcatgtatagattatatgtggttggatttaagcacacacttaaagaacgtagatgttttctttgatgatgctatctttgtgatttgtctcacttcctggaacaggagggctctaactccgtgaggaccccagcattatttctataattgtttgtgagaaggactgaatcccagagcattgccttgttgctgacctttcagtatggggaggtaagtgatgggcctaatcaccatgaaacatgaaatcttggtgatgcaaaaacaggtcttgagagaaaaaaaatctaaatcgcaagtgaaaaatgtgaagttgtgctgtgcttctgtttaagaccttttttcttccagggcccagtgaggtattttaatgcatgaagcactcttcaaggtgaagagtaaagaaattaactgtaaaataatagaatttatcccaaaggcagtgaaatttttttaaatcctaatcatatttctagaatgagcctctcattcttgacataaactgaggggaaaagttcttgattatttgcagaaatgtcttgtgggaatatttctaaaagtacaggacatagaaaactcatttattgactttgttatggggatgttgttaaaatgctgttttctcccattactcaagtcatctgggagaaatttgccttggacttcagtgttgagaaaat

SEQ ID NO: 129102 - DNA, 1058 bp, Homo sapiens
aatggttgagagcatctttaatttttccaggttctcttgaatcctttgatattcaaatcattcttttctgaagtacccttccctgtggtacctttgcttattcagaagctgagctctcccagaggctgacttctctgtgattttgtttgcctgtgatttgagttcactaacatctgtttccttgcatcttgtgtttttccaccagaggaaccatttccctttgtggttgatttgcattgttttcgtcgttatctgtagaactgtcagtgagagactgacaaagacattgacacctgactgtaggctttattccaataatgttcagccaagtagggccccactagctgaaatcatgagaattaatgcatctctctggtgataggtctaacacaatttaggcttttttaaaacatgtcagttttatgtggtattactgaatttgcctcccagtgccctggtgcgaagattcttagctagaaggacaattggagtttacatttgaagatcaaattaccatttaactcttaggcaataatccattgtacttttgtcctgagttaaaattacagtgcttcagcagttataagctgtcctattttctctgcttttaaacacaagctttgtaacttaaaatatctgtttgtccttttgatcaaaatcatcacatatctcaaaaaaaaaaaattcctgagacaaacctcagatgacacaaagtttcctaagtgcgctgtgatcattctctcggtcaccttcctcttcgaagtgtgttctttctcaccccatctagaattgacctcccacctctaggaatcttttcctgctaaagctagccttctctgtgctcttctctgagctcttataacaagaatcccagtaatttaacattgcctttaattagtatcttgactattttctgggcattagtattttctctgtagcaatctgcaaactccatgaaatttggagttgggtttgttactcctcatgtcaccttcgtagtcctgactttcttcctcaaggaccagtttgcctttaaccatgactttaagctgttaaat

SEQ ID NO: 129103 - DNA, 1107 bp, Homo sapiens
ggggacgcgatcgctgaagctctgcacagtcttaccacgctggccgttcgggctggctggggccgcccacacgtgcgcggtttccgagggagctccccgcaggggaagccctcaccacgctggagctgagaaacgtgtggccctggcccggccgcgcgccctcgggacttggtgtgtggctgctgctccccgggttatttcgggaacttggggccggcaagtcttctctcgactagtggcagctctttaccggttcgacagcggcccgtgggatcccctttctgagggttcctgcacttcttcccccgactttgggtcgccgagccgccgggaggcaatgacgtttgccttctccttttgcttgcggggaggtgggtgggcttgtgccttacagcccttgctgtggattgtgtgagaggcactcagtttcctttaaaccctgtctgtcacttgccccggtagttttaactgcatttctgtaaagaggcagcgttactaggtgcgttttgcctggtagactgagacctgccctctgtcagcctgcccagaacaccccagggccaggatagagtagtgcaggaagtaatgccagtattgactgttacacgttgcacttttataggcataactcgcctaattcatgcaacagccctgggggttaacagatgaagaaactgaggcgcagagaggcgaaccgattaccttgcccaggctcctacaccacctcctatcctctggctgcagctgcagtgtgctttggaggattcggaggcctctctaggtggcaattattttgcaaggcaggtcccacagaggcacccccagcagctttatcttgttgctgatgctggtcctgcatgagcaggtatgaaggccagaaagtataactcagagggttttcccggctccggggagctcgcttggagccagcagtcagtgtctggacaggcagaagtccagtgaggaaagacatgggcttccaaggtgctgctggacctaagcctgagccatcacccatatgtccctccagtgtcccagtggggagttagaggaatggttctcatctccaggaaagacactggactgataccaggtggcatttgtatg

SEQ ID NO: 129104 - DNA, 1080 bp, Homo sapiens
acttcatctcaaaaaaaaaaaaaaaaaaaaaaaaaaccagaaaaaaaaacttgccattaaacaaattccagttttgatttttgttttgcattggttttgaatccatgcatgttatggccacaaagaagactttcttggctccgttgtttgtcgtgtgtgtgtgtgtgtgtgtgtgtttgtgtgtgtgtgtagaacccagcaagcagcagctataccccgatgaggcaatgtcttcatttggccactcatgtcattccacgtttcctgagtgccctcttggctaggcactgtgctagacactgggctacaaaaataagaatgcctggtccccgttctcaaagtaagcgtgcttcctataattagaccctgagctaaggcgacagaaccagctccctttcaagacaagagtcgcctgtcttgacggactttcagatgggctggaagaacaaggtctggcgtgtatggactctgaactgctcaagctgctgccgtcttgcaggtctagagcctacagggtagcgtcattctagtttctttgctgggcactctggaatttgttctttctcctgcgagagacagtggtcctcagttgtgttccctccccaccatcctcaccctccctcccacggtggttagtcattctggaggctcaagttggctcacagaaggtgctcttgaaaacatcccccaccctcctcgtaaccccagacagtcaggaagggccgttgtcgggtactaagaggtgttatggtttcacattcatgctttctctctgaagagaaaacaaaacatgttgaaatagggagaaatcccagcagcagcttgcttgaagcaagggttgcataacaggtctaggaaacgtctggccgtgtgggtcaagttgagggactgcagccttgtgtcactgagggaacttcttccgggtccaccgagcctctggatccattagatccatccagagagccacttggaaggctctgggaccttgagttctggctggccacgtggtctgtgatggctgtcactggtgaaagagagaccctggctgatatttagccaacagtgtttattccctggcat

SEQ ID NO: 129105 - DNA, 1063 bp, Homo sapiens
ctgattttatagttttagtagacactgggtttctccatgttggtcaggctggtctcaaattcccgacctcaggtgatctgctcacctcagcctcctaaagtgctgggattacaggcatgagtcactgcgcctggccaaaggcaagagatgaggaccatatagatggaaacacagcattaagggtaaaacactctctctctgctctgtctggtgttcagggcccagcatgggctgtatgtcctacacttcgtttcaggctcatcttcaggtgacaccagccttctcggagcctctgtccacatcccacctgtcactacctctgccctaacttcaccttcagtggtcactgccaggacccctccccaaatctaaatgaggtccccctgcatttgccctcattgcaccttctacttttgcttcatggcatttagagtttggaattttttatcgataggatttttagtactctctctctcctctactagactataaactccttgaaggcaaagacgacacctgctccctcagttccagcagcccctaacactgcgctgacatttaggtagtagcagcgttttcttgcagaacgatcctgtagttttaccagctgagacttctgtggtctggggagtcactcatctctggtccctgcctcctcctctcacttttggaaacccttctggccagacggctttggtttaaattgtatgccggagctcttggttccagggagagggttttagcgtaaaaatctcactcatgatggaaggttcctgctattaccttttgcatccaatacaacttaaattgactcctccaaaagcttcggaagtaatttgtacctattgtctagcataaattcagcaagtgggtcccggaggctgaaagtcgagtcttgcggttgtttcctctggtgtttctccctgagacccttagaacggcaagcctggtgcatctggtgtcctgtcatctttctctgtgattgtcatcagtgtgaaaggtgaaaggtgtgtggagaaagaacatcccttcgagctgtggcttagagctgtgacttggcacc

SEQ ID NO: 129106 - DNA, 1021 bp, Homo sapiens
cctagcaatagcagtgcttcctgaagccccagtagaccctgaaggtttcaggactgtgtctggagagcatcagtgacaggtggcaggaatcctctgtggtccacttcagaggcggcagatgaccaggaggtcagactgtggctggtcttttcagaaggacaaacgtgacccttctgaaaactgggaccattcggggacattggtggaaagacagaggagcctttatggtttgttctcacacatatgaatccactttctcccccctccaacatcagggtgacctgaacgctgaaggaagtctaggccttcctgtaggtgaggcagggaaagccacgtagacctgatttagttgaagtgttttccaccaggtctcaactcttcattttgtcttggtatagcttttctggctgactttctagcaagctggttgggctctttgcttgttccaaaatggtagttttcaccagagacttttcagatgagcaggaagcttttttcagaatgtatgttcttctaactctgcttgagtcccccgccatgtattctgataggcatttgttttcccaccccatcccccacttttttgaagtgggggcaatgactacttttaggggaatcatttttctgttgctggtttcaaaacattaagagcaccaattttttttttttttttgcaacagagtctttctcaggctgaagtgcggtgacatgatcatagctcactgcagcctcagtctcctgggctcaagtgatcctctcaccttagcctcccaagtagctaagaccactggcacccaccatgcctggctaatttttttaaaaaattactttctgaagagatggggtcttgctatgttgtccagactgggcttgaattcctggcagcaagtgatccacctgccttggccttccaaagtgctgggattacaggtgtgagccactgcacccagctcaaattttccttttcattaaaaacatacatatatgtatatgtatgtatatacatatgtatatatgcatg

SEQ ID NO: 129107 - DNA, 1034 bp, Homo sapiens
tcttcacaaccagagtgggcaccacaggacaattctacatctatctaggactctgagtttttgaagggtttccatatgcattgtttggtttgctgcttgcaacaaccctgttgttttaactgaaggtcttagggcctagggattccccagaggccacacaacttgccagtggcaggggaaggtcttactcttccacagccttctctgtctttctccctttatggagcataatgaaatgtacgtgcacacattcatgtagatttcattatgtccatgtagaattcattttgatttcaaatatgtttccttcccagagaaatcctgtgaaactatgacattgtttttctctctctccttctccaggtcttattttccttctttaccatcctgattaactctatttttgtttgttttctcttcttgcccgctcccagacacgaatgcagagtttgagtccagatcccaaagcccagtacacaagtatctacggagccctcaagaaaatcatgcggaccgaaggcttctggaggcccttgcgaggcgtcaacgtcatgatcatgggtgcagggccggcccatgccatgtattttgcctgctatgaaaacatgaaaaggactttaaatgacgttttccaccaccaaggaaacagccacctagccaacggtattttgaaagcgtttgtctggagttagaaagttctcttcttcaacacgtccctccccagggtgttcctccctgtgacccagccgcctcgacttcggcccgcttgctcacgaataaagaactcagagttgtgtgtgcaatgcacacccagacacacgcacgcacacacacgcgcgcgcacacacatgcttttttctgttcccctccgctttctgaagcctggggagaaatcagtgacagaggtgttttggttttattgttatgtgggttttcttttgtatttttttttgtttgttttgtttttaaacattcaaaagcaattaatgatcagacataggagaaaccctgaatagaaacaaaacttttgaatg

SEQ ID NO: 129108 - DNA, 1019 bp, Homo sapiens
ttgtaaccagattttcttttttcccccttctcagctgtagatatgatatctcctttcagggccccagcttaagggcaaagtgagttaatgtgtagacaaaggcgagggacaagagagagttaacatctagacagtggaaaaagccatggtgtgtggtttctgggaaccaccaacacttgcaggtttagctttttcccagggttgactacaagaaagaaaaccatgtttttgcaagattaaaatgtggttgagtgtgcctaaattaaccatccccatttttatcatatttccaccatcacttcagggttttaagagtcagtgctcacctgggcggagctggtagtacattttgcttcttagaaagctaagtcctgggttccgtctgattttaggttccaggaacttcctgagaacacccgatcgcagagggtaattttctggagtttgttttgcagggatagctgggagtatggccaccctgctccacgatgcggtaatgaatccagcagaaggtaatgtttcatggtcccagggaggggcagtaggggatgtgcaaaggggcacaaaaaatggttgtgggagagtggagaggactgaaggtgggcagagcggctcctagtctccagtcagagcagacaggagaattgaattttttactacgttatcaaaggcctcaagaaaggacgtgaacataagagtttttggtattcctgtgctcggagctactcaaagtgtgttctacagaccagcagcatcagacatcttgaggggtgttggaaatgctaattctgaggctgggtgcagtggctcatgcctgtaatcccagcattttttgggaggccgaggtgggcagatcacttgaggtcaggagttcgagaccagcctggccaacatggagagacccccatctctactaaaaatacaaaaattagcctagtgtggtgtgtgcacctgtaatcccagctactggggtggccgaggtgggagaatcgcttgaacccagcaggcagaggttgcag

SEQ ID NO: 129109 - DNA, 1018 bp, Homo sapiens
gccaccttccaggcgtgagtcctggagataaaaatggattttaacctaggactgccgggagctggccctccgcggctgctcagactagggctgtgtgtgctggctctcgcctgtttccggtgtctaactggcttgtttctctttatggcttggcttcattccgacctggggtggggccacatccaacccactgcccactggctgtccgtctggcctgccccgcggttccaaccacagtggtgaagcagcgcttgcagatgtacaactcgcagcaccggtcagcaatcagctgcatccggacggtgtggaggaccgaggggttgggggccttctaccggagctacaccacgcagctgaccatgaacatccccttccagtccatccacttcatcacctatgagttcctgcaggagcaggtcaacccccaccggacctacaacccgcagtcccacatcatctcaggcgggctggccggggccctcgccgcggccgccacgacccccctggacgtctgtaagacccttctgaacactcaggagaacgtggccctctcgctggccaacatcagcggccggctgtcgggtatggccaatgccttccggacggtgtaccagctcaacggcctggccggctacttcaaaggcatccaggcgcgtgtcatctaccagatgccctccaccgccatttcttggtctgtctatgagttcttcaagtactttctcaccaagcgccagctggaaaatcgagctccatactaaaggaagggatcatagaatcttttcttaaagtcattctctgcctgcatccagccccttgccctctcctcacacgtagatcattttttttttgcagggtgctgcctatgggccctctgctccccaatgccttagagagaggaggggacggcacggccgctcaccggaaggctgtgtgcggggacatccgaggtggtggtggacaggaaggacttgggaaggggagcgagaaattgctttttctcttcctccctgggcagaat

SEQ ID NO: 129110 - DNA, 1070 bp, Homo sapiens
agatcccagaggagggaagaaaatttgcagtgactgaaaacagtaaaaaaaaaaaaaaaaaaaaaaaaaaaaaaaaaaaaaaaaaaaaatttatgtatataaaagttgcattacacagtacaaaatagatggataatgtttatcctttatttttctatgtagaagtttttgaatttgtgtgtgtgcttgtgcgtgtctacacctagtattacggctgggactctccagctgtttttgttgttgttatgtttttaagagggttgaattcttccatcaggtgaacgaaaaaggcaacaaagtaataaatcagtgaatgtggccggcagctgtgtttagcccctccagatggaagtttcacttgaatgtaaaataataaagtttatattttgaatttctcttttcatgggggaaaaaaggtacgttaaaaaaatcaaaataatgatatgtcacttgcagctacctttttttttcttttaaattcaatcagccaccttcatgtgcctttttcctttgtctttccccaaaattccaggaccagagatctggccctggcctattttctcttgctgtgtacacacacgcacacatgctgggtggcaggatctcgcccgctggagggtggtggagcccagtagaattggggtgactgggcataaacctgctgagactgcttccttccctggttgtgagtgatgtgaatgcctgccttccccggtcagcacttagaagcccttgataggcagcatttggcgacttgtggggcaggtgtttgggataaatcctaccttcatcctaggacttatttctgcatcagccttttaactcaggcacttcaggtaacgtgatctatgtgtgttttgactgaatctcatctcctgtgtttccctgtgcagtctagggaagcatgtctccagtctttgtccctgtcttgtcccaaccattaattctcatgtcacagcttctcactgcatgtgacaagagccaggcctatctgctagggccctgcggctgaggtctgacctggaccctcatgcccgagtcggaagacccctctccagaagccattctgc

SEQ ID NO: 129111 - DNA, 1014 bp, Homo sapiens
gttttaaggattctctgtatattttggagatgaatccttcatcagataagtgattgcaaatattttctttcagtctatgacatgtgttttcattctcttaaatgtatctttcaaagagcacaagtttttaattttagtgagatctaacatcagttttttctttcatggaaatcattcatggattattcttttggtgttgtatttaaaaactcatcacaaacccaaagtggcatagattttctgtgttctcttctagaagttttatagaattgtatgttttatttaggtctatatataatccactttgagttgacttatgtggaaagtattaggtctgtgcctagattattattattttttgtatatggatatctgattgttccagccctatttgttgaaaagactatcatttcctccattagatttcatttactgctcttttgtcaaagatccccttgactgtatttacgtgggtctatttctaggctctctattctgttccattgatctatgtctcctttaactaatgaccacactgccttagttaccgtagcttatagtaagtcttgaggtcagatagtgtcagtccttcaacttccttcttcttttttagcatgttgggtattctgggtcttttgccttcatattgcattttaagcttcattgattcatcaaggtctagcttagagccttacttaattacaggttctgaattaattgtctactgtttgtttacttctgagtacaactaaagtcatttaagactactggaaaataagttaccttagctttttcatctgaaaatttttctacagttataaattgtatatttatatagtaccattatgatgagtaatacattattaccataatggtaataatgtattaccataatttaccactttatgacaataatttataaccataaaattttcagatgaaaaagctaaggtaacttaaaatatttaggcaccagaattcttctcagggaaaaatgccattgtttggaaaaaa

SEQ ID NO: 129112 - DNA, 1150 bp, Homo sapiens
ggagtgacctcagcgccacgagggttccactgctttgatggccacacgcttttgcaaacggtttgggggtggagagacaccaggtgatggtagggaagggcggtggtgactggcacggctaagacactgcggagggtttcgctgtggagatgagaaggtggaggttctgggcactgtggctgcgagtgtgagcgatgcgtttgtgggaatcagaggagcggatttgggaaaagtgaatccttgagattcagggccttactttcgttaggggtgtgtgaagcacactgggtgtcaggagaggatgggaatgggattcgagaggcctttttttggactcctcgagagaaaatggagagagtctcgaacccaggagataggaggcgtattttccccatgcacccatggatcacgcccccgcccccacattccccccgtaggaggcaagacctgagcgcttactcacgtggctcccccatccgttccgcgtccatctccaagactgcctcacagggacccccaggaggctccgaaccatccagctttctgtcaccgccgccgccaccagcgttgtgaacctctgaccctcgcggctctgcgtccattctcaggtactgaaagttttccgggctcttccgcacccgcggatgtggcgaagccgcggggcagctccgctcgcgctccagtcgcaggatgtccttgaccgagaagggggtggaggtgacggggctcagcagcatcccgaaggcggatggggcggggccgaggaggtccgggtgaggagcggcaccctgaacttcccgtcttgtcgctgcaggccccgcagacagacccaagctctgggacagacgcccagcgtcccagacagcgccttcctctgggccatgctggtaggcccgggtccagggccgggtgacgagaccgtagccccccattggttctcgcagaaaccacgtgctagctctgcaccttcctcccccagcgctttcttcccgcgcccgtcgaatcctctccagtccccagtcgccttcctgggaggtttggttcgtattgacggttctcaaagcaaagaaaacgtggagagacagtgctgcgcgcggcttggatctccgtcaatacggtactagcgggagcttccgaggtcaacctaggg

SEQ ID NO: 129113 - DNA, 1027 bp, Homo sapiens
cacatcccatgagagtgcataaccagggagaggttattcacaacctcaccaaactagtatcattttaggggtgttgacacaccagttttgagtgtactgtgcctggtttgatttttttaaagtagttcctattttctatcccccttaaagaaaattgcatgaaactaggcttctgtaatcaatatcccaacattctgcaatggcagcattcccaccaacaaaatccatgtgaccattctgcctctcctcaggagaaagtaccctcttttaccaacttcctctgccatgtttttcccctgctcccctgagaccacccccaaacacaaaacattcatgtaactctccagccattgtaatttgaagatgtggatccctttagaacggttgccccagtagagttagctgataaggaaactttatttaaatgcatgtcttaaatgctcataaagatgttaaatggaattcgtgttatgaatctgtgctggccatggacgaatatgaatgtcacatttgaattcttgatctctaatgagctagtgtcttatggtcttgatcctccaatgtctaattttctttccgacacatttaccaaattgcttgagcctggctgtccaaccagactttgagcctgcatcttcttgcatctaatgaaaaacaaaaagctaacatctttacgtactgtaactgctcagagctttaaaagtatctttaacaattgtcttaaaaccagagaatcttaaggtctaactgtggaatataaatagctgaaaactaatgtactgtacataaattccagaggactctgcttaaacaaagcagtatataataactttattgcatatagatttagttttgtaacttagctttatttttcttttcctgggaatggaataactatctcacttccagatatccacataaatgctccttgtggccttttttataactaagggggtagaagtagttttaattcaacatcaaaacttaagatgggcctgtatgagacaggaaaaaccaacaggtttat

SEQ ID NO: 129114 - DNA, 1139 bp, Homo sapiens
cttcaaatttgctatttgtcagactgtcccaaacctccttgcttcttcctcgcagttcctggactgtgccatccttgggttcagtgaatcagaccattgtggttttgtattcctagcactcaacaggtgtaccaggtattagtgcattcagtttgcttgtccttgatgttggggtgccgttctaaagtacactaacctagcttgtctggtaattgaatgcagttttttcctcttctttttcttcccattaggcataacatctcattcaccccaatatgagttgaattttgtttggttagatggaggaagggagagcctccactctgtctttatctctgcaagtaagagaatgagatattctgctgagaaaacaaggaagcatggagcagacagactttcttaaatatagttgggaaaattggctttctggacttctctaagtgtgtactggtcagatttggtttctggatgaaggaaccgtaggatagtcatgttgaagcatttggatgactcagagctagctatgactttgcctgttgtgctctaagaggagtgtgcctctgcagagctagtctgtgtgaggatagagctttggactcagtatgaattgtgcctgctgaagctggcagtcgctactgtcatattttatcttggtgccactcttggctgttcctgacatatcctagatgtttctacagggactgaaatgcagcctgtctgggctttcttagttcttaaacagcagtgttggctcaggctctagcattaagtggatctcaatggtttctgtgtgttatcaagtgaagtgactgatctatttgattctttaaacttatggtgctctagtaccccagtgttaagtgctcagtggctaagtgttcttccctggagacgtggaaaatgtgcttttttctcatcttttttctttctttgtttctcttttctctctcttttttctgtttgagcatatgaagatataaaacacttttaagcaaacattagtgataaatatccagaatagtctgattataaaaacatttatttttaagtttgcttccacacaagccattatgtaaagaatagccccagattaggttgactatggattctttgcaaagcttttttttcttttcttttct

SEQ ID NO: 129115 - DNA, 1063 bp, Homo sapiens
aggcctggccttaacttggtcatgggtttttttttttttttttttttttttgagacggagtcttgctctgtcgcccagggtggagtgcagtggcgcgatctcggctcactgcaagctccgcctcccgggttcacgccattctcctgcctcagcctcccgcatagctgtgactacaggcgcccgccactgcgccaggctaattttttgtattttttagtagagacagggtttcaccgtgttagccaggatggtcttgatctcctgaacttggtcatgttttaacagcattgaggctaagaacaaaaggaagagagaattagtattcattgagaacttctcttgtgaggtaccattctgaaccctttattttagtatgttccagggacatgtggggtcttggagacacgttcagaatggggggggtccatgaaattaaaactttctttttgcaataatgctaagccgttattggcctgtttacattctcattctctcgttagtggagttttccagaggctttgcaaagtgcgatatggccaccgatggaatgcaggggcagctataaagacccagctgcctatagtgaagtcagacattaaagagacttccaaatatgcaaaacaaagccacgcttccaagtgtttttgtttgagaaaatagttctgttccttgaaaatatgtatttttacaaacatgtattggatttatcatagttattttaaattaattaccaactactttttgaatgtttcaatttgaatttctgatatggcaagttgtgatagatgtcacccacatagaagctctttggtggttctcagtaacttttaagcaagtaaaggggttctgagacaaacatttgagctgctttacctgttatttcattaaatcattgtggcagtgatatgaaatgctgttgtcccctgtttctgatataggaaatgaggtttgcagaagatgagtttctcatccatggccatataatctcactccaaaaacaaaatcttttttttaaaattatatatatatatttattatactttaagttctagggtacatgtgc

SEQ ID NO: 129116 - DNA, 1184 bp, Homo sapiens
gaggagatgcagcctcttctcatgcagagacaatcactgtcattctccatcgggagcaaactcctgaaatggggcaatatctacccacgtggaaccagaggtgctggtgctggtgctggtgctgagctttgaacttccttcagaacaaaagtaaacagcaagttgcccttgttctttaccataagcagagaaggcctgtctatccaattgtgactgcatgatttgttttagatttgttaatttacattttgcagaatactgaggcacattttctgtgaacttatgtggttatatatactttcaatcagtggatactggaagcattgttatacatttgatgtcttttataaaagaatcctaagggccaaaaatgttgggaactttggagtaactgaaatggcaatgtgctgtatcttatcataatactttggagttcattgtgacttgaaaattccaattaaagttggtataacctctatcatgtattgattaaaaatgcacataccctttgacttagcaactccgtttctctgagtttatcttacaaatatactccacatgtggggaataatacatggacaaggttattcattatagcattatttataccaaaaacatggaaactctcaagtgttggctaattggggatggatttagtaatttatagcacatgcatacaatggaaaactatatagccattaaaaagattctgacgcagtgatagataaagtgttgacaaaggtgagagtggcatgtagtggttgaaggatgatcttttcaaaaaatgatactgagtcgtttgtttatctatactgaacaaaatgtatcaggacccctacctaataccacataaaaaattgattccagctgtatgaaagataaaacagtggaagctcttagaagaaaacataagagcacatttttgttaccttagaatagaccatctgtaatttaatacattttgctttctgccattcagttagttacttatgaccatctctttgttaatcaacaaaaaccaaatccaatattttacttcaataaagggcaaaataaaacatgcctgtgctggtctcatctctttataatcctactttttaaaacttgtataattacatcttattaattgtagtgttaatttgttggttgtttaaggatctaaatggctatttcttcttcttctt

SEQ ID NO: 129117 - DNA, 1040 bp, Homo sapiens
tgattataccactgcattccagcctgggtgacacagtaagaccctttctcaaaaaaaaaaaaaaaaaaaaaaaaaaaaaaagatacctgtgatgtcttagaaatcccacatttctatagtacatttccttgttcttttcttttcagtctcagttcaccagaaatgtacgttgtggatccacagtctcatatgaggggaaaatgcagtccactaaccagattaaccccagccatgtagacgctggtgattattctagaaaagaaaaatatttgcctagctgtgatttatttttagcagttatacggtaaccatgtagaataatcataaatatgtcttaaaggggaggggagtatgtacacagaacagaggtgaacccacttatccaaaatggagagaacagatgactccccccgtggtctctctgttccttaggtatattattattgttttctgttggattatcttccccagtgggtgttggccttatgctcaggagaggaagcgggttttaggagacagacactggcccaggaattgggaagctgagtatcctgtgcgggtcctgttctgaccagttctgtggccttgggcaagtcacttgaacacttcaagtctgctggatgttgttcctctgcaaaagttgatgtaaaagctgccgtgttgaccgcgtagaactctgagagtatggaaagagagagtggctgtgatctgtgctgctgacagaccacaaggactccgccaatgggagcatgtgcttttgatgttatcttagctggaagcagtagccatctggacaccctccctctgggaagccttggcatagcttctctcttacccgactgcctgcccaagactctgaagctcccttctgtatggccccttatccaaggtcgcttcctttggaacaattatcttaggcaaagtggccttgagcactcagcagccaagctaaatttctcaccatacatagagaacctgcttggtttaaattcaagtccaggaggcccgggtcattccaaaatacagagaaactgcaaatg

SEQ ID NO: 129118 - DNA, 1034 bp, Homo sapiens
gcctataactgggaagagggggtaggggaacttgcagaacatactgaatggccctttcttcccatcatcgcatatccaggcagtttaaagctgctggattctaatctctttgaaccggtggttattactggctgctggaacgtaatctctgaagtacaattaagctggtctcatggtttgaaaccagcatcttattccttattaccaagaacagaaaattcccatagcaaactttgtcctcttgtcagggcattttatctgggagttgcaagccctgcttcagtgtggctctaacaagagagccaagatgtggcgtgggactgactgatgggcaccagacatgggtggtgctttgggtatttttccagttttgatttcctctgacctggttgcctggctgtcaggatttcttttccttcaggaggcaaaaaatggcctttaacttgaatggtttctttaaaaatcagacctttgctggtcagactgcacttttatctgacacagagaaaaggcactagaatggataggaagcgtgtttggggcagtgggaattctcttcttcccggggtccctggagtcagtgtagctcaagaacacagaaggacccaaacaccccatctggacccaggtgttacagctacgtggaaaaggcatgagattgattgcaatgagctcgacaccgggaaaatttgattcaacgccaactgagtgtgcaagcaagtgagatgatcagagtcagatgcagttaatcaggaagctgcctgggaggagtaattgagtttaatgtctcagtcatagactcaaagacgcttatccttgggaatggattttagttccagtctctttattttacatgtgagtttaccctagagggaatatgcccgaagccacatagcaagttaatgatagaattcgagatagaagccaagtacccatactttcagccaagcctgtttccccctaagtcataaaatctgcatggaagaggaaaggttggtgaacagagtgaatattgattcttttatacatggaat

SEQ ID NO: 129119 - DNA, 1455 bp, Homo sapiens
tgagcttcaaacctcccagtttatatcttttgcaattctgatcttatatggaattaaatgaagttatgcacatatacacacaatatttatacatgatatgctacttttttaaatcctacagctgatttgttttacataaggatcttactttgttttcttcattcttcctagatcactaacttagaaaaaatacggatacataggtctccagtgcccaagaataaccctaaatctggattaatgtgttggacccatttctttctctttccctctccctcttttcccaggttttcttttaattatctaataagccccagaacttggctctgtgtgggtccaaagggacaggatttagactgaaagtttagcctcagtttgcttctttataactctgcatttttttctgaagctaacacttttatctaaagagccgcattgcaggagatgtactaggttcccaggttcctctaggctgggcatccatacgaggcattccagaatgttcagaggatgccctgagtgccaggccttagggagaataaagacataggaaaaatggtctcatacaactaattagagtcctcacagagcacacacgaaccttttgagcaagggtttgttgactgaataaaacacaaacaaaaacagacattgaaagaaggacattgtgtgctcagattctaagtgatgttgggacttgagctgagtcctaaagaaaactggaactcgagtccacaaagaagcgcagcataagtgaaggtcacaggataggaaggtgttgcatgaggtgtgtgtgtgtcggcttaactgtgtcacttaatatctaacattgacgttctgtgtcatcaaatcctgccccagccactgctgagaccctggtcagtgctggtcagtgctgctggaatgatagcatggaacctgggcttttgtctctccctccgcccctccaggctcctagaacattgccggaaacacaaatacctctccagctctggggaggtcttcgccctcctggtcagcagcctcttagagaacctgctggactatagaaccatcatcatgcaagatgagagcaaggagaaccgtatgagctgcactgtgaacgtgctggtatgtgacatgcctccggtgtgatgggagggtactgtcaggccgcccctgcaccctacagctcagctctaggtagatcccacaaacacagaggcgccctgaggcacctttgtggagccggtgtcttcctaagtctaattggaatggctggctcagctcacaggtatcagcagccacagaccctgaggataaatttggtgtgtttttgattgtttgttttaatttttatttcagtaggtttgggggtacagtggtttctggttacatggataagttttggggatttttttttttttttttgagacggagtctcgttctgttgccgggctggagtgcagtggtgcg

SEQ ID NO: 129120 - DNA, 1013 bp, Homo sapiens
tgaacggaccacgtatacgactgcatatacctttcctgggattctcaagtggtttgaagtcaaacagatttcaacagtgagtcatttgaaattggcatttagaaaaaaactttctgtttccaaatataataacagcctttgttgaattccctctgcagttcacaccagcttggccagcctcctctggccaactttgtttttcaaaagagaaataaaaggcatgcttatataatagagctcctttgtaaaactgatgtgacaacaccagccctaaaggtcaatcacagtgaatgactcttttatgtccagaggagtggtgtctgctcagcgatcctgccagcacccagaaacatttttggaatgctgctttggagtttcttgtcaattacatcttccctcccaaagcctgttctcttcttttattctctgctaatcatatccacagttaccctagactcctccctcttcatctcgcccaaaagctgcttattttacctgtttagtattgattaaatctgttttatttcccacctcctcattggcctccctgccatgcatggccttctcaggtccagttacctcactgcctcagtgggaattccattaaggaaatctcaccatttcgtccattctcgtgcttaaagtccttccatggctccaagtacctggagtataaagcctgtcctccttagcacacacacgtatggcctaactcttctgccccatctcctaggcaatctgttggaaccatactgttcatcccatgctaatttcagtcctctgtgacactggatcgttttctctgcctgaaacacactcttgcaatttctgcacctaactaactcccatcaaggttcagtttaggcaccagcttctcaatgaatccatctctggaacacccaagttgggtgacctgccctttgtctgtcccctgtggcatcctgggcgtgtttctaacctaccatgtttacatgtcctgagaccccgctaacaccatcagctcctccaagcca

SEQ ID NO: 129121 - DNA, 1036 bp, Homo sapiens
aggatcttgccctccctgcaacaccgagtgccttagacagctgctgcctgagaactggcctccagccggtgtcctcattccatggggctccctgctgactgcatttcctgatctgggatgatgtttaccagcccaaaaccagtcatgttcttccaaaagcttctctttgatagaattttgaggccatgccacctcccttccagtccacatggaattccagaatcagtcacagcctctgattttttccaagaagagattgccttcaccattgttaaatgtcagcctgtacggcagagacatggtggtctgcacaagcctggacaagttcttccatattgatggtggagcaacccctgtaatctactccttggaaggattttttgctttgcttatgaaaagctgtgcttgagacttaggtacttttctcacgtggacacactgatcccatcccatattgcatcttggaagagatggatatcaagtacactttggtagctgaaataatcatatctttctgatgtctattgtatctcctttgaggaaaagaacacacatttttaatggagattggctgctttcaggtatgtgtgtctatcattgaaagagcatggactcaaacatcagccctgagttcttgagtccacccaactcccatcttcttgtggcacaggaaagctgccctctccctctcccaccacactcctgactaatggccttcactgcgtcgcagtcactccttccctacggacttctttgaagctcttccttttgcacatacggctttttttttttttttttttttttgtcctattacctcctctgagcgcaaatcactggctacaagggacttaccagtctggattcagcagtttcttttctaaaacccatttgggtgactcagcagccgcatctgctacctgattttatcctggagaatacagtgcaatatttctctttgattatttattcctcttgattgtggaattaatttgattgcttgctaatggtactagtagtactcctttcagaagaaaaa

SEQ ID NO: 129122 - DNA, 2591 bp, Homo sapiens
ctttggaattaaacccatttggtggaattaaacccatttggtttcaaatcccagttatgacatctgttaactttgcaaactcacaaaaattatttgaaattatctgagttttcattttctcaccttccagaatggggataatgcctcctgcatcggttgttgtgaggtttcaatgagatgaaatatgggaaagaagaggtactcacctgatggtccctgctttcctctgctaggcctgagtaggaactggaactctctaagagcattactcatactttttttttcttccaaggtagtttggaatgtgagtgcaagttagttctgcacatacagcccttctccaaatggtggtttcctttgaggtcttttacatgattatttatgactagagacaaacttaataagaactcaagaggattttaaatggagagaactcaagctgtagagaaaggaggaggcaacagacaggatatgtaggggcttacctagagcctggcacgacttctgagaagtcacccagcagaccggctagaggggatttgtgtgccacactctacttgccgggctgccattaaaatagaaagatataaaactgggtcaccaaaaaaaccaaacctcaaggctatccttccagagcagtagaaatgagtcccacagcctggtctttgagcagaggctgggaagataggatacatcactgtctggataccttctctttttaatagaatatattccgtatgattccctttccaccttaatggaaataatagctctctcctgcctgaacaaaagggattccaggtagtattgtggctaagagattacagcggacgatggaaggttcattttttagggaaggtgttgggtaggaagagtcacatttgacagaattcataaataatgtgtcctgaagtcagaggatgactgcaaagaaacacctcatgattccattaaatataaagagataaggagcaaggaggaaaaaagagaaagaattggtctttatttttcttgctaagaactctctggagtattgaaagacattgaaattatccctaaaattgtcacaacttttgtgaatactggtatacggttggaggtgtttttaaatctttatttcctctctttctttgttctagtgacttgtcttgctttaagattttttttaaaggattgttttattcaacatatatcaagttcttatggaatgccagtcatggtactagccccttgggatgtagtggttgagtgtgttcaatggaaacagccccagtatacaaagacagttcactctggtgtgctgtaggattggaaagggagtggtaccagatgaaaatgaaaccctaaagaagactgctgggccatgagttgcttcctcctcctccaccttaaccctctgattccagaattgcagtcattttcttctgccaaggaaatccattaaaaactgcagccacactgcaatttcctaatgtagaacaagatataaagcaggctttgagacaacaacctacctttgtttactctttccaagctggaagagtccttctcctctagttgcccctaggtcactggctaatttattttaaaatttagatggaactcatgtatagttaagtgcacaaatcttagccgtgcagatgggtaattttcacatagctatttgcccacatccgtgcctctaagatagagacatacactgttttcagcaccccagaaagttcccacatgcccatggtgccattttgtgaaaggtatttataaggcccttcaaatttgtggcttcctttctcatacttctcaggtataatgaaagggggagaaaaaccccaccatcaacacaaaacaaggctataaagactgtgcaccttttaacaagtcaatttgtagtcagtccctgggcctgtctttttttttttttaattttgaagctacctgaggtttagaattccttcagccctagctgcttttattctgctttttatttaaacaaaaagagggggaggatctgaaggaaactagttttctgtacaaaggctttgaggtccatggactatacttgtcccatttatcatcccaggtggtgctttgaccctgccataccctggctattaagataaaaagatttgtggacattaaaattatgaatatgtcagtaataatccagcacacattgaaatattgacacagattaccataatttgtgcaacatcttataaacaatgtcatttccatagtagtctaaggcttcaccagcctggcccactgtatctagactttaggttcattttaataattatgctttccttctctgtatcatttgggaagttgataaatatcacttccttagataccttcattcagtgatatatctggcttttacaattaaattggaaaaggtaagtttctctttggtgggttgagagttggaccatcaattctaatctacaaaaggaaattcatgatttcactctgacgcctaggatctagccaaggctggtctgcagtatcagatgtccaaactcatctactattagccatattttgtgagtcgtttgtctaaactttgtcaaaaatgcctttgccatgat

SEQ ID NO: 129123 - DNA, 1043 bp, Homo sapiens
gaacagccacatactggtccagccagaaaaagctgattcagctccagtttctctgggattataactttatcttcgaccatactcttcagaagttgaggtggggccacggccaaggctttcttccacttggaaagaagttccctcccttgatcgtctccaaaccctttgaaagtttactggaacccaaatgaggcctgggggtaaggagagggggcctccaaggactcctagtccagcgctccttctggtcccacgcaatctatccaagtggtgcacactgagggttgggactgagacctaaaaaataatagagtgttcatctgcttgatctgtttggtttgcatttaagaaacacaatggagtacagacagaccgttggagatgggactctattgttcctatgtcccctggtcagatagcattgccaccattctttctccaaaaagaccaggggcaggctttgtgctacatatgtgcacagatatttttactaaccatcataagaaccttggattgtagttagtattgcctttgctttaaaatgaggaaacgggctcagagagtttaagagacccagccatgtttggttccatgttcactattctagtattgccctatgatgagcagctaacagaactggactttggaggctgggttattttgtccattggagctgaaacaggaaactagggttcataggtcaatgtagatttagcaatgactaatcctccataaggccccagacactatgacattgatgttctcatttagccacataacttccaagtggctatgagaccattggaaaaaaaaaaacaaatttcagataacttgcccaatgtctcagtaacaaactgacctgtcaaagatctaagccctttttcctcttttaatcaaatgaactcgcctccctaccccctaccctgctccctcaaaaaaggaaagacttatgctaagaaatttgaacaggggtgagaaacatcccgtgggggaaaaccgcctctttttaatacaaatatttgctactgcacaatgacaggttt

SEQ ID NO: 129124 - DNA, 1591 bp, Homo sapiens
gcttttaaataggcatgatgtggaaataccatcttggtttgagatgcatttgaggattttaatttatggaaagcacaacatatgcaattatatttattgaattcctagatgcagtatggatatttaaattgttaaaactttatgaaaacttggaaaaggttgttcaggtttataaatagctttagtgatgcctcccctctttaaatacctgtcacaccgtatgaatatggtgagatcagactccctaagactcttttcaggttcatttttataatgtttactttttaggacagaacagtagctaaattaaagtaatatccagttcttactgattgagacagagtggaaagaaagacatcattgtacatcactgtcattccaaaggtacagtgtaactctggatggaggaataacttacctatcactacaacacttacaaatgagaatttctcagaatttcattctaggcaagttccactcaacaccagatcaagcaattctatctatttacactattagcctagttttctcatacagtcatcacaagcataggaagatacttcaaaaccaaaaaaaccaaggtgcatcattaatattcatttaattcaaataccaaatagtttacatagggccagcttagaaatagatactaaatccagagctactgcaatcaaagcttatatgagtgaatatggtagagttgcctgctaaaaggcaatgtaatataattgcagctagaaccctacagtggggaatgaggaattttaaacacacatttgattacagccaccaaaaaaatagacgtaaaaataaaggcatttggctggtccaagatgtaattatcaatcagtcagcacctgtgattcttttacttatttttttgtggttttttttttttaaacaaattttagcccaattttcttgagtcattctctctctgcagcagcagaggaagggcctgtacctccctaccaatgacttggtgtccttattttctaccccaagagcagggatattagctgtgtccaaatgggttctgaattctacagactcatcaacatgaggcaaggaatcattgaaaaccacctgtgtctcctttgggagaatgacatatctttagtatttacgtagcttattcttctatatctacatatgcaaagctttccttaacagtaaagggtacatatgcatagtgggaggagatcagacctttacaagtgaaggaaagcaacttcagaaatgaattattttctttgctttattatttttaccaagacagagaagtattgtattgagagataatctattttcataatcaatatgtgcctaaattatatttaaatcatttcactctgtactatattttcaggaattacagaatgtggtattcattcacttaaaggtacctctgtagaaataacctaaaactgcagaaggatctgaaagatctaaacatggtgtgcttagaaactgcagattttagatctaatgtatactgcattaataaatgatataaagtgtttgttgaaaaggagtttcttctcttccttttgaaaatcatcactttctgtattttgcttacatttcttca

SEQ ID NO: 129125 - DNA, 1085 bp, Homo sapiens
tcagaactgcgatgccaggtaattagcaggcttttacatcaattatttctatcagcaaatctatgaataaaattttacattcttctagtgttttgggattatcttgctttgtttttcttttacatgcaagatctaatttaattatgagtcatagcattgatttagttctgaaatggttaacgaaaaagagatgcaataatagcctttttaaattgtctaattatacctcatgcaacagtttatgaataatgcatagaaattgcagcagttttttaaaagtcagtatttgtacatttgcaatatatgggctgatcagtggcaggtactttacttatgtgtactatagcatttcaaattgtaaagaccacagtactcatttttgcctaataaactgttttgaattactgaattaataaaataatttaaatataattaggtttaaatacttattagcaggtataggactaacagggatccctctttagaagcttctacacagaaatgaattatagccgggctatattctaatgtatatattgatagagtttcttttatgaggaacctatttaaggacacttcttttatgtatctaagttccattttatcatgttctgtaataaactccaagtgactgaactgccaattgcttctaaaaaaaacttggtggttagctatagtaattaaatttaatacaaacagacgatttagttatggtgacaatttgtgcttttttatttcagggtttgaacttcagtggtgctgatctttctcgtttggaccttcgatacattaacttcaaaatggccaatttaagccgctgtaatcttgcacatgcaaatctttgctgtgcaaatcttgaacgagctgatctctctggatcagtgcttgacgtaagtatcattttaggctacaagagaaaattaaatgtttagtctattgaacagtctcaaagagcctttgagacaggaattataactatcttttactggagcttttacttgaaaacagataatttattatgttgatataagactaaaggtctgaaagtgaaatgaatttggttttacaggtttgatatcctttat

SEQ ID NO: 129126 - DNA, 1069 bp, Homo sapiens
ggtcaggagatcgagaccatcccggctaaaatggtgaaaccccgtctctactaaaaatacaaaaaattagccgggcgtagtggcgggcgcctgtagtcccagctacttgggaggctgaggcaggagaatggcgtgaacccgggaggcggagcttgcagtgagccgagatcctgccactgcactccagcctgggtgacagagtgagactccttctcaaaaaaaaaaaaaaaaacatgctttttagatattgagtaataaacacacaatataagtaaaaattaacactactgaaatttgtggagactacaactgcttttattaaagggcagaaaaatgtaagtttggaagatcaagaatattattatgtaataatttgcttacaggatagacagacaagtatttaaagcaaaggaaactaaaacaatgtttaaatcaaaggaagtaccctattagaagggatctgataaatggcaacttactgcacgtttttgtttcccagcgttactcctaccaggttgtagcatgcatctttttgagagagcagctgggatcgagtatactcttgacttaaatatgtttgtttataaagacaaatggagaaatcaatttttttccctgaattcttaggagcactttagtgaataaagaacctgacagtatgctggcccacatgtttaaggacaaaggtgagtgtaacacgttgttttcacatttcatcttacctgttttatatctgtgctgactttataactcctgaccttctgtacttactaattatgtcagtttttaagagtaaaaacttatatttagcaattttttcctcatacatttctgactttattttttgtttatgggggactttctttattataatggtgacacaggtgtctggggaaataagcaagatcatagaggagctttcttaattgaccgaagtcctgagtacttcgaacccattttgaactacttgcgtcatggacagctcattgtaaatgatggcattaatttattgggtgagtttatttagactttcaatataattatgtaactactcacatttttgtaagtt

SEQ ID NO: 129127 - DNA, 1096 bp, Homo sapiens
tgaaccattcaaataaataaataataaaaggacaacataatagggacttactaggtctcaggcactttgctaagctcttatgcatgaactcatttcataataccttctgaagtaggtgctactattttcttcatttctagttaaagcaacagaagcatcagtaggttgactcaagttgacagctagaaaatgtcagactctagatcgaagtgtaggtctatcttacttcacaactggagcgctatttaacacaccttaggattgtagattgttttggtcagagatgatttcttatgttctagttgaggagtcggcaatattaggcaccaagtgaataaatgagtcatggaagaaaagggggcactgttaagaaccttttgaagtctccttttatatgataatctttttagcactgttctagtgtggtagtttataacttatgggggataacatgtattaaagaaattgttcatattattctggtgtgtttacaggtggttgctgtatatggaactttatctgatttgctttctgtggccagcagtaaactcggcataaaagccaccagtgtgtataatgggaaaggtggactgattgatgatattgctttgatcaggtaaccttcacctttttataagctgtcaacagtgtgcctcaacttcttggtgctatgctgtttcccttaagcagtaatttaatcactgttaagagtacaggattttggcaagtgtttacctagaatttgctctttggaatttaaatcatttgggcttaaggtgaattgatcagctagaaaacccttagtacatttcagtatactgatagtctttctgcatagttcatatatagctatgaggaatttcttctttgtggtactagagaaggatctagtaagacgtgcagtttttaacattaaaaatctaattcatctcttcacttttatatgcgcctgcttgttaatcatttcctaagaatgctttgcattttataatcattacaaaggccagattttgtaaaaactttataaatatgatagaattctaagtagtgatatcaccagtgatccaccataattataggcttatgtttgtacctt

SEQ ID NO: 129128 - DNA, 1040 bp, Homo sapiens
ggggcattttcttgttgatttttgccctcctctctgagatgcctcaagcccccacgccccgccgccgccaaacttctctgtactctttttattattttgccttattttgattccctagaggacgggtacagcagacccaaaagggatcgatttgacagtcgcctttgctgtgttaggcctttgcggagagtgtggtgctcagtgttcttccagcgctggagcaagccaaaacgaattctcttccttcccagccttttgccccacccatgaaagttgttctgctcctttgggaaattttcactgttcgaggcagacatttattgcgttgctaaatgatacctagaagtaactcagcctttacgagtctaaggtaaaggtaaatgggtctcgctgtgttggttgccaaaatactctgctgcctgcacattcggggaacactgtaaatttttaaatagtgaaattgtccagtggcattaaaaatggctttccgattattcagtgtagagtaaacatgctccgaaaattcgaaccagagtgtggtttgttggctataattttatgttcttttggtcttagagatttaatactcatttaaaatcagaattcgtataaattcgagttcttgagttatcatgaatgctaccccgaaaatatgttcacgaagtttacatttctcatcactattaactttttctaaacctgttctgtacttagctactacctgttatctaaaacgtatgttgttactctaagaaagatttagtatgttcaaaattggtaatatttctcaaaaacaaacttctggttgacctttttaatgcagtatctctgctatgttactcatggaagacaaatatttaaacctagtcataaatatttttgctctaaatctctcccaaatccactcaatttggttgtcaaaaattaactgagttggtctttccatattgttgttcacacggattttttttttaagctatctagttttgactagattagattcttggatttaaattttatttactttaaaaatattctgc

SEQ ID NO: 129129 - DNA, 1586 bp, Homo sapiens
caggagttcgagaccagcctgaccaacatagagaaacctcgtctctactaaaaatacaaaattagccgggcatggtggtgcatgcctgtaatcccagctactcaggagtttgaggcaggagaatcgcttgaacctgggaggcagaggttaccgtgagtcgaaatcgcaccattgcattccagcctgggcaacaagagtgaaactctgtctccaaaaaaaaaaaaaaaaaaaaaaacacaaacagaagattgattctggctaatgtccttcgagcagtagaaatgaagtttacttgtgaagtctgacttagatggaaaagaaggaaatactatatgagaatggaattggatcagagaatagcatttagaattggaggataatggaagtcttgaatatcacagggcactagaccaggtaatacataagacaaggcgaaagtggcacgccaccctaactttcattctcaaaaacatcactcttagacctttaaaaggctggattcattttgtgtgcttaggcatatgtccaaaattcagggtagtgctgatggtaggtatcagaaagaaacaatcatcttgaagaattaagaacctgagactgcatgtacctaggtggagatcttacctttcagttgctggggataaaactgacttatttagaaaaagaaaaatactgagtcaaaagcaaaagccatctgtgtgtaggaaataagaaacaaaaatgaaaacttaaaatgtgttcatgtatttattcaacaacttttaataactgttctatgtaccaggcactgttctaggagcatagactaagtcagcagacaaaaagattcctcttccactgattgtatatgaatgactgtgccagtaactctccactgagttttttgtagcacatgtttatcatgttttctctctcaggctggtacatcacgagtattggatgtggttactgatgattgccttgttttgttccaatttataagagagtttcattacaggaaagtcatcatcctaccttaaaaaatgtagacgacgttctgcagtcggtgctcggggctctcctgaaacaaaccatctgattcgtttcattgctcggcagcaaaatataaagaatgctaggaaatctcctttggcacaagattctccttcccaggtatgattttcttctaagttctgtcgtgaattccgttaatgaagcttttgtgctttctttacaccttctagtgcatctgctctgtttcaaatctggagggagattttctctgtgttttagagaacatgcagttagcggccgggcgcggtggctcacgcctataatcccagtactctgggaggctgaggcaggcagatcatttgaggtcaggagttcgagaccagcctggccaacatggtgaaaccccatctctactaaaaatacgaaaattagctgggtgtggtggcaggttcccgaaattccagctacttggaggctgaggcacgagaattgcttgaacctgggaggcagaggttgcattgagtcaagatcatgccactatgttccagtctgggcgacagagtgagactgtctcaaaaaaaaaaaaaatgcag

SEQ ID NO: 129130 - DNA, 2006 bp, Homo sapiens
catgacaaaactccatctctacagaaaaattttaaaaattatctgggtgtggtggcacatgcctgtagtccaagctatttgagaggctgaagttggaggatcgtttgagcccaagatatcgaggctgcagtgagctgtgattgtgccactgcactccagcctggctgatagagcaagaccttgtctcaaataaaaataaagtaattttccctagatcctgagcccctcaaacagtttgtggtgcatggaaggaaggttgttgactgaccgacacaattcctaaaacaaaaacatcaaaaaagcagtacattttgaatgtttcatttgctttgtatgtaaacattgttctccttctccagtagaaaatagagaaaaaacaattttgactagagaaacttaaaatttttttaagcagcatttcaaagtgctgcatgttcctaggatattaaatctgcccctaccatgttcaaatatgtgtgcaaaaaaagcacattcaaagtaaattgtatgaatttgagatcatcttttccctgtcgttctgttagatgaattgacataagccttttttgaatattattgctgtttatgtcgtgaacgtttgtgtcatcaaggatatttcaatgtaaaatgttctcattatgtaatagagaatttgctttatatttaactgggaagagaatcaaatgtgtgaacagatcaccatcaaacatggcttcacgatatgaactgctttttctccctgtgatatatatatattttttctgagaccaagccttgctctgttacgcagcctgaagtacagtggcatgatctcggcccattgcaacctctacctcccaggttcaagcgattctcccacctcagcctcccacatagctgggattacaggcatgcaccaccacgcctggttaatttttgtgtttttcgtagagacatggtttcaccatgttagccaggctggtctcaaactcctgacctcaagtgatcctcccaccttggcctcccaaaatgctgggattacatgcatgagccactgtgcccagcctactctgtatgatatcttaaacggaggtaatttttacttcactttttgcccattggtataatttttaaacattgccacaaacttcatatcagtggaaatgttagtagtccaagtaataaaaaaaaatctagatagagaacttcatttgtaatttaatttttatgtaaagggaactctcaatttttatattacttgtctttaactggcacttctatccctgctaatataaatttcattttatcagtctttggttggaaccctgttaacggggtttccagagagcttctgtgcttataccatcaaactttgtattttaagagaatggctggctttcaaccctaagaaggaaatatcctccaggtcccatacaatcaggaaaattagctgggaagagccaaaaaggagagcagtgcaagtgtagtatctgagcatgtatggaacttctgtgtctcgttctggcccctgggctggagggcatgtgtagacccgtgctgagtagaaacagcttggactgaaggaggtatgctgagacttacctgtgacacaagcaccatgcagatggcttcctatggatacatccagcacaacatttggtaaaaattgcaaatagacaggttcctcctgtcccttttttgttgcaccatcccagagcgcaatgtttttttggcaccttccatataatcttaggctggcctctcaacatttttgtgttaaacttccttattcaaactgaaaatgggtaattccagggtgaagaagctctgccacactaactccttaccgctgatcttcaaaaagcatatgtgtactgtatttaattttggattcaatggctgtaggcctagaatatagaaagtatgaattgattataatactccttgtatattttgcactttcacagggcagccctgcactgtatcgaaatgttaacactttaagagaacgaatatcagccttccag

SEQ ID NO: 129131 - DNA, 1029 bp, Homo sapiens
attaagctcggcaagcatttagtaaatgaaataaattcatataaattttatatgagtaccaaacacccaaccctgatgttaaaaacaaatatattcagccaggcgcggtggctcatgcctgtaattccagcactttgggaggctgagacgggaggatcacttgaggtcaggagttcaagaccagcctggccaacatggtgaaaccctgtctctactaaaaatacaaaattagccaggcgtggtgacacatgcctgtaactccagctactggggaggctgaggcaggagaatcacttgaacctgggaggtggaggttgcagtgatcccagatcgtgctattgcactccagcctgggcgaagaagtgagagtccctttcaaaaaaaaaaaaaaaaaaaaaaaaacacacacacacacacaaatatatccaatctgataatctgctatattctttaactcttagattgtaattcatttggttgttttttcagtcttttttttttcccccccaatcacgaagcatttcagataccagaatgtgacaaaatcttggtcttactgtaatcattataaccattctctggtactttacacactaaggtttcaaatgattctgttttgaattcttgaaccatctttaagtgcatttcagcacctcccatgaggattgctctgttagcccaagacaagtccccctcatctacctctagagtgcgtgacccattcagatgtaccgatttatatttgtagtttgtgactcacttattgtttcagttttttcctgggttttaaaatttatttacatcattataattctgcagacagttccttttttttagctagaaaaaaacaggtacgttgtggttgtctttttcataaagtcatacagagtattagagcataaccacatctttcaaaataacaggtgtcatcatttaaaaagcgtgaggtaccatattagacatgcaaaagtattttagtatatctttgtaccttttaaggcctgaaaaaacttaattctaataatatga

SEQ ID NO: 129132 - DNA, 1053 bp, Homo sapiens
aaaccccatctctactaaatatacgaagattagccaggcatggtggcatgagcctgtaatctcagctatttgagaggctgaggcaggagtatcacttgagcccagaaggtggaggttgcagtgagctgaaatcgcaccattgtactcaagcctgggcgacaagagtgaaactccgtctcaaaaaaaaaaaaaaaaaaaaagaaaagaaaaaaaatatatataatatatatgaaaacatttatgcctgtgtcgttttgtttttattttgtgtttatagccagaaaggaaggtctcagcgcttgccagcagtctgggttccctgcagtgttgtcctccaaacgtcggagaatatcctatcagagagactctgatgaaaatctgacggatgctgaaggaaaagtaattggtctccagatattcaatattgatacagacagagcatgtgcagttgaaacttctgtagatctttctgaggtaattcacttactttacgcataggaaaatgaagttgttggttttctgcataggcagttttaaggctgtcagtgccgttcttcaattttagtaccttgttctgccctgtggttcctggggtgtgtgtgtgtgtgtgtgtgtgtgcgtgtgtgtgtgtgtgtttcctacctgttaattttatggttgctggtatttatcacttattagaaacagtttggataatgatctcacttttgactactaaccttacaaagagagtaagccctggggtcttctacgtatgaggtattctagagggtgatgctccaagaagggaggaagttacagtcttgcccttaggcagtattttttctactggggagcagggtataagcagatggcttcagtggagctggtggatcaggtggagattctgtgtggggtgtactccacaggcttgggagtcttgcacttatacctgcccctgactgctttccttctgatggaaatcagggtgccattcagcaatttctcctttgctcacttctttcaagtagctctagggatttttgtggcttataactacctaaaccctgtcaa

SEQ ID NO: 129133 - DNA, 1020 bp, Homo sapiens
tacgatcaataagaattagtgaagtattttcaagctcatggaatttagtataaagaggtagcacctatgaacatattaacaagtattctttgttataggaacactacttgtaatatttttatttgtttttaagcatgtaaaaagagtcttaccaggatgtaaaaattattctttctcaaaatcagtatgcttgtactgggtgaacattactagcaagggtttagattgactttttttctacttgggtctttaaaactcttatgggcatataattggatcttgtgttttattaatccattctgataatttattgtaattggaatatttcgcctattaactttttaggtaattacttaacatggttttattcacatctgtcattttatcatatgttttctattcctgattattgctctgtaatctttcatagtctggttagttgatattatacaatttcacataaaatacagaaactacaaactctacagatcaatttcctctcctttccagccatggcttttatgatcctttacagatacacacttacttcattataagcctcacaagatgttgtttttggattaaacagctgtatgtgctttgtttttctttttttttttttaaggcagtttcttactctcttgcccaggctggagtgcagtggtgtgatctcagctcactgcaacctccctctcccaggttcaagccattcttgtgtttcagcctcctgagtagctgggattacaggcgtgcaccaccatgcccagctaatttttatgtttttagtagagatgggattttgccacattggccaggctgggcttcaactccttgcctttagcaatccacccatcttggcctcctaaagtcctgggattacaggcatgagccactgtgcccagccaaaacagttatatgtgctttaaataggttaagaggggaaaaatagtcttttatatttacccagatgtaccatttcttatgttgttttttcctaaagatctgagtttctctgtctta

SEQ ID NO: 129134 - DNA, 1045 bp, Homo sapiens
tgaggatatcattttcatgttagtaaaacctagtataatatatgaaattttcaatgatctataatgccttagtgcttctgaaataacacgtgaatgaagaacagttgagaaggttagaatctccttggagagcctcagaattggtctgtccatttcatggatccatttttacttagtggtggtatttgtaaagaaaatttatatttcaattttattaacgtttaatatgcaaatttttacttggaaatctgttgccatattttaattggaaatgtgcttatcttctccattttgaatttgctctaccaacaattattttatagctttgctttactagctattatacaaataatagctgaatattatcacattaaaagattctagtatatgccttttagataagaaatatagcttaatttttaagttactctcatttattgtctaattatagaagatgaagaaaattttgaagcacctgcctttctaaatatgaggaagaggaagagagttacttttggagaggacttaagcccggaagtgtttgatgaatctttgccagcaaatactccattgcgtaaaggaggaacacctgtttgtaaaaaagacttcagtggtctcagttccctgctgcttgagcagtcacctgttcctgagccattacctcaaccagattttgatgacaagggggagaatcttgtaagtatgaaaagcgtggaacaagcttgccatatgtattttcatcaggcttcacctgctttgcatgagcaataactatgctttgaaataatgagatagactaaatgatatgccatggtttaaattaatctattttgtatgtaggtttttatgagtttttgcccattacaaataatacttccctgactccttgtacatattgaacagatttatgccaatgaatttaacaacttaggtaaactggatacattccttagaagacacaaattaccaaaactcactaaaggtgaaataaattacctcattatccctatatcaacttaagatatttaaattttagttaaaacct

SEQ ID NO: 129135 - DNA, 1996 bp, Homo sapiens
ggaggctaaggcaggcagatcacttgaggtcaggagttcaagaccagcctggtcaacttggtgaaacctggtctctactgaaaatacaaaaaaaaaaaaaaaaattagccaggcatggtagcgggtgcctataatctcagctactcaggaggctgaggcagaagaatcacttgaaccggggagacggaggttgcagtgagctgagattgcaccactgcactccagcctgggtgacagagtgagactccatctcaaaaaaaacaagtggtcaaaataaaattttcctatcctacactttaaataaaatttaaaacaaagtattttcatggttatcttaatgtcctttattgcgatttcattatacaaaatgtatcgtggaataaatgggtgttcatgaaaatacatgcatttattgtaatgtgatttattctgctatcttagcttggtaatatgttaagcagtcaccatggaaagtggcgaaagtttctgagtatccagtaaacttaaaattttttaaaacaaaaaaaaaaaattggatttcaaaatttctgctgcttggctcctcttttttttgtttagatatggtattaaaggtggatatcctaaacacagtgtttccaaaggaagatgtatgttatagtttttggtttcctaccctgatttagcttttgtcttgtttatcaggcactgatacctttagttcttcaaataaccatgagaaaatatcctctcctaaagttggtagaataacaaggacttctaacagaagaaatgtaagtgtttgtgtttggcacaacgtatttgtttttaaatcgtgcaatatacttttctgttttcatggccaaatgataatgggtgaaatcttagtttaatcagtgtcattaagaattaatactttggccaggcaccgtggttcacgcctgtaatcccaatgctttgggaggccgaggcaggcggatcatgaggtcaggagattgagaccattctggctaacacggtaaaatcccatctctactagaaataccaaaaaaattagccggacgtggtggtggacgcctgtagtcccagctactagggaggctgaggcaggagaatggcatgaactcaggaggcggagcttgccgggagccgagatggcgccactgcactccagcctgggcggagtgagactccgtctcaaaaaaaaaactaatactttatcctacctagcatgtaacctataaggtgatagtgtgtttctgatttgattttaattctattagaagaaaaatctagaaagatgctttcagagctgtgttaacatggaagttaacaaaatttgtttgggatctatatgattttatgaatttcgttgaggtgaaaatggagaagatcagcatgtaattaacagaaccagaaaataatataagtataatcttttttaaattgtgcttcagtctgttttttaacactgggtttcaactgggagttatatataagcataactcccattgaatgcatgtcttttgctatttcgttaaattagataaaatttggatttttgtttataacatcataaagtataaacatatactgttatggggtatttagcttatagggttggatattaaacccaggattcaaacctagataatctaaaaattcatgatttttttccccataacccagtagttaggtgctaaattgtaggttcttaatgagtagttgatgagtgaataaattaacgaattcttaagctgttttttctttcttccctaatataattgggtaatatatgtatacttctgggtctgcatttgatagttcagaaattggtaattaccatttccaccaattttcatcaaagtgcttttaataaggtttgtgaattaagaataaatgggatctaaagtggtagaagcatcctgggaagcacaacaagagtgagagcagcacattaacatgtaattgcttgtgctttacggtatcctactttacactttctttatagcaattg

SEQ ID NO: 129136 - DNA, 1042 bp, Homo sapiens
gtcacacactcttgataaaatgatgaaagattatcttgctgaaaaaataccattaattcaaaaatatacatacaacttattacattagaaattgatttccttcgtgtgtgtgtgtatatatattttaaagcactcttacaaagaatatacacctattcatataaaattacggccagaaagtacaaaaaggattgagcattaagtcactgcaatccctcccaggaccttgctgaattaataccatttaggtactaaaaggaatacacttagaatagcaatgagaggaggaaagggatgaggaggggtattgagaagccgacgacagccttcaatgaatttctagaagaccaagcagatgggagcatgttgacagataaaaaaaggtggaaagatttacagttcagaatgtgctaggagggagctagagaggagctgggagccggcctgttcatgggaatcccaggagaccctggcccagaattggcaggtacgatggatggtgagagtgagaggtggtactgaaaaacagagaaatgaattgaagtcctatacgtgggacagtttgcaccagttggcacaccagcctcctcccaccctgatgctcagaacagatgttgtcatctagattaaagccctcattctggcatttggaaagtcccacagtcttgacagccagctcttgccctaatgcaaatcctgacagttgaccctccagtattctgccccaccctaggtaggatttccacgcaggaaagagactgagctggaaagcagaggaaacctatataccaacttacccaatcttaaataagaaacaaggcaattgaatagaacaaatagcatgaaagtgaaaagaccaatgttaataaggttaaaaactgacttcagagaaataggttattcaaggaatagaaggaaattttacatacataaatactccactccaatttaagaaaatatcatctgcataaaagtaaggagatactatgaaaaaggaattgcaaaaacataaaatttagtagttggacaaaagaattaaagt

SEQ ID NO: 129137 - DNA, 1074 bp, Homo sapiens
gttattaatttaaaatgagatccatagggtgggtcctaatccactctgactggtgttcttataagaggaggaaattcggacccacataaggacaccagggacgagtgtgcattgagaaataaccatgtgaggacacagcaagaaggtggccatctgaaggccaaggagagaggccccaagagacaccagccctgccaacaccctgatcttgcactgctagcctccagaactgggagaaaattagtttctgttgtttgaactacctagtttgtgacattttattacagtagccttacaaactaatacattaccctttgtctaagaaagtagagtacacatatagttttgatttttcagttgaagaataaaccaaagagaaataaaaaactggctatagggagaagggaggagacaggagagaatgtgaatgcaagctagacttcgttaagtgtgtactgtttttcagttttgattgtgggaccatttaaatgttttacctgactatgaaacaaaactaaaactagtagaaagagaacaatctctaataagcgaaagcaaaatttgacaaattcttactatgtcaagttggtggcttaacttcattaagaattttttcaaacctagaaatttgaatataagtgggataaatctttttttttttgagatggagtcttgctctgtcacccaggctagagtgcagtggcgtgagctcggctcactgcaagctccgcctcccgggttcatgccattctcctgcctcggcctcccgagtagctaggaatacaggcacctgccaccacgcccggctaattttttattttttattttttagtagagactgggtttcaccatgttagccaggatggtctcgatctgctgacctcgtgatccgcccacctcggcctcccaaagtgctgggattacaggcgtgagccactgcgcctggccctataagggggataaatcttaaggacaaaaataactgcaaagaaattataaacagtatgaaacactcaatagaagcactgaatttagaataaagcaaataagcaatttttcccatcattaagaatc

SEQ ID NO: 129138 - DNA, 1015 bp, Homo sapiens
accagttaaaaggggttagggtcccttggtgaaatggctgctttcagatttacaacaacaaatttaataagtgagcctggttgggtctgtaccagagtacaaggaaggatgctaaaaaaaactactggtgtcatgttaacagacacaaatccatcttcaagggacttacactgaccagatatgatcatcagcattgcaaagcattgaagtacaatcatgaaataacacataagtttattacttttttttaattaatggacactttagaagcttgctaggatacccactcatttttctgataacaggaaaataaaatttgagctctatttcaggtaaacaaatagttgatgagggaaaagttgtttatagaagaatttcaggtaataaaagaaatgctcaacaaagctgcttaaaacgtttgataaaaggctgatgtgacatagtaacaatcaacagaggaaagaaacaccgtatagaatgggagaagatactgtaactacaaaccatacatctgataaggggttaatagccaaaatgtataagaaactcaaacagctcattagcaagaacacaccaatttaaaaatggtcaaaggtccagaatagacagttctcaaaagacatgcaaatggctaacatcactaatcatcagggaaatgcaaattaaaaccacaatgagatatcactggctattatcaagcagatgaaagattacaagtgttggagaggatatggagaaaagggaatcctttgtacactatcaataggaatgtaaattgctacagcctgttttgattggcaaagtcaactaaaaatatagaactgaatctctaaacaaaatgttttatttgggaaaacgtaattgcagtttggggcaaacacacagaccgaggtggtctttgatatgtcctaagaacgtagaaagttggggtttttagtagaaaaagaaatgttacatattatttagaaaaaaaactcactggccctaagcaaaattttggggagctggtaaactc

SEQ ID NO: 129139 - DNA, 2718 bp, Homo sapiens
ttgggtgtttgaaattttccataatcaaaagttaaaaatatagcagtatgagccctttatcagagagagggagctaactgcaagagctaaaagtggagccagcagataagtaagcaccaggggcaggcaagtgtgtgcttgatcaccgtaacctctcctatatggtgtgatttgttgccatgtccatgaattttttttttttttttttttttttttttgagacagagtctctctctgtcacccaggtggagtgcagtggctcgatctcagctcactgcagcctccgcctcccaggctcaagtgattctcctgcctcaggcttccctagtagctgggagtacatggcttaccaccacacccagctaatttttgtatttttggtagagacggggtttcgtcatgttgcccaggcttgtctcgaattcctgagctcaagcaacccacccacctcggcctcccaaagtgttgggattaagggcatgagccaccgtgctggcctgaattagtttttaaaaattttaaagctattctctgaaaataatttaaagaagtcttaattatgcaaataagacaaaagataaacatttacttctgcctcctgacctccttcactgtgtgagaagaggaatcagtgattttggagtaaacgaaattgctttagggacaatcccttcagttgttctttggcgattctaagccataatccaccctaaccatttattgatcaaatggcttcccccgggggttccaagcatatacaacttcttctgttattacactatcagcaaggcttttgtactgtggtgaattcagattttgataagtttgtggcctttgctgatgaaatcttctcatgactaagatcagctctgccagatgtattttcaggacagacagacaaacctgaggtgctttaattgttcttttttgggagaggtggggtggtaatatacttctcttggcccatgaccatgaaaaaacagaaatttagtctttcaatcatgttgagcaaattttatgtaagcttaactgtacttctttgaccattcattcattcattcattcgtatttgtggagtagccactgtgtgcttggcactgttgtagatccagggacataacttccaaaatcatgtgaagaggggatctttttttttttttttttccccatatatcagaagctattctggcgattataatctggtggcattgcccacagtgtattaactgaccacactgggtctatgccctacaataatactaataacataatttaatattaaaaattaaaagtatatgaagtaatggatatgttcattagcttgatttaatcattccacagtgcatacatatatcaaaatatggtgttgtatgccatacgtatattcaatttttgtcaattaaaacttttttttctatcttttaaaaagggtcactctgttgcccaggctggagtgcaatggtgcaatcataactcaccgccgcctcaacctcctgtgttcaagcagtcctcctgcctcagcctcctgaggagctaggactacatgtgtgtgccaccatgcctggctaaaaaaaataaagttgtcatgtttttcctcatattaactctcaagtaatggaaaagaatttgaaagaacaagatagcttttaccatgggtcaggccctacattaaccagctctatcacatgtcaactcatttaatattccccacagctttatgtggagtgtgctgttgtgatttctgttttgcagaggagaatgaggtacagaaagttgacttgcccagggttataaaacagttaagtaacagagtcaagactttaacccaaagtatctgccaccagaggccattttttttatttatttattttttgcaacttatctgtgagccccaagttaagatttttcttttctcttggctttcaggttcattgaccaagccagcatttccccaactgttccacggaatgtcaacagatgttccatgaaaaaaatatttactggaaaaatatttaacccagcattttcctaatgtgtatagagattatttatactgtggacttctcatagaatttcatgttaaatgtacactgtaaatcaccaggaggaacattcatcttgtacagttctaaaattatttttccgtggaatgttttgttttcacaggatatctatagatttctcaaggagcacatagttttgtgccatttctgtactcttgaatctcaccattagtttcacctatatattctgtgctgtcacccaaatgacctttcttaaatttaagatcaaacgttgacactctcgaagtcaccatgcagtgagccttcattgctttcattcaagtcactggcaagggctctgctcctgccactcctgcatggatccacgggccgggccatgtcttgctgcatgcagccctgcacctgtgctgtgctgtctcactttgagttcatgcacatggcattcccttctctttgaagagcctttctgcatcgcccccatagtaggccaaaacagcccttgcttgtttgagatttgacttagacattacattttccgtggagccgatcttgaacacctcctacaggccaggtgcccaccttcacagttcacacagccagtcatggtgcgtgtgtatggtcactcctttactttacaccagcagctccttgaagaatacatcctctttgcttccagatcccacacctggcaagt

SEQ ID NO: 129140 - DNA, 3947 bp, Homo sapiens
taaaatacctaaagcattttttgtctgtaaccagtggtatcacctgctacatgggtttaaagcaattcagctccttgcttcctttatcttctctatctctttctctttttcctttcctctctccctatatcttctttaccttccttctctagtatgttggattttatgcgaaatacatatctttttgtttgtttgtttgttttttgagatggagtctcactctgtcgcccagcctggagtgcagtggctcaatcttggctcactgcaacctccacctcctgggtaccagcaattctcctgcttcagcctcccaggtagctgggactacaagcacgcgccaccatgcctggctaattttgtatttttagtagagacggggtttcaccatgttggccaggctggtctcaaactcctgacctcaggtaatccacctgcctcggcctcccaaagtgctgggattacaggcgtgagccactgtgctcggccataaatatcaatttttaaagctgtctaaagagcccaactaacattggttggcactgagtgggcactgacctgtttaatctctagctttaagtgacatgattttaagtaccttaatcatggatatatttttaaatggaaacattgtttttttagacttttggctcaacttatgttttatactttttttagtttttattttatttaaaacactttattcatttgactggccacttaaaaatatcatctgaggtatcaaaaaagattgcatctaatagttagttctaagatttagaactcataaagcctgaactcatgtgggctgtgttacttaccaatctgatgatggtttttccacctctgatgtgccagaaatacatgaaagcctacccacacgtgtcttcctggaggatatttagtcaaaggctgaggaattaagggtcgatttttataatattgaaacaaacctggttctgtttcggagtacagtgcactttatagtaatttttaacaaagggcatgagacctgagtgtcttcaggcatgctgttttagctcataagtcctcaaataccccagaattccaaattttccctcccctgtttcggaggatacattggtagaaagtttcagaagcataatgttgcccatttgcagtcattcattttcagggaaatgggaaatgtcactgcctcatactcatggaccttgtagcacgggaagggtgttagaatggaggaagctgtttcagatgctgttctcattttcatggtttgaggttatatgctttattaattcatgcgttgaatacctattttcttaacctgtggatcgttggagaactaaaagaggaggaggaggatgacagaagggcaagcacagtgtaacatttgtgggtcttgtgaatgcttaaaacacaaaaacaaaacaggtcacctgattatttaataaatgtaaagttcattcccattgttactttttaattagatttaaacctatttacatgcccataggttatttcagttcaaatggcaaactggaagaagtgaagactcctaaaaatccagtgaaaagaaaggatcttttgcgtcatgacccagatttgcatatgcatcaaggctatgataaatatgatgtctctgaattctgctcttatataaaaagttcctcatcgcttggcaatgctacttctgatgaagatccaaatacaaatataatgaacattaatgaaaataaaaatattccaaaagcaaaaaataagtcagaaagtgaaaatgaaccaaaagctggaactgacagtcctgtttcttgtgcttctgtaactgaagaacgtgtggcatcagatagtcccaaacctgctctgaccctgcagcagggtcaagaattttctgctggtggtcaaaatgcagaaaacctttgtcagttctttaaaatttcaccagatttaaacataaagtgtgaaagaaaggatgacttcttaggagctgcagaaggaaaactgcaatgcaatcgtttaatgcctaattcacaaaaagactgtcattgtttaggagatgtcttaattgaaaatacgaaagaatctaaaagccagagtgaggatttgggaagaaaacccatggaaagtagcagtgttgtgagttgcagagacaggaaagatagaagacgttccatgtgttattctgatggtcgaagtttacatttggaaaaaaatggaaatcacacaccatcctccagtgtgggcagctctgtagaaattagtttagaaaattctgaactgtttaaagatttgtctgatgccattgagcaaacctttcagaggagaaatagtgaaaccaaagtgcgacgtagcacgaggctacagaaggatttagaaaacgaaggtcttgtatggatttcacttccacttccttccacttcccaaaaagccaaaagaagaacaatatgtacatttgacagcagtggatttgaaagtatgtctcccataaaagaaactgtgtcctccagacaaaaaccgcagatggcacctcccgtctcagatccagaaaacagccagggccctgctgctggttcttccgatgaacctggtaagaggaggaagagcttttgtatatctacacttgcaaatactaaagccacttcccagttcaaaggctaccggagaagatcctctcttaatgggaagggagagagctctctgactgccttggaaaggattgaacataatggagaaagaaagcagtaattgacatttcctgcagagtctgtggcaagagggaaagtaaccatctatgctgaaatgatctgtctagttcccattctctgttcaacctcagtgtttcaaaagttcctaataaataaactcatttgagttgaacctacttttatgtagaaataaataagtttcttcatcattcagatagaaaacattctattaaatatattcttcttccgccagagagtaaatgctttattactactttgctaaaaaggttatttttaggcacaagaagacatctctcaatttttagacttttttttagcatatatatttttaagtacatatttaccactgaagtcttagactctgttgttagaagcatcttttagaattggctgattttatctggataagaggtttgtttttttgtttgtttgtttttcttttttttccccacaaaagataaattgatagaattaatggaactttatgaaaattgaaggaaatataaacttgaagacttaaagcgggtaagatatgtatttttctttagaaaaaaaaaacctggctataaattttaactaacaaaagttgaaattataaaacttgttttccttttggttaaatttaagagaagacttgatgacttgttttatctgtctcaaatgagatttttattttaatagtttaaatcctaaacaagaaatttcagaaaattatttcagtaaccacaatcttataaattcatcattataaatgaatatataatttagaaataactctgatgtgaaactattcattcctttaaacaagattcctttatattttgttgtgtgttggggggaggaattttttattttttattttttatttttggtgaaaatatagctcagttaaagactgggctctcagattattctaattagtcacaggcagtttgggacttaattcatggttttccattaaaagttttgaaaaccaaaaactcactgataaaattagtttactaacctgaagtgtggcagtaggtcactgattttttaacactgagttttccagcggttctttttttttttttttttttttaataatatctggcacttgacttggtttctctagcttttgcaacatctcctatggctgttttggtgatagcagtttgaaaaactaaattgctatatatctggaatttatgaatgcacataaatcattatatcattaaacaattgtctttgaaatcctttaaa

SEQ ID NO: 129141 - DNA, 1189 bp, Homo sapiens
cgctgggaatgaagattgcagaagtattccctgactcaaacctgaaaaacctggtgttagtcttgggtgatttccagtgaccctctgcctcccttcttcctgccccctgtgtagatttggaaccgggcagccatttttgtttttggaagggaaaggagacagatataatgaatggcttttattgtgcaatatttcagactctcttgaatgcattcgaagggatggaaactgttctgccctatgtcatagccaaaacaaacaaaacatattccctaaacctggatatgtgtttctctcaaactggctgtagttaagagttcagctctcaagcaagaattcggtttgacaatttttagcccttgttcaactgagtattcggataggtcacagccaaagcaaatactatggggaaaaattaatgcacatatttacagcttgcaggtggcattctttctaaaaagttggagatttgtcttaagaaattgcatttgtggtaatacttttaaatagactactttttgcaaatattttttaaatgaactctgataatagtaactccaaatgtaaataaattctacagaggtccccaaagagtgataaatgcttgaatttaagtatttaaacatttagagaccactaagaatctgagaattctagaaatatcagacccagcgaatatgcaccaaaacccccttgacagtagccttctaccgtccctaaggcctccactgtaggaagcatcaatggctcctttctgatgcaacccccagcattgtttactgactccaacccccctcacttaggctgttaagtgttccctgctttggatctgcggggagaacatattctacaccatcaagatgattcattttgtaatgtgccattgtgcttcatgaccctgacaaaatatatttattattggtcacaataataactttgaatttatggttgcctataaccagctggctctcggtttgtgtcttaaccaagaaatacgggaaacaaattgtaagccaggcagcctgcctcgcataatggtagcaaagacttcaccgttggtcatccctttgaaacataaaattctagccttcattgaagttttgctgaacaatattagacacctgtgtgagtggaaataactggaaattctgttggctgctacttttccatctaataaacagcagatgaa

SEQ ID NO: 129142 - DNA, 1058 bp, Homo sapiens
ggagcattctcacaatgtcagccagtctcagcgttgtcttgtcttataaatctccaatgggaatattagcacagctccccagctcactgaaatctattcctctgtcctaataaaagccctgcagtggctccaaccaggcccctgagtcagcctccgggaggccagctccttttctgaggtgtgcaggtgaggaaatggaaagcccctcttggactctagtcaggggagatgcaacgattgaggaaattggatgaagggtacacggggcctctgctgtttttgcaacttcctgtgaatccatcattatttcaaaatcagttttaaaaagtaatgtgcttaaaaccacaaaagtgtgagcctcagttacttcatctgtaaaatgggaatattagtaatgcctcctttatgggacctctatgaaaataacacagatattctgtatttgttttcatcagaccagcatcctatgccttgctcacctattcccttgatcacagggtacctattcccttgatcacagggtaaccaaaagatgaaaaatattccattgtattgttcatccgcagtgtcgtcactgcagcaggtgttcttccacatgccctcattttatgtgacttcattatcacacccacattactgataaggagctgagacttgtttttttaagagacagggtctcactctgttccccaggctggagtgcagtggcaggatcatagctcactgtagccttaaactcctggactcaaatgttcctcctacctcagcctctcaggtaactaggactacaggcatgtgccaccatacccagctagcttttttaaatttttggtagagatgggggtcttgctatgttgcccaggctgatctcaaactgctgccctctaacaattctcctgcctcagccttccaaaatgggactaaaggcattagtcactatacccagctggaagctgagacttttaagaggtcatgtgacctgcccaaagtctcagagctggtcagtggctgagctggaattaggagtctctcttcccctcaagttgattcttctttga

SEQ ID NO: 129143 - DNA, 1048 bp, Homo sapiens
cattattaagagttggcacattttctttcttgtttctttttttagatgtgtcacagatcaatgtttgtttttttgttttttgttttttttttttttttgagacggagtctcgttctgttgcccaggctggggtgcattcacagatcaatattttaattacccattctgtttgactagagatttcatgttgtttcttatttacttgggaaagtcatgaagatttctattatgcctctgattttccacttatgaaacaattattagaaaacctgccttgaatatatataaaagacacgttattatgaccaaataaaatgaacacggcccacgattctgtctctcctcaaggagaaagaaatgtttttctttcatttcataaatatggcaaccacgtttagaaggtggtgaggagggtgggtgttcgtaattcctgaaagacaccaggaaattctgtctgcccctcaaagctgatgcccactttggggaaacatccccagatggccaacctgttgctcttcccccaacccagcactgaaggtgttaatcccccatctcaccttctctgtgtcccaaggctggagatgtgagtgactagggaaacccccagtaaattaaaggtggtagtctctctgaggagggagaggtagcttgttcagctttataagccttttagctagcatcctttatcactgattgatttattggatatttatgcagcaggcagggggatttgaaatataacataggcgcttcctgagatgtcagtactctaatgttagtggtctgaacaaggatgtaattcatatctgcaggtgcttactctagtatcaaatacttcaataacatcatgcctgtggaatccgctgttcccaagggccctatgtgtattctgatatgcccgtgtcttttcctatgtgtgttttcctttcttaaggagcgctcatttccttcaataggatatgttttatttcatcccttttcctgcatttactcatattaatgtcaccgcgttcactggtaatagctgggcctggatctaacccgcata

SEQ ID NO: 129144 - DNA, 1036 bp, Homo sapiens
gacctgcaggaaaaaaaaataaaggcggggggcaaggtggggaggtgggagaagatccaccaggctcccgagcgggagggacaaatctgcacgcacccccaccccgccccacccacgcctcaccccaagctcgccggcacaccccacccccacccccgccacggcgccagccccgttctccaagcccagtgactctcaccgtgaccacttgcctcccgggagccctccccgcccccaccccacccctctggaccctactccctcaaacccgaggggcgccctgtggctctgcgcgaggcgcgggcggtcgctagggggtgatggagggaggaataaggaagcggtgccttgtcagggggcgagggggatttctcctttacctgccatgttgcgctgcaaatggtgaccctgctgggttcctcggggtctccgcttcctgaactcacccccctcacctggggatgggggggtagagagggcggatggcggcggatggcacctgcggggggaggggacgggggccggggggaaaaggaaggaggggcgggcagaccagccggcaggatgctagatttcactctggggcttccccgctcgtgctctttctccggcagcggcggcggcgactacgacagcgacggcggcggcggcagcggcaggggcaggcgactccactttcaaaatggcgccggctggcctggccagtgacgtcacctagggggcggagccgccgggctggggcggagagcggagggggaggggcgggggagcggccgggcggctcttggccacgcccccttcctgctgcgcctgtgccccgccctccgtgtcccggccggcagggcctgcgccgcgccagcgtctcgccatggcataccctctgtccgcaccgcctgcgccaggccgcggctgtgtgcacctagcagtgtcccagcctcgagcactagcgccggggctctggggcgggcttaggagtccagtttacgtgctctcctgcaaggattcatggggtcctatgtcttctaggaatacctgg

SEQ ID NO: 129145 - DNA, 5349 bp, Homo sapiens
ccgcccctccttccttttccccccggcccccgtcccctccccccgcaggtgccatccgccgccatccgccctctctacccccccatccccaggtgaggggggtgagttcaggaagcggagaccccgaggaacccagcagggtcaccatttgcagcgcaacatggcaggtaaaggagaaatccccctcgccccctgacaaggcaccgcttccttattcctccctccatcaccccctagcgaccgcccgcgcctcgcgcagagccacagggcgcccctcgggtttgagggagtagggtccagaggggtggggtgggggcggggagggctcccgggaggcaagtggtcacggtgagagtcactgggcttggagaacggggctggcgccgtggcgggggtgggggtggggtgtgccggcgagcttggggtgaggcgtgggtggggcggggtgggggtgcgtgcagatttgtccctcccgctcgggagcctggtggatcttctcccacctccccaccttgccccccgcctttatttttttttcctgcaggtcttcatttaatttctatttttccccctgctgcaagccttcttgggtgtatatacacatttattttgcctcgagaaggaagagcgccttataagttaaaatacagtgggggcatatgtgtattttttccccactgtagatgccaatatttttgagactggaagcctaaattttttgtttcgaaccatttcgtttccgtttcttcccttttaccgccgaagagtgcaaggcctttcatgtacagcaagttgcatgaaaataatttaaactttgcgtttagcatgttagcttttttgcagatgtccttttcccaaaagggtttggtagagttagttaaaatagttgcggagttcagagatataaatagcaaggaggagagagatttaggtagaagctttgaaggggaggggaaaggatgtagagagaaaaccagtttggaaataaatttagcaaggaataggggtgatgggggagagagaagtaatgtaattgctttgagaattctttttgtacatgttggtattgctaaatcttttccttcatgtagtagaatcagttgcagatttagattcagtttctttctccctagagccccaggacattttcaatcatttcgacctcagtacttgcacgtgaaatagaaacattccgagatgagaccagttttccgtgctgtattcattatttagataattaaaccttttgaaaaagttaacatgtcggattgacttacggtttgctataaacaagttgcttgttggccttgttgaaaaatgaaatgagattaaaattgttttgcacgagatgacattagcaaaatgaattctttgccaggtcctttggagtcaagggatgaggtgaagggaggcagaacaagcttcctttgacagtctctttagcagcattcatttcggtttcttttcctctctgtctggagccagtgatttgctggtaatgaatgcaaagaaatgggtgtagtgtttgctgtgtgtgcactttggtgataaggttcatatgaatcattactccttacccaggcagtaatgttcccgaagttttctcttcgttctatgtttcatggtagtttaaccttattaactcttctgcaggctttttgtacacttaagaaaactctttaactcttggtatttactttttttctggtaggtcttgcctgaatgtaaggcttttactgtatttgacaggaagtttgtgaacagatgtttaatgaccacagaacatgtgcctttaaatatttcgtacctggaatcttttttttctttctaatgcagtaccaagtattggggactaacctctttccaaactggtgctcttggtggtagttgtatgtgtgggcagaactaggctgttagtatcatgccaaccatggataccatctttgtgtttacgagagtcaacataagcagaactcggttttaattggtatgttttctttttccaggagctggaggagggaatgatattcagtggtgtttttctcaggtgaaaggagcagtagatgatgatgtagcagaaggtaagaaagcgtttaatgcaaaatttggatatataatttttgcagaaatgtttcctactggaggatttccttgaagccgagactgctataaattcaagatgattttgttgtccaagaaatgtaagaacagttttaaaagatacctttctgaaaaacagccttaaatttcatttgttatttacgccttgtttttattattttttcctctgaatttacatggaaggagcggtagatgatgagacatataagatcctcacatgaaagctctgagctccatataagggtttctttgttatgtaaattccacatacaaataaatggtgatgcatttttatgtttgtacattggttttagataagtaaattgaaataggtgccatcaacatttggctcagaaacattcttaacggcatctttgatttttatgggaagattttttaactacttttgaatttgtccactttgggagtgtgatgctgcttggcatattctgtgaagagatgatagctcagattattcattttgttgtctttctggtatttaggtggataagacagtaacaatgctatgcatatatcgcttgtcttttaggaatcgtatattcttgtgcaggtagaaactgtgtttgatcagttgaagtacttacgtctaattttctccccaaatttattttctaacgtgtttcagaagtttaagttttgaaacttcaaggttttgcattcatttgagatggtcttaggcagcggaggcattttccacaaagttgttgcattgtttcattcctgagaaatgttgaagtttgagttttaatggtattgtgtgtcttgaattacagtaggaattttccaaacaaaactcagataaatttaaacatgtacttgtgagttttaaaaatttggtgaaaattcataaaccttttttccctagattgtgttgtcctcatatttctgacctgtctgtagggtactgtttgttctggagattttttttcaggtggtgggtggtagccgaactctcttatttgcttgtgtcagtgtcatccttaattgtctgttttagagtgtggtgaatcctatggcaagccaactggtgtagattatacttgtcatattttgcagagctctctcacgttccttttctattggatcctcatctgtttcttagatgagaaaccagaaacaaaagagactgactgatggtcatgcacatagtgtaaatcaaggttttctgatgaagtcagtggtgtttgacttgttcagagaagtaagtcctgacttcaagggaggagttgtgtattactcatgttgtaactacattacctgttgaatagtaaacactccagtattggatcattagttctgtgcagttgtgtaatactcaccaagttatgaaagtgctgtatacttggaaaatgttctttggttgaattccatttattcccttaggaaagttcccctaaatgctgagcactgagggtacttggtgtctggaacataaactctgcccacaaggagctcatagtttgcttgttaaacattacgcagaaagatcacatggcttttatttaatcagaagaaattgatagttcaaagtgaacatcatttacctacctgaaccaaataacttgtgatatacattaagtcctcccttaatgtataggttctgtcaataatgtaatgtcaataggttctgtgactttaagcaaagaaagcaacttataacaaaaccattttttatccataccataacaaaagatgctgagcagaaaacaaagtcaaagttttcaagaacctattgacgtgaagttaggagataaatcagttatagttcccctttgctgatacttagtagctgcatttttctactgattggttaaataattttctttagaggttgttaaatattttaacgtaagcatattcttagcatcgtaaaatgctgatacttggtatatacattttagtaagataacatatcttagtaaaaatatgactagttctaataggtattgctgtacaaatgtattaagtataaaaataatccagttttcaaatgacactgctttaatttggatatttctgcatactagagtttgcatattatagtcttgcttatttgactaaggggagatttgcttttctgaagtaaaataaggttattaacacattccccacccccctacctttagactgatctcttcaacaggttacatgtagctcaacttttacttgcctgttttctgttaatgatacattttgattgtctccatattgcctgcctttctcccgtctacatgcagtcagctgccagggcataccatttttactctgtaatgccttaatcttctttgcatacctgctttcacctctattcaggtttgcactctccctcatccagattgcagtaagttcctaaattattccctgcttcttcgtcctgttttgcttcaaagttaatcttaaatgcagtcccagttttgtcattttcctcataagtctacaagtggatcactgtatccactggattaggaattaagttcaaacatctcagtctagaatgtatgacctttgcccaatatggcctctgctctcagtttatttgctgctatggctaatgacccagctaaacagatactgttcttaaaaggcgttctatgctctctcactttagggtctttgtttttgctgcttccaccttggaatgcctgacaatcatcccacagttctcttaccaggatcctgctcatctctcaagtcacgcctttaacctttttgctaatttcctcttttggaaataacctatttttaaagtcttcctttatagcactttgttacgtagatatcatatggtaccccacatctctactgttacatactacagagtttagtgtaggactgatttatcttcgtaccttatgcaggcatgaagctgctctgtctagaacagtgcctggcacacagtagttgaatatttgtttgaatgaaggaacgtaaatgttattgttcttaggttttgaaaggggaagagaaatggtaaaaggcaggatgattgagatgtagttctagcagtcatggatttatttacttggtaggctttttaaaataaaaatttaaaacgctttctgcagaatcatcggtaggctttttataaccagattgatgttatacaaccgtataatgcaaagaaatcaggagaccttgggtttttaccctagctccagcacaaactagtgtatgtcactggggataagtactctcctgggttcctgt

SEQ ID NO: 129146 - DNA, 1087 bp, Homo sapiens
atttctgctcttccttgtactttaatcttgttaatttccaaaggcatgtaaaaacagcccaaattcttttggtgtgtgtgtgtgtgtgagacagagtctcactctgttaggctggagtgcagtggcacgatctcgactcactgcatcctcagcctcccgggttcaagtgattctcctgcctcagcctcttgagaagctgggactacaggtgcaccccgccatgtccggctcatttttgtatttttattagagatggttttgccatgttggccaggcttgttttgaactcctgacctcaagtgatccacctgcctcggcctcccaaagtgctgagattacaggtgtgagccaccggccacaaaattattactactggtaattaatactactggtaagctagattgtttgagataccgtactctctagaggccttaaataaaaaataaattattgctagtaatatattttacatttttaatttttcttttattgaaaactgtctgtcatgagacagtaggttaagagcacagactcaggtgctaggctacatggtttgaatcttgctcagtcatttatcatttctgtggtcatctctttgtgcctagctcccctctataaaatgaggataacaataaaacctgtcttacagtgttgttttgatgattaaatgagtttatacacataaaacagaacagtacccagcagaaaagagccttatgaggatttagatattattacttgaaccttcatattattgttactttgaaggaagagtctttggagtatgagtatattgaggatttgtctttaaagcctactaaaaatttctcaaagtgaaggaaatagcatatatgtgtgttatacatactctttgattccactagtaaattacaaaatacattcaaaattaagctataggtttagaggcacatatgcagctggtaaaactatgaagaaaagctatgaagtaaaaggaaaaaaacatactgtaaaaagtactataaaagtcagtatagtggctacccttaagctgttggaaaggagttgtgatcgggaagggctggggaggcccttgtgggctatcttg

SEQ ID NO: 129147 - DNA, 1039 bp, Homo sapiens
ttaaaaattcaaatacatgtggataatctgaagtgtgtaataattggtcaaaataatagaacaggccaggtgcagtggctcacgcctgtaatcccagcactttgggaggccaggcgagaggatctcttgaatccaggagtctgagaccagcctggacaacatagtgagaccttttctctacaaaaattaaaaatattagcagggcatggcagtgtgcaactgtagtcccagctactaaggaggctgagacttgagcctgagaggtctgctacagttaggctgtgattgtgccactggtctccagcctggacaatagagtaagactctgtttcaaaaaaaaaaaaggaacaacttaaccattcaagatagttattttaattattttaatgtagatttttcattgtttagtaatcttaaaatatcagatgttattaaatatttaataatgaacctcatctgcatatttgatagtcttaaactttcacaggaaattattttaggatattatcttataaagtcttattttatgaaacttggatccaagtacattgtgtgttttcaactctttgctttctgtttacttttggtaggatttagccttgtggactgggtcttgaaaaaatattttttaaatggtagaggctaaaatatgccccaaataaggacataagtaaaaatttgaaaaacagtccatattatgatatctcacacaatttaatggttttagtccattccatatgtttaatgctataatgtaaacaatttaaaatcatttctcttctgcatctcttttttttttttttgttagagacaaggtcttgctgtgttgcccaggccgtcttctgtgtttcttagagtagtatgcatgttagatttaggcagtaaggtaagttagtagaaaaagtagaaccctgttgttttgtggatttaaaaatagtggcacattagctgtattccgaaacctaatgacctatggtaaaggtcttatttaatatccttaccttgtatgacatgtgacacttctttttcttaacactag

SEQ ID NO: 129148 - DNA, 1967 bp, Homo sapiens
gaactgcaactcctgtttataacaaggtttatttgtaatgcctagtagatactttttattttgaagtaattaaatataatttggagatttgttgaattttcagctaatgccattcttttttttttcctttttcttttttttgttttttttttttgagacggggtcttgctctgtcatcctggctggagtgcaatggcgtgatcatggctcactgcagcctcaacctcccaggctcaagcgatcctcctgccccagcctcctgagtagctgggactacaggcacaggccaccacgcccggctagtttttaaaaatttttttttgtagagacagatctcaccatgttgcccaggctggtctgctgatggcgttcgttagctgagatgtgctatatatagatgggttataagggctttgtgaaccctctgatgatgtgtgtgaaattgtgtgtgattgtacatatgtgcatttctctggtcggagtccgtagctgccatcaaaattgatatcatttagtccagtggttctctaaatgtcgtctggcaacccctgaactcattccaaatgtctgtgaagtaaaaactattttcacagtagtactcaggtgatacttgcctttttcaatacattgactttgcagcagtgctgcagaagccatcttagcatgagatcaagacagtagcacaaaagagtacctgtagaggtaatcttcattaccatgtactagcagtttaaaaaaccatcagttttaagaatgtccttgaagcagtgaaaacttaatttgattaaatttctacttgaacacatgtctattaaacgttctgcatgacagaatggaaggtatacctagagaaagaacttctgcaagggggtaaagtggttgtctggaggaacagcattggtgcagctgttttgagtttcaactgcagttttcatggaacatcacttttatttgaagtaactgatgaactatagttattcagacttggatatttggtggacattttctcaaaagaacagtgaaactgatacttcagtgtacagtgtttgttgcccatgatgaaatttgagctttcaagcaaaaattagaattttggaaaacacgtctctgccattgtgagcttgacagcctcccaatacttaaaatattttttcaaataaaatcagtagtcatattaacgaatgtgattttttgatactatgtaatgtgttaacatttggaagatctgtataactcagtaaatcagtcttttacgggtgaccgatgcatgtgatgttaaacagtcatacatcagtaaaagtgcgtgctagagcattgaattttaatgtgacagactaccgatatgttttgagattccacaaaccttcaagaatccaccactgtggaattttggtgtagtatcaaaggtatatccataactacctgaaacacctattaaaatattcctccctttctaactacatatctgagtgaggctggattttcttcatatatttaactgacagaatatattgtggtgcagtacattgaatacagaagcaattaagagaatcttcattctgttaggccagattaaattaaagagatttgcagcagtgtaaagcaatgtcattaattttgttggtggggagggggatgtagtcatttttcataacatttttgttaatgtgtgaggtttattactattttacaatgaagaaatattttaaagtttaaaaggtctttgatggtctaagattttaagagttaaggggatcctgtcattcagaaaatttgagttgttggtttagtctgttcatagatttcattttagtaataatgctttacaagtctcatgaaccacaaggtaagtgatcagaatagtgtactgcttttgtggatgaatgtcttaaaaaattgcctacgaaagtagtttctgtgacttgaaattgtttcagtctcctccctccctgttcttttagatacca

SEQ ID NO: 129149 - DNA, 1164 bp, Homo sapiens
tttttccagttcacagggtctgtggaccggtgatctggtttaagaacttctgctctaatcttgagttatgcctgtgtttacacacttactgaaacttctgtgctggattctaaatttggaagaatcaaggatatttgtgtggtaataatggtgtttagactatttaggagggtattttttcttaccggtcctcttattactttttcctgagataatatgggagggattaatcatctgtaaaataccagacttgacagatttagtgtgttcccatcttttttttttttcctttattaaaaactgtctctcatgggtaaaaacattagaaggatatattggattttgaaccagttgcttattttatactttaatcagaaggaaatttaagtttttcagtagcttgtattaagagagaaatcagagtaggtaaaagggattgggggcaaaattttaaaaattttctaaagatccagaagaacatggttagatctggagcagtgttacttttcaaacctgccattgcaggctcattgtaggtctgtctgctctgtatgaaagtagaaatagtacctttttggtgttaccctgcgtgtctgttttttcctgcttaccacaaggtaagattcttaagggtggatgactttctaagggaacaaaagaggaatctttccttttggctaatagagtgggaaggctctaattcaagagaaacaggctattgtaggcaataaatagttctgaccaaatttcttatcaaggcatgcaacatgcaaaaatgtttgttaaaggaattggtagtagcaaaggcattgcttgttctgtctttcttctccttgacataaaatgagcattatttttttttctagcaacagaaccaatttttaatgaaaatttttagctacctaatgtttttatgcatattatagaaaacatataacattaaatttaccatcttaaccattttcaaatacactgttcagtagtgttaactctattcatattgtgaaacagatcctcagaactttttcgtcttgcaaaactgaaactctatacccgttaaataactcccttcttcccctcccctcagctcttggcagctaccattctactttctgtttctgtaaatttgactgctttagattcctcctccaagtggaatcatac

SEQ ID NO: 129150 - DNA, 1088 bp, Homo sapiens
ttgtaaagatcatgatgaacatccttgtgagaatcttattgctttaggatatattatctggaaatgggattgctgggtcgaaaggtgtgattttttttttcctttttttttttttaatggcttatggtatttattgccaaatcaccatagaaagttggtgttgatttttcacttcctccaatagtgaatgggagtggccatttcctgacctcttgacaatacctggcacaatattcaccattcagaaaaatcttttccagttatttgtttgagcacgttcaaatgttggagcctttttgtgttctttgtctagttttctttggtgatgcttttttaaatttatttgtagtatcacagcccttttccccttctgaatcatacattgtagtggaggaatgttggagggaagctcaaagaaataatttgggtctgtattacatgggaaagacttcctaaatgaagtggatttttttcctttttcttttttcttttttgttcaagcaaaggaaaccagagagtaaggaaacaaacatttgagaattgctgtgttttagttttcttatctgtaaatgggaataatagtacttgtctttttatttagaggattaaatatacatgaatgcttagttttggcacatagtaagcctcagaacatttaattgatgtagttatttttctatctgatacccaattaacagaattaacagttgatagcagaagaataaaagcctattccggtccacaaattgagatcaactagtttttgaggttttgggcacattttaggcacttccaataaatatacgttacattaatgactaacatttcagcttggttgagttaggcatttggtaaaactagggagagattagtttcccagcttcatcagaattgggattagtttagggtctggcactttgactattaatttgactaatttaaaattattgtgctgagccgggcacggtggtgcaagcatgtaatcccagttaattgggaggctgaggtgagaggagcacttgaagccacgagttcaaagctgttgtgcacagtgatcatgcctgtgaacaaccactgcactccagtct

SEQ ID NO: 129151 - DNA, 2020 bp, Homo sapiens
cctgtgttggttatatcctgtacagccatatgtggtagacgttatgtgggtgtcaactctcttgttctcttgagtattcatcagcagaagacgaaaaagcagaatcctggttatttggcaaactctacatgttgtactccaaggtgtcagatcagcaaatacgttgctgcctgattcagttttggttgattcttcccctccgatatcattaatattctcaggagatagagtgaataagctattgggagagggtaaaagagatacatgatgtagggaacgtttttttaattgttaaaccagaagtgggtattttggtttgtgagttaaaatactgctggtattctaacttacgattagtctttaagtattatgtatattccacagtgccaggtgcccactgctgggcatgcagttgtaggtacttctttataactctggctagtttatcctgtctgtgcaattagttcatactgctgagcagctgtgtctccctgccttttacaattgtaggtatattgttagtgttgctgtgctcactaagttttgtgatgttttaaacggaaccaagtttggtggtattattattatttttttaaaagaaagcagttacttaaattaacatggtagaaaatatcctggggattgatggtgtagattaaaaatctttgttttatccaacaatagaattgaattatatggctaggaacaccagcaagcacttcctgtcacagttatcgaaacagtcttttaaagaatgtctagagggccttacttaaacaaatagcttgtcttgactttgggaggaggatggttacctaagcccatgtgttaaaacagacagatgacacactgaaatgaccaacgagcataataaggagaattcagtatccttggaaaccctggaacggtgccataactaaactaaaaaaattttagcaggaaacagtacaaacaagaaacatcgtgagagaaggccttagtgttcatttctgtggttgtgaagcgctagtaggagtaagtgacaggacctactttgaatagccagagttagaattgaagggggagccactggacaattggttcatgtattctgtactttgaaactgggattgaaaactaaatggctcttaccaagagaaatgtgaccagagaaatgtgacctgagagagaagcacaaagttgaaactctgcccccaggctgccttctttgtcaggcagccgcttaaggtggccccagtgatccctggcttctggtatttatgtctctgtgtaaccttgtccctttgagtgtttctggacctctcgtgacttgcttccacaagtggggcaagatgctgggatgctgcttcagaggttaggttacagaaaggttttggcatccatgttgggctgccctatttcacttgctgagggaagccagctaccatgtttgtgtggttccctgtggagctcacatgtcaaggatctgttgtctctggccaacagctggcgacctgacacctgtcagcagccaggcgcacgagcttggaagtagatctcctcctccagtcaggctttcggatacctgcaactttgtgagagaccttgaacgcaaggccccctggctaagtcacacctagattcctgacctgttatgagataataagtgtttgttgttttaagctgctacctttgggacaatttttaaggcagcaatagagaacttatataggaagtaacaatgtcaacatttcccctcctcggtctaagatttgaacttggttctaatgtgttttctggttgaacccaacacagtacccaatattacataaacacaggcccttttctttaaagatacatacagagaatgatagacacatccagattcagtaggtactgtaaaagaagttgaccagtatgagcagtaacttcctatgaaatagacttagtgcaggaaacaagagaaactgttgaagtttaaagagcagctaattagttgctctgggagactgatgagaatttgaaagaatcagagagcagg

SEQ ID NO: 129152 - DNA, 2023 bp, Homo sapiens
gatgcaactttgtactgtggacttttgagttaatgctgaaatgagttaagacgttgggggactgttgggaaggcatgattggttttaaaatgtgaggacatgagatttggaggggttggggcagaatgataaatggttttgctgtgtccccattcaaatctcaacttgaattgtatctcccagaattcccacatgttgttgtgggtggacccatgggggggtaattgaatcatgggggctggtctttgctgtgctattctcgtgatagtaagtctcatgagatttgatgggtttgtcaggtgtttccacttttgcttcttcctcatttttctcttgccgccgccatgtaagaggtaactttcacctcccgtcatgattctgaggccttcccagccatgtggaactgtaagttaaattaaacctctttttcttcccaatcttgggtatgtctttatcagcggcgtgaaaacggactaatacagttgtattccctgtttagatgctgttaaataatatttcatgtaagataagtatctgcctattaatgatattaggtgcattcagctgcataagtacctgaacattattcttggctttcatctgtagctgtccacactttatcaattatcaagccttgttttatgtactttggaaatgtatcttaaagtttgttcacttatgacccctctttggccttggtactttaatttcttcatttgttaaatgggtatattgatacagccaacttaatagttttgttgtgatgattaaatacctaacatagagtatgtaaactttacttatttttatttattttttattattttttgagatagggcctcaccctgtcacccaggctggagtgtggtggcgtgagatcttggctcacagcagtctcagcctactgggctcaagccatcctctcatctcagccccacaagtaactgagactacaggtgtgcgctgccatgcctggctaatattttgtattttttgtagagacgggttttcgccatgttgcccaggctggtcttgaacttctgagctcaagtgatcctcccactttggcctcccaaaatgctgggattataggtgtgagccaccatgttggcttgttaggtaaatgttaaatgttgctgtctaatgataaccatattttactattactggctcaggtcactatcattgctaaactgggatttctgtggagtaactccaggttggtctccagttttccctttgcttaggttcctcccagttctcagtctccttcacttcagtttgagcaatctaaggtgcatgtctgactggattgcttttacttaaaattcccaagtggacttctttttgtcattggaataaagtctgtaaaatgttttgtaacataccttaaagactccgccattttctctaaatattttgcctctttgttttcagtttgtgggtgaactagaacaattctggcaggaaacaaactgtattgggtgtgactctaccaagaaagatggatagtgaagtgctttctgattcttatagcatagccatagtaatcctaatttgtaaagattttagggagatattaatagccagatacccattctaattataaaaataccttaattaggcatacatagatgcaagagtttcatactgtactacttgtttgtataatctccttgagaagctatttacattatacttaataaggccactgaatgaggtggtttgcttttgtgaagttaattagccagttaaaagttgaggaacatctaatgaagatgataactaactttaagtctagaatgctcaatttagagctcttctttctaacatatgtaacagttatataccagggcttattgtctgtttaaaaaaccacacctatagactaaatgtattagcagctgtttatctttctgttcttggttgcagtaggatatgattccattccattttatccaaacgggctatcagattatccaggaacaagttacaaagaagggaaactggttccaggacacat

SEQ ID NO: 129153 - DNA, 1242 bp, Homo sapiens
ggccaacatattgaaagcctgtctctactaaaaatacaaaaaaaaaaattagctgggtgtagtggtgcatacctataatcccaactgctcaagaggctgaggcagggagaattgtttcaacccgggaggcagaggttgcagtgagctgagatcatgccactgcactccagcctgggtgacagagcaagactcttttgtctcaaaaaaaaaaaaaaaaagaagaagatacaaattgatatcaaaataccttttgaaaaaaaaatacttaagcaattcctctcagttgtttcttcccctcctttatttttatttttttaaaacgggcatttacatattaacttggtccttatgtcttgtaattcatgctgtagttgtttattttgccttaggatactcctttgatttttcttaagcatttactgaatcctttattggttaatgcttcatctgtagggattacagtgctttctcttagccacattagggggtagaatttagaatgtgtatcacccagtgccttgaatgtagcagattctgaataaatatttaaaagttgtagggacaggcagtaactgtaatgtggtcattaataagtagtataaagttgatgttgcttggctctaaatattttactaaacacagacattttgacaatgaaaaagaggcaataaactgaatacttacacattatcccttttttcatcatccagagatttatagaattctgtgctgccaccttatccctatagtgctaaatatgagtcctgagtctgacagttgatcactgtgtgatttttcttaggctggttaatcactctaatttgtttttctatacattgaaaatgatatgcatattacagtgatgttataaagattaagagagaataaatgcccacttagcacaatgtttggcacattttggttgtaacatctgtatgtgctttggcattagtttgatatgactttgtgttattttaatgccagtatccagttaatataaagcagagtttggcaaacattttctgtaaagggccagatagtaaatgtttccagtctgtgccgtctattcaactcatgggcatggctaagttccattaaagaattatttacaaaaacaggttgtgggccgtagttttccaacctgtgactagaggttacttttgtatttctttgtcttttttgtttttgttgctgttttcatttgacagctttggtacaatgtatttcttaactattgagtat

SEQ ID NO: 129154 - DNA, 1271 bp, Homo sapiens
gaatttatgacttaaaattccatctaaaagtatttttacatttaaaattccctctccttattagtaatatgtgcctttattatagatgattatttgcatttgcataaacaagcttatcaaatgtatataagaaaattagcaagataatgtttaagggtgctatcagaatgattcacaaattgttgatttctttgcattcacaaatttagtgaaatgttaataaattagtatttgttgtattctctgttaaaatagtttcatactggtttattctgaggagaatttttattagtggatcaaaatatttatgaaagaactttagattcatgttatttctgatgggtggttgatgtacttcaaagatatacttcatagacttggaatgtttgggaaaacacgctaagttctgaaactagtgagtcgggaaagaaaaactaatatctttttttgttttgtctcaattatacagcagatataatttctacagtagaatttaatcattctggagaattactagcaacaggagataaaggtggtagagttgtcatctttcaacaggagcaggaggtaagtgtttaaagtttattgtctaaatttcagtttgatcttaggactagagcttgtgttgcactggagaatctcatcagaggatgttggaattttaaaagaagtgtgtgtttattgaatacaatgtccaatatatagacagctctggttctcttagctttgtatgtgtgcatgtgtgtacatgagcgtatgttgttttggtttaaaaacataacactaattgtaaaaatacttgattagagaagggggtggaaagtgatggaataatccaagattttaacggttttgaagccttggcccttcattataatttttcctttgaaactccgtaaagcaaagttgctttgacttcttctcaatgcttggtttactttgtacaattgaggggtgagaggctagtttaaagaaaaagcagctcaattattttgatgtcagttcataataatactgttacaatgatttaaatgtaaaggtttaaatgacagttgcatgtacatgcatgtaaagtaacttaaaagtgcagtgctagctttttgaagaaagaaaattgcagaatcggtaattaaagtgggcttttgttttgtttttcttacaacttaggcacacttctaaatttaattgaccagatttctcactaaaaattttttgctaaacaaaatttgtcacacttggttttttcttattcattctctccttccatttgt

SEQ ID NO: 129155 - DNA, 1064 bp, Homo sapiens
aatatatttaaaaagtttaaagtaatgtggataaattgcagggttttacaaatacatgtctaaatcataacacagagttaggttttaaaggattgtgaaattccttaaataagcaaagaatctagtaataatactactactttgcacttctatagcgcctttgacctgaggatctcaaagtgctttacaaacactaatgaattaatcctcacaacaccccagtgaggtaggtaatttaattttaaaagaaatgattaatagtgtctgattagaagatgcacaaacactaaatatgtcttttattatttttttcgtttggaagaaaatatgaaaataagactcaagctttgcttgacaaagaatggtctcgtgggaagtggggggctaaatcagttttctgtttttaagtagccaaaaactcgaccataagaatcttgacatacttagagttgacatggaaccttacattataatttcattataatttccctttatttactaacaggaaagtcaagatataaatagattactttattacttagtggcagaactaacaagcagaacctgaacttttgacatgtcgtttttcagtattctttgctgtttttcatgctagataaccaaaatgtgaaagtttttatctagagtttagagcagaccttcccataggtgttctctgcccttgaatgtattttttactgaaagttattgactctctacactttacttttattttaaagaaaagtgtttgagaaaaactcgtaaaaattgattttgccctaggcttaacattctgagggtttcagaaagtcttcatttttaatgaaggcattgtgtcattgtcaattctaaaatacaagtttgtcaattaaaagctaatttggaactattttgcctgagaatgaagtcattttcatctcctgtggtcgtttgttgtccaagtcaaaatcaagtgtggaaaaaatggctgaaaatttttttaattgggggaaatgtttgttttaatatgggtttagtaatgtagtcagaatattagtatttagtattttcctaaaggctgttag

SEQ ID NO: 129156 - DNA, 1026 bp, Homo sapiens
tgtaagaagaattgagcagaataactttttgggaagggccattgataggaaaaataggacctccttttcatgtgtctcattcttcttaactatatttaagaattctagatggagagttttgtagaaactcagtaacatgtcttttgagaattacttagtggtgtaaatatcagcatgtttttaagtgatagattaagtaaagatgatgatggtgattgactcttcacttctgaaacttgatcttgactattaatttggtgtgttttgcctatttaattttctacattttaaagccctgtcttagagtttctaatacagtattgtcttcagaatctatgtcattggtcataaatatgtatacttgacacttagaggcacctttgtttcaatacctaatgtaattggatgagattttatgaattcacatctagaggcacctttgtttcaatacctaatgtaattgaatgagattttatgaattcacatgtatatatctgtaagatagtgttacagtttgaaaagtgaaagaaatagtcctttcctaatttgtagataaaatccaaattatttaacaaggttatattgcttcatttagtagcaaaaatcaggttaggatttgggtctccgattttcaatccaactattatatgttcattccagagtacactggtgcctaatgtttcttagactctgatgagggtgctagccttgtttgcagaatacactggcatttgatctattgtggctttattctcttacctagtggcagggttccttcttaaacttgactttactggagaccaaaatatctccacccactcatttttattgtctttacttggaagaagaagagatcatataacagcaacagagaacttggcacatcagactttgacatctgtaacccctcattgtctgcctcatttattttacccttcagaagtagctagtctccttcctgtgatccaggcgggtatctgtgtcctcttgctgcctgtccgtttattccccaatcgtaatataaag

SEQ ID NO: 129157 - DNA, 1063 bp, Homo sapiens
gattaatggggagttgagtctgttctctctcccctaatgcaagaccctgttgcagtggtccctgtctccatggccctctttaaagtcagccttactaccttataaataagtaaataaataaatttaaattattaaaaataaattgtagaattaacttccttagttgcagtagccacattttaggtgttcagtgtgtgcctagtgctcaacatgactagtggcaaccatactggacaacacagatacagactatttccatcattgcagaaaagttctcttgggtcctgttatcctaaaacttaattattgtaccttcacatttatatctcttattcatctgtaatcactttacgagtggttttgggaaggggtcgagcttcattttatttcctatgaatagtcaacctaacaccatttagtgaaaagaccatcctttccccattgcccagcaaggcaacctttgtcatcatttaggcctgtttctgggccatctgttctgtttcattggcacattggtgtatcctcatgccagtacacagtctttatgactttgctttaaaacttggttatgatgtcctttagtgaattctgttagcatctgtgttgaaaatgtgtgattttggttttgtgtcctgtgtttgtaatgtatgtaaagtatgtgacatagctcattctaaatcctgctttgaaagtctttattgaatgcctgttatatgtgccaagtactgttataggtgctggggaataaagcacatctaaacttactgtagaaactttcatgcaaatagattgtatggttaggaagatgattctcatagtgatcataaaggcaagcaagaaaagagagggaggtgaaaatgctgtgcaggtaaagccagtatgaattgttgaaggatgtgtcacaattctgtatgactgtaggagaggtttttaaaacaaaaacattgtgtttgattttgatgcattctcatttgagtggctcagtgttgagtatgcggttatgtgtcttcttattcaggcttgctcactgtactttgtttgtgcagggaacaatgctatcatg

SEQ ID NO: 129158 - DNA, 1272 bp, Homo sapiens
cctgttgcaaagagatggagcttcttgcagtccacgaaactgccatatacctctatgattttgtttttggattctgtaagataccatgtttagtagacctgtgttgttgtccacgagtctacaggaagatgttcatgttttgtttcagaaaatatttctgttgttttgtgcttttcttaactcatcaaatacaatgtgtggctcgcccttggcccttcatattgcttaccttaattgtgtagaccataaccagtttctactttgactaaagtttgacgtacacaagttacttgaatgtggggattctgtctatccctctacgccctagtgtacatagtactatatattatagtctctttaagtgttaaatgaaaaaccagtctaaaatgcaggatttatattaaaaatcgagttgcctgcttaatggtattgtggtttccttgtagactataatgataaattttgtgagactgggtgagtcattttaggtaaaagatttgtggagctttaaagtgatactggagtatttatatatgttaatggaataggctgtctaattttgtgtatgggtatggtgatgagaccaaggctctgagtctgatttttaccccttgtgtatccccgatatgtggatcgttttgtgggacatgtattcttaacattggcagacttgccctctaataactgataactgctgtccaagggttcaaatacaaccatccatgaatgaacaacccagatcatcaggctgctggaaaaaacaacccaaaacatagactttcaagatgattcagtgaagtttccttttgatatggagaatagtaataggctgtttttattatcaagaagttctaaacatttcactgggtaactcacttttacttaaaatagttgactgtcaataatatctcattctattttttacttaaactttttccataggtggttctttgaactagactttcaaatttttttatgaaaatgtttttaatcgtgtgataataggtcaaaagatgaaattctgaacatgattataattctcacttttgctgagatattaatgctaaccagagtagttcaaaagtagtccctttatgagatagcttaaattacattttttcaaagtgatactaaatgaaattagtcatcagtgtgtgccaggttcataagatgagaaagcaaatttaaggcgagtaagcagttgttgatgggggtgcatggggccattgctgggtagtgctgaatatggacttgattggtagcaaagctgtc

SEQ ID NO: 129159 - DNA, 1032 bp, Homo sapiens
cactcatgatgtatgtgaagttatttaatattcataataatactataataaaaaattgctatctctagtttgctgctgaggaaaattcaattcagtgttagtaacctgcccaagattacgagactgagaaatgacagaaatattacctgacctaaatccaatggtatagcagcccattcttttcactacaaattggaggtgtagtaaacaaaaaattgctatcagagaatctttcagagaatctaaaaactgcaagtgacagtaaaaaagtagagtttacattctgtatagaaaaacaaaagtcctttttacaagtatctctgttaaatgattcctctcctaggctacaggatatgtgcaacaggtacacacagtgggcacatggaaagaaaatatgtatacttaccattggtagacaataaaaactgagcagcatttttctggggtaaccacctaattttgttgatcttttcttctatttctaaacttttcaagtagtcaaactctggttcatggctctggaaggtgctgtaaacattatattctcctctgctatgagactggattttgttctaaaatgaaaacaaaaatatatggaccattgttgaaaaatatttcaaaataatcaaatatgtaatcaattccaaaggaccctgcacattctcaataccccattagttgtgtctttatacaattacattctgttttttatatttctaaaggccttcaaggattaaatgagaaaacttaacgggggaaaaggctaaataaagctgaataaataagctcaattcattagggaaataatgacgttaaatatggatcaatttgattgctaatttactcttatgtatttgatggtatagtctatgaaaaaaactgatgaaaaaaaactgagcacccataataaggaagttcatctaaaaataatgataaagtcttgcccagaaagagctaggtgaggcacaccttcttcctatgcccactttagggtcaactccccgatctgttatttaatatgatgtattgtcc

SEQ ID NO: 129160 - DNA, 1007 bp, Homo sapiens
aatcaaattgatccatatttaacgtcattatttccctaatgaattgagcttatttattcagctttatttagccttttcccccgttaagttttctcatttaatccttgaaggcctttagaaatataaaaaacagaatgtaattgtataaagacacaactaatggggtattgagaatgtgcagggtcctttggaattgattacatatttgattattttgaaatatttttcaacaatggtccatatatttttgttttcattttagaacaaaatccagtctcatagcagaggagaatataatgtttacagcaccttccagagccatgaaccagagtttgactacttgaaaagtttagaaatagaagaaaagatcaacaaaattaggtggttaccccagaaaaatgctgctcagtttttattgtctaccaatggtaagtatacatattttctttccatgtgcccactgtgtgtacctgttgcacatatcctgtagcctaggagaggaatcatttaacagagatacttgtaaaaaggacttttgtttttctatacagaatgtaaactctacttttttactgtcacttgcagtttttagattctctgaaagattctctgatagcaattttttgtttactacacctccaatttgtagtgaaaagaatgggctgctataccattggatttaggtcaggtaatatttctgtcatttctcagtctcgtaatcttgggcaggttactaacactgaattgaattttcctcagcagcaaactagagatagcaattttttattatagtattattatgaatattaaataacttcacatacatcatgagtgcaagtgctcaataaatgttaatttattcctcctttttaagtgtttgtaaactacacagagtatctcaaactgcagatacaaaatactcaaaggatggtctccattccaggatacgctataggagagcactttcttacttgatcaccattagcatattgccttcttcccagcaa

SEQ ID NO: 129161 - DNA, 1358 bp, Homo sapiens
tggggcgggggtgctgaggcaggagaatggggtgaacctgggaggcagagcttgcagtgagccgagatcgcgccattgcactccagcctgggcaacagagcgagactcgtctcaaaaaaaaaaaaaaaaagttagtaatgactctaccagaatttgaaatcctttatgatgagttgggtgctttctctttgttcttatgaaaaactttttcctgtgaattgtttggactttgttggggtcttgagtctaaagggaatcattagagtgactgaggagatactttagtttctgggtagccgtagtctataaaaatttgtgattaaaacttttttgaggttggtgctagggtgaggggaacctcttattttctcatcccctcactattaatttaaaaagcaaattctaacacctagaccataaacatttgcagaatatatacttaaatgacttcaggatgaaatgggggaagaaattcagcacttcctccatctaattgatgcccctcgtccacagtattagttcttagaaatgctgttcacaaatgcctgatggccatcagcgttggccgcctcctgggtgcccgtttttctgatcatgaaagctttccccagccagtccattgagatgcgtaccctctgccttctctgttttcacaatagactgcattcccctctcttgtccttattagaagaaaaataaagagaagtaactatttaaagcctgtaaatcacagcactatgggtggagggaacagtttattcctgtcatatgctagcttctagtcttgggtcagttttaatttatatggtaaactaagttatttcaaatagcttcaaatattttagacactgttctttggcatcagatgatacataattaaaccatttatataatttctacttttagaagtaaatgttcctagggaaatgtgttgttaacattttatatattggaatatttttatgtcagtttatttcttatagggctacatcagctttcttataaagagaactttttaaatgtaggctgagttcaagagaatagtatagtgaagccctgcatgctcatcatccacttctgacactcctcagttcatggctaatttgtgtctcggatccttccccttcccctcctcctcagtgttatttcgaagcaaatccgattacaacgtctatggattaaatcttgtttaaagacattagagaatgcattgtagatttttgtcttttgtttcttaatactaagtaaaatacagctaactgggggctgcattttttaatgctaaaataagtgcttaataatagagtccaatgtggaaggataaagcagattatgagaatcatatgaactgttgtgtc

SEQ ID NO: 129162 - DNA, 1054 bp, Homo sapiens
ctcatacctctcataccttctgcttgtggtgagaggaactctgttcttctgcagtttctccaatgctttagttattagtgttgataattcaggggaacaccacagtgtggtcgttttggaaggaacagatcttgagaatctaataacgtctccactgaaaactgtgtttttacataatctcacatacagttttatggagtttgattattctcacatactttgtcttatgggccaaaaactccaggtaataaaatatcactgctgtagaacataaggattctgattttttaaaaatttatgtcatatttattaacatactgatttatttcctgcctgccttgtccccaccttactgaaaaatgtatcctaattcatatgtgtcctgtgtttgtgttaaggaaaaaacattttttaaagagctttcttcctgtaaacactattaggcaccacaaactaattttatctcatctgaaagtttcataaatacattgtggtttctttatttggatctttaataaggaggatggatttaaacaggccacaagacaactggaccagggggcgggggtgttgtcatcctcatcacaaatactttgcaagtatttagaacaaatacttctcagaatacagatttaggctaggctcatatctatctataaatcatatacatatataaactaaataacacatagaaaatctgtatgactgaactacaagaaaattataagcaaggtcacatagggcttagaagaaataatagattacagatgattaaagttagcagtttttctctgtttacacttcatcattgggaagggcatccttaggggcaactatcattcttctgtacgatacagagactgccaggctagagtcactggcatctctctgagttgtttctgtttttataaaatggctttatatactgttataaacaattttgttacaccattttgcttatgaaagatcgttaggaatgtatgcttttctataagaaaaactgttatacaattgtaacagttttaaatcaacatgcatgagcctatagtgatac

SEQ ID NO: 129163 - DNA, 1769 bp, Homo sapiens
tcaagtgatcttcccacctcagcctcccaaaccgctgggattacaggcataagctaccatacacagacctcacaaatgtgatttttaaaacaaaaacctaaattataaaaaataatcctatttacatagatacaatagacaaattccttaaaattccatgaatccaattttaaatcaatacattatgccctttatgtttagcaaataactttttccagtatttcattactcatctacaaagaaaaaaataaggtgccatacatatatgtacacagactataaaaagcaaccaaattcattaggagagatgaaataaatctaatatgggcacaacatgccttcttcaccaaacaccaaagaaaaccaaatggatactaaaactcctgtctgtaatttccagatgccaaagattaatccgcaaatcatctgcagataaatatgtttcataatcactattaatagaaattgagttgatgtgatatgtatgagcattggcaaatattcttcgtggactggcctcaaccattagatccataggcctaaagactggcacctgtcaataagacacatgaaaaacagaaattacaaaaggctcagtttcaaatagcaattaagattcagaaaacttcattatttcagtttttgagaacataaaatagaacaatattacatagatttagttttaaaaagcaactgatgttgatcctttcgagtgctgaagaaaaaatgaacaatgtggataatatatcttcttttactggttgcaatactattagaatttgcagttcttagtttcaatattttgcttgaaagacatgccaagctaataaatgtttatggttcagattaaagaggctaaaaagaaaattaacccataacatctaattcttggtattttttagctacaactagaagatttgatctgtatctacttttttgatttccaaagaaaatttatcttgaaacttgaccttgtgatagctaacatgacaaaccagagatgaagtctgatggcgtgaaatactgtcttgtgcttgagtcctgcttctgtccctggccaaagtgagacctctatgtaggtcagtttctatgtttaaatgagttactcaatgtcctacctgattacagaattactgggaaaggggagatagactgtaattattcctattcaagctctgctcaggatttgggctatataatatgaatacaagcactatctgtgacatttttttcttatgtacttactcgtagtgtagtaactgtagtaggatctctataccttccatcctcctctttcaagttatacccttctggtcttttgtccctttcactgattttccataattttattgttttatctgggaagaaaataaagaaaagtccttaaaatactgaagaagaaaaacattttaaggcatttaaaatatgctatttcacatttcacgtaaaaggattccacgaaaaaaaaaaaaaccctaatctgaacttactaaaaaatttcctattatcagctgaataacatacacacatggaaataaagtgcaaagattggtggcactcataaattccatgtgatagtcaaatcaagtcacagacaggtctctatccctgtcccttaaaagtaattaaagctagagggaaaaacttgatatgcatgtgtggtgtatgcaaacacatatatgtctgtacctacatgtaaacatatacatgttcagtactgaattttaaaaaatttaaagggaacaatgaagttgattaagactgcctat

SEQ ID NO: 129164 - DNA, 1218 bp, Homo sapiens
gtaatcccagcactttgggaggctgaggcgaggcggatggatcatgaggtcaggaggtcgagaccagcctggccaacatagtgaaaccccgtctctactaaaaatacaaaaaaaaaaaaaaattagtcagttgtagtggtgtgcgcctgtaatcccagcttttctggagactgatgcagtagaatcgcttgaacctgggagtcggaggctgcagtgagccgagattgcgccactgcactccagcctgggtgacagagtgaaactccgtctaaataaaaattaaaaaaaaaagttttaatccctttggaatttatactcataaaaacagtggagtgcaattcagaattaatatttttgcttaggtccatgaatgggttttaggtttgagaaatgtagaattatatttgcccttttttctaagtggaaattccttaataaaatgttatctagacattgtggatatcaagcctgccaatatggaagagctaacagaggtgattacagcagcagaatttcatccaaacagctgtaacacatttgtatacagcagcagtaaaggaactattcggctatgtgacatgagggcatctgccctctgtgatagacattctaaatgtaagtttattgtatctttccttaaaatgattacatattctgtttgtctgaaataagcctcagacatgataagtacaattacagaggttcaaagtcttaaacccgtgtgtccagagccacttgtacccttggtaatctgcctacctcctcatgaggcattccaggttattcctggaagctctcttggggggcatgtctattgattgccaaggaatatatctctcatggaatgctgttgttctttggtaacttgcggttgggctctgtaaccttgtattgaagtagagctgttcctttctttcccatcctcccttcctactttgagcttcctaggaagatttcttctgaggtttccttggcttaaaaaaaaaaaaaaaaaaacaactttggtttaaaaacttcaggatacaatattcttgtcttgttgaatattaactcatgaaaattgatacatgcctgttaccaaaataattttacctggctactagaaaataagatcctggtatgaatttgggatgggcgaggatggtgtgtttctcatggtgatgatacaggcagtcagtgaggcatattgcaggaataataccaataaacctggtgcac

SEQ ID NO: 129165 - DNA, 1076 bp, Homo sapiens
agtcccaggtgagtctggttctaaattagtcatatgactggaagtatactgcatacttatgcatcttcaacttcaatattcaattaaactaagaagctttcaggagaattctagccagagagatgtttttcagttctttattagcctggcattttacctcacttgtagggagtttgtgaatggttgtttaggaaatgctttgtccaagccagaatattgtacaccttgccctttttgtgttgttttgttttgtttttagtgtttgaagaacctgaagatcccagtaacaggtcatttttttccgaaatcatctcctctatttcggatgtaaaattcagccatagtggtcgatatatgatgactagagactatttgtcagtcaaaatttgggacttaaatatggaaaacaggcctgtggaaacataccaggtatttgagttttttctttcaatgagcatataccctgtttactttgaagtgtttatagagaaggattttgttactaggttttaatccctgtatggtgtttgttcaccattaggccttttccctcagagatctatgagtatgttgctcttccttatgttaaatgtatatatacttacataggttgtgttgtctcttgagttttgcagttaaagtgtgattttgctacccatttggttcagtattgacattgtttttttttctgccactatgtacatttaaagtgaggatggaagagcacccttcattgaggtctgggcaggaagaggattggagaaagtggccagtccttagtagaggtgcacctgctcaggttgtgggagtagttgaactagagattaaatttggtgtgccaagtcaaatggactggtgttctgccttttggcagataactgttgtcttcagctaaaagaaagggcttgaaagccttagcagatggctttaggagttgcctatccgttgttggatgtcagttcttgattctcttatcagccagccactactgtttatccgtgtccactacatcaaacagaagagaatgaagtacacagcctggaacagggtgagggacagcacaaacctgtgctagg

SEQ ID NO: 129166 - DNA, 2001 bp, Homo sapiens
tggagggccaaaacttcacgtgtgggttccgcagggctaactgcagatttgggtatacctggggttcttggaacccatccctcgtgtatactgaaaaaagacttctatttgtgtaactgccaagattgatatatctcctagttaccctcaccatcatttcattcccattgagaagaattgatttgaagcttagcttcatactgatgtatagtgagaaactctataatgtgcattctaaaatgttgctaaattatgataatctacctaattttacctgatttgctacttttctacttataaacagttggagtagtgattaaaagtagtcacattataggcaaatgtatcatatatagataaaactatttttattgaatttgtaccagcatcttgccaagttttgtgtgattgaagggtatttttttcttactgatttttttgtgttacatgctcacttttgatcctaaccccacatgagttgctattcctctgtattacagattttcacttaatgtcacagagacatggcctgaatcattccactatatttaaagttaaaatagacactgaaaataagtttagattgtttcatatagaatagagaattctaagcatttagaaggtaccttctcatttctgtcatttctccttaagtagctccttaaaaagagatggtgaaatatagacacttccttttttcctttgagttacaacaaatactttggaacttttgtttgtaattaatattaatgttgaaatatgtcatatttctcagactttttaaatatgagatttctagtttatccttttttgacatattagtaaatacagaattatataattcaaaaaacaggcacagctttgttagcttttgacattgtataatatgatactatcaaatttttaataatatatgcccagaataaccatataatttatcaccaaaccaaggcatggttacgctatgcatacatgtgcatttataatggaaaatataggcttcagttaaatttatgcccagaaaatggtatttaagaaagaaataggcacagtttcagtgttgttatcagtagttaatggactgaaagccaagaatagtgatattcagatattgctataatgttcttttattagtctcttaactgtgccattttcaagtgtttttggcctgaatgttttattcaggcttataaaggctatgtgtgccatgcccagaatggagttttcctttgtcataccagtaggaaaatgtacctccctgaagggcttgtgtgttttgtaaaaggacaaaatgcctttattgttactgagaagattgagattaataggtttaaaaggtgtgtgtatgtgtctgtatatgccctttttttctttttaaagatatggacttgttaaatcattttcctaatttcagtgcagtatatttgtatttttcccccaggtgcatgaatacctcagaagtaaactctgttcactgtatgaaaatgactgcatatttgacaaatttgaatgttgttggaatggatctgacaggtaattaagtcaaacctctcaaatatgaattttattaaagaaaagaaacaactatttcattccaggtcctaacttcgtctctagggattccttgaaataaatttagtaattttagatatagcacagcagtactggtagataaaaaattaaagcattgtatttcactagtaaatataaaagtacacaaattctaggtaatctaaattatttaaatgtctagaattttttttcttttatgaaccagatcacatttctgacatgctaaccattaaaacggtgaagcttcagcttggttgttattcttccattaaactgttgcagaaacattcaggcggcagataactcatttggattgttagaaacaccaggttttccagatgctacattaacacctcatagaagtggtctttcatatgtatgttatgtatgatgttaaccataatatatatggttaaaattttagtagta

SEQ ID NO: 129167 - DNA, 2500 bp, Homo sapiens
ccaaagtgctgggattacaggcgtgagccactgcgcccggcccaaaaaatgtaaatcataagataaagcattggtttcttgtgaacagctacagctacttcatgcggggttcttttgttttagaacctgtgagttccacagatagttgctcctttgagaagctggctggcctggttgatcacatagcctgtagttgcaaaaatacttaacaacgataattctgcactcctaagaagttttacttgaggatgctgtcaactttgctgatagttttggtagccataaaaagaataagcagaaaacccagttaattagtaccgtatttctggtttattctagtgattgagttgatgtcaacagcccctgtcccttagtttaaatctgcttttgaagtagcttcctatggtttaattgccgaatcattttacttgaaaacaatttcttgttctgcttgtttgactgagtgtactgtctattttcacagtgttgtcatgactggatcttacaataatttcttcagaatgtttgacagaaacacaaagcgagacataaccctagaagcatcgcgggaaaacaataagcctcgcacagttctgaagcctcgcaaagtctgtgcaagtggcaagcgaaagaaagatgaaataagtgttgacagcctagacttcaataagaaaatccttcacacagcctggcaccccaaggaaaatatcattgccgtagctactacaaacaatctgtatatatttcaagacaaagtgaattagggttggcattcctagcagaagaacccacttcctgcttagttgagatagttgaatctagcattcgttcctataaaagagagaggtccattgtggcgcccctttccagtgtttgacagtgtgccattcgacaacacattgttatagctacatggagaaagctctgtggattcatcactgtggtgttctccatgtctgctagccatttaggtaagggtagggcacttttaatttaaatgacttcttgcaccatcttgcctaatggactagattggactgtatcaacattgatttactccactttttatgccttccattgtgatgacgtcaaacacagtgaaagccttcagtcatgctatgggatttaattgtgtatcctcattactgtatcatttgtggggtacaccccttccccctttttttaaattaaatacagctcattcttactgtggcttgtagcattcctcctcttctggcctcctggactgctccccttcatctcttacccttgccccctccacccggtcttggtggtggtatattaaaaaaagaaagaatgaaagcacacaaaatgagtcagtttggggtcagtggtataaagggggtatatgttgcaaacaaatgttttagtaacagttggctgtaatcactcctcgccgtgtctggcactgaaaataaggaaaaaaaacctactactgaataaaagtgacaaagaatggagaatctggttttctttttctttttaacctacctcttgtagccaatattttgtgtcatacctttgggcacagtgaaacaaaatgggttttcattgtttattggtatttttgttaattatttttaacaagtgttcttttacatgcaggaggagaggtattggttctctatgaacatattttgaatataggttttattaaggatttcacaatctataaatgctactagtttttttttttttttttaccatcatgagggtattggatacattgtgtctctatttaactcattatgtgttaatgaaattgttgtaaatgggaaccaaatttgtagaacttaatttctactttttagagtgcttaatttcatttttgccttactaaatagtcaaagacttataaaacatttttaacaagttagaacttttttgttattcagtcatataaaatagcagaaaactaacatcaagtgacactgcactaaatactttttttgtattttactgctatcaaatcagaatgaaatatactttaccatagatatttttcttctatttttggttttccaaagctatatgaaagacaaatttttaaaggtacagcgttcaaaaagtgcttaatgaactccaacagctgcctcaaataaaaatctgtatatgaatacattttccctaagcggtgatacattatccaaagatgaagagtgctcctatttttaataggtagaatgtacctttgtcagtcttgcagaaactttaatggagaagaaatggactttatttttgaaaggtgaaatgaacaggcatttatattattagagaatggtagtcttattttggtggaacataatgtaacaaccttgaatttcagaggactctgagtgcttctatgtccactacctattgttctattcttcaataatgaaaaagaattcaacgagccgaccgtgattccctctactacaaatattatgtcttgtaagttagcatttttagcacacaggagaaattttatgtaataaaa

SEQ ID NO: 129168 - DNA, 1035 bp, Homo sapiens
ccactgaccccaaactgactcattttgtgtgctttcattctttctttttttaatataccaccaccaagaccgggtggagggggcaagggtaagagatgaaggggagcagtccaggaggccagaagaggaggaatgctacaagccacagtaagaatgagctgtatttaatttaaaaaaagggggaaggggtgtaccccacaaatgatacagtaatgaggatacacaattaaatcccatagcatgactgaaggctttcactgtgtttgacgtcatcacaatggaaggcataaaaagtggagtaaatcaatgttgatacagtccaatctagtccattaggcaagatggtgcaagaagtcatttaaattaaaagtgccctacccttacctaaatggctagcagacatggagaacaccacagtgatgaatccacagagctttctccatgtagctataacaatgtgttgtcgaatggcacactgtcaaacactggaaaggggcgccacaatggacctctctcttttataggaacgaatgctagattcaactatctcaactaagcaggaagtgggttcttctgctaggaatgccaaccctaattcactttgtcttgaaatatatacagattgtttgtagtagctacggcaatgatattttccttggggtgccaggctgtgtgaaggattttcttattgaagtctaggctgtcaacacttatttcatctttctttcgcttgccacttgcacagactttgcgaggcttcagaactgtgcgaggcttattgttttcccgcgatgcttctagggttatgtctcgctttgtgtttctgtcaaacattctgaagaaattattgtaagatccagtcatgacaacactgtgaaaatagacagtacactcagtcaaacaagcagaacaagaaattgttttcaagtaaaatgattcggcaattaaaccataggaagctacttcaaaagcagatttaaactaagggacaggggctgttgacatcaactcaatcactagaataaaccagaaata

SEQ ID NO: 129169 - DNA, 1025 bp, Homo sapiens
taactgctggatggtaagcttctgtgcagccctccgtctcttgggattaaaaaaaatgcatccagtcgggcgcggtggctcactcttgtaatcccaacactttgggaggccgaggtgggtgaatcacctgaggtcaggagttcgagaccagcctggccaacatggtgaaacgccgtctctactaaaaatacaaaaatcagccaggtgtggtggcacgtgtctaatcgcagctattccaaaagatgaggcaggagaattggcttgaatccgggaggcagaggttgcagtgagccgagatcgcgccactgcactccagcctgggtgacagagcgagacgccgactcaaacaaaaatgcgtccatgcactcttttcctttcaaaatgaagagaattttttaaaccttaaatgtgagttattctggttagggatacttctacggaaagctagagataggaaagcaggttctttcagtgtgtgacttttgagtaaggtgttaattaggaaattgtgcacatgtgaaagctatgcagtactgataaagaatttttagtgatatttaaacccttctaagggaatattgtttgagcatctttaccacacataaattcaaatgtagatagtattgtgcccttccagaaaaacaaaaccaatcccccccaaaagatggaaaagataggcatatgctgggtagtcaagaatcaagtcagtttacttgtgtatttgagagcacctgtactttagtatcttacttatctatctgttcagatggtgatagtttaagctctgcgtgtatgtcttactgtggttaaaaagggagttttatgcacctcctcttccccctcaaaaagccttgaaaaatgaccctgcttcattttgtaattatgcatgaagtcaaaacattacaactcttttagtattaatcaaatgcttagcgattctacagagtcttgaggtgttctcagatgccaaatatattttgtaactgagtttgcctcaacattttattccgtagtggtgtcagact

SEQ ID NO: 129170 - DNA, 1530 bp, Homo sapiens
cagtcctgccagctgtccgacaatgtcgtcccacctagtcgagccgccgccgcccctgcacaacaacaacaacaactgcgaggaaaatgagcagtctctgcccccgccggccggcctcaacagtgagtgcggggccgaggctctgtgaaggggatgggggaggaggagcagccccggccgccgccaccggcgcggcgcgggaggcgggaggagaaggcagctcattggctcaggcatgggatgtccaggtgactgacagctcccgtcccctgtcaagaggaggggcgcctgccttgctccgggcctctctgttgcctcctggggtcttgggcccggggccgtttgggctcgcggtccgggagcggcgcgggtagcgcggatccccctggtgcggggggtggtccccagcagcggagccgggcggggcggggcgggggcgggcctggggggcggggaggccgggtgggcggagcgggccgcggaggggacgtgggccgggatggggacgtgcggcggggacgccgggggatggacgcgcgggagcggggcggggcgggcggctgccgcgggacgtgtcggggatcaggtgtgcggggctcgcgggcgggcagcgtctggcgggcgcgggagccccccagcgagcattcctttgttgccacacgtttgtcaggaaaattcatttgctcgtctagggttggcttcagtcacgtgtggggtgagaggctgtgccttgcttctcctttttccttttttatttttttattagatttctcgaagttgcccaagtgatttttttttttttaaagcgatgggttgtgcgcccagtaaagctgagagcagcctcctgaaccacccaagattgcacacgtcagggagtctggggccatgcatttaaagaaacggaattaaaaacgcactcgggcagttgaaagttaacggacgaggctgatagacaacccaggccagggtcttttcataacattccgctgcccagacatcttgtcctcagattgttcctagtcgtgagaaccgggagccttcttggaagggttcttgcctaacctttctttaattcaactcttgggaaagaggtaatgggagcagtgagcatatggccagatgaagtcttttcaaaaccacttggatgcttaaaggtcatgcagtatctttcgtaagagggaggtgcttccagtgtggcctgaagattattttagggaagagagtttcagccctcaccaggtagcgatggagtttggagattttaagatggatgctgctgctccaggttttgatgggttaattcccaaaacctttaagtgtcatatattccagaatgtaagatggttatattatttcccacagtaaattaggatgaatgtatgagtctttaaacgttacttgtatcacatattcctatgcaattttaagttatttgcccatgtttagcatactgtcttagattttagaatgggaagaaacttcagagctagctaactgcctcctgttgtttgcctgtagagaaacaggtct

SEQ ID NO: 129171 - DNA, 1212 bp, Homo sapiens
gttgttcaaaagaatgaatgtcagtatatattgatagggaagacatctgaaaaacgacttacagaatatgtcagtatgtgtgtatggtacagttccatttctttataaaaacaaaagcaaaaacagacctatatttcattgacaaaaactctgcaagtctccatgtgaaactgtcaaaagtggctcctttgggagtaggaacgggaggttgggagagatgttaatttttaattttatgtactgatgtttacgttttctaggaacacatttttccagtaaggaatggtttttctatgatatagaatataattgtagtagctaaaactttcttagggacctttcttattgttctgcgtgctatattcatttaatcctcctaacaaagtcttcgaggtagatacagttattatctctattttatagatgagaaaactgaggcacaaagaggttaagtaccctgtgcgagggtaacagctataactgagagtgggagcctggcttcagtctcagcccctgaccacactataccagtgtatcccaagtacaaattgtccgccttaagtagaaatgctttcagttatgattcagggtgtggaggccacagcagagatcacttttactaagcttttctaggtatgtctctttcaggttccaaaagtatatattggattatgattgcttatgtgtttttaatgaagaaaataggatccagacattgatttgaaagtccttcaaaaaagtaaaaaccaggttgggagcagtggctcatacctgtaagcccagcactttgggaggctgaggtgggaggattgctgaagcccaggagtttgagaccaacctgggcaatgtagggagaccctgtctctactaaataaataaataaataaataaataaataaataagtcgggcatggtggcatgtgccctgtagtcccagcttcttgggaggctgaggtgggaggattgcttgggcccaggaatcaaggccgcagtgagctgtgattgtgccactgtactacagcctgggtgacaatgcaagactgtctcaaaagaaaaacaaaagtaaggaccagaaaacctgatattgtttgttacacccttttttctcttcgattgcctacttcaagtgaatattaattgtattttagggaagactgacttccacagagacctatctggaactcctggttccttacctctgcttctgtcaga

SEQ ID NO: 129172 - DNA, 1036 bp, Homo sapiens
cactggatgaccttctgggtggttgttaactgatgttaaccatttagaaaatgcaaatgcacgggaagcagattaaggaaatgtaaacagtgactatttttaggaatgcagtatggatatgtttcttcttaacatttttgtattttgtaaaaattgtgtatattgcacatattattacttatcagaagaagtgaaaaaaaggagaaatgagttaaatcatgtccaacttcctgagtggcttatgatccactaatgttgccaaggcagcgggggactggtttgttggctctgtggcacactgtgcacccccgccacccccgtgtcatccctgacttgtccctgtgcttcttagagcctgggatggctcttgtcataagcggaaccagagcagatggctctcttctgaacagcttgcccttgattccagtagctacagcattagtctgtctttccgaatgaagatttatatttatattatggaacttgctgatgggtttctcaagttttctgcttgttatggcctgtcaacaaggctttcactctgcgttcaggtgtgtgggccttgatcattgataccatggtgtccatgagcctgttgttcacatggtgctgtcaatgagcagagaacagtcacctgcttacctgtctgttcatcttacttcatttatggtgcagttttacgtgtgactgaatatgccttcaccctcctatgatcatgtttaagtttaggttgccatgaggaggcatggcaaatgcttttgaacactttcgtacccctcatcttatgtctctccaggccctagattagtggtcatctttcagagaatggctagaactcgagtcttctgggatagcctactaacacgctttaccattgaggagtgtcttcaaaactcacatcatctgaattgccatgcgtctctatatgtgaaaagtaattggaaagtgtttcttgtagggggaaatgttttagggttgttgggtatcagtcctagagctgatttatgtatattttcaacttaaaaattattccata

SEQ ID NO: 129173 - DNA, 1071 bp, Homo sapiens
gatgtaggtatagagagaggattattgattttaaaagcacaaatcttacgtaattagattaagtacatttttaccatattctggaattctaagaattggaaggcagtttaaaacctgaaagtggcaaatttaagattaataaaaggaagcacagagtggtagtgaatgaggaaagcttaccactcttattcttaaagtattgtaagttgggaaacttatggagttcttttttgttttgttttctttttaaaacacttgtccagagataactttgcttcattcaactgagaaaattccatcctcatgaaaaaaaaaattagagcgtgaaatcttactgcgtttcattctgtcagaaattatgaaatattaacttgttaaatctttgagcaggtttaaagaaagatctgtgaggccaaagcaggaaactaaacagaagcgacctgcagtgtgttgagtatagtcagatattgtgtgtacaggaactgatgtgcaagtaaattgtaacagtttattgtttttgatttgggatgatttcagtgttactccaaagagccaactcatgattctgagtaatctcaatagccaatggaaggagcttaatcctaaatgctacattgtgtcattcagtggaatttgccaagttcagcagaactagataagattggtactaacaagagcagcagaacgcacaggggttttactttgccctgtctgaagctccttcctggggtagctgtttcacagagaactagacctgtcaagagtcatgtgaatatgtcagactctgcatttcttagctacctactgaaaagaatgacagctttggtcattcttttgagtgaatcctagtcaaacaaaataaaatgtcaaaatgcttcttagttttgagacccctgggtttgggatcatagcatgacatcccttaaaactgactatgaccaggcacggtggctcacgcctgtaatctcaacactttgggaggctgaggcgtgtagatcacttgaggtcaggagttcgagaccagcctggccaacatggtgaaaccccgtctctacgaaaaatataaaaatt

SEQ ID NO: 129174 - DNA, 1376 bp, Homo sapiens
aaggggtttgtgcagaaggggactgtgtgactgttgcgtgggggttgatgtggggcaggtgtaggagtttaatacattgctgcctatacagcagttcattgcccttaagcgattggtgtctataccttgccgtctctctttcagtcatcttcagattgtttgtcttggctgtaagtataactattgctatagatgaatgtaaaaagagtgtttaaaaagttcgttgctttaattgcactggaggtgaagctagttacatactttccttaacttcccttctgcttttgctgttgaagaggccaaatactttcttggcatgaaaaagtattataaggcccctaatccttaggagttattagtaagagctgtctttaaagcactggcagcttttaaggttttttttttcttttgtcctacatagagcaccagaataatttcacatattactatatttttgtgtctgaaatgtcagtagaaccttctgtccaccaaagaggaacatcttgaaggagttgggctgctttatttactctgtggagggatctgttctctctggctttactttgtctaatcactacccctttgctgtcgagccccgatatttaatgagtaaacaaactcatataaaaccagtttggccgggctggtgactggttttaagaaagtcagtgatgatttcacggtgtttggggagcggtacccacaaacctttagagccttttacaaagactgaagagttttaagtagagttcaacctgtggacaagctggtatagaactgttgaaacaggtgaaacatgatgcttctgcttcctttcagcatctatattggaaagcgactgagcacaccctctgccagcacctactgagggaaaggaaaagcccctggaaatgcgtgtgacctgtgaagtggtgtattgtcacagtagcttatttgaacttgagaccattgtaagcatgacccaacctaccaccctgtttttacatatccaattccagtaactctcaaattcaatattttattcaaactctgttgaggcattttactaaccttataccctttttggcctgaagacattttagaatttcctaacagagtttactgttgtttagaaatttgcaagggcttcttttccgcaaatgccaccagcagattataattttgtcagcaatgctattatctctaattagtgccaccagactagacctgtatcattcatggtataaattttactcttgcaacataactaccatctctctcttaaaacgagatcaggttagcaaatgatgtaaaagaagctttattgtctagttgttttttttcccccaagacaaaggcaagtttccctaagtttgagttgatagttattaaaaaga

SEQ ID NO: 129175 - DNA, 1509 bp, Homo sapiens
atagaataagaagtaaaatacatcagcagattttcatactagtatgttgtaatgctgtcttttctatggtgtagaatctttctttctgataaggaacgtctcaggcttagaaatatatgaaattgctttttgagatttttgcgtgtgtgtttgatattttttacgataattagctgcatgtgaatttttcatgaccttctttacattttttattttttatttctttatttttttttctctaagaagaggctttggaatgagttccaatttgtgatgttaatacaggcttcttgttttaggaagcatcacctatactctgaagcctttaaactctgaagagaattgtttcagagttattccaagcacttgtgcaacttggaaaaacagacttgggttgtgggaacagttgacagcgttctgaaaagatgccatttgtttccttctgatctctcactgaataatgtttactgtacagtcttcccaaggtgattcctgcgactgcaggcactggtcattttctcatgtagctgtcttttcagttatggtaaactcttaaagttcagaacactcaacagattccttcagtgatatacttgttcgttcatttctaaaatgtgaagctttaggaccaaattgttagaaagcatcaggatgaccagttatctcgagtagattttcttggatttcagaacatctagcatgactctgaaggataccacatgttttatatataaataattactgtttatgatatagacattgatattgactatttagagaaccgttgttaattttaaaactagcaatctataaagtgcaccaggtcaacttgaataaaaacactatgacagacaggtttgccagtttgcagaaactaactcttttctcacatcaacatttgtaaaattgatgtgttatagtggaaaataacatatagattaaacaaaatttttatcttttttcaagaatatagctggctatctttaagaaagatgatatatcctagttttgaaagtaattttcttttttctttctagcatttgatgtctaaataattttggacatctttttcctagaccatgtttctgtcttactcttaaacctggtaacacttgatttgccttctataacctatttatttcaagtgttcatatttgaatttctttgggaagaaagtaaatctgatggctcactgatttttgaaaagcctgaataaaattggaaagactggaaagttaggagaactgactagctaaactgctacagtatgcaatttctattacaattggtattacaggggggaaaagtaaaattacactttacctgaaagtgacttcttacagctagtgcattgtgctctttccaagttcagcagcagttctatcagtggtgccactgaaactgggtatatttatgatttctttcagcgttaaaaagaaacatagtgttgccctttttcttaaagcatcagtgaaattatggaaaattacttaaaacgtgaatacatca

SEQ ID NO: 129176 - DNA, 1021 bp, Homo sapiens
ctgtcacccaggctggagtgcagtggcacaatcatacccactgtaacctccagctcctgagctcaagcaatcctcccatctcagccttccaagtaagtgggagtacaggtgcatgccaccgagcccagttaattttttcatttttttgtaggggtaaggggtcttcctatgttgtttaggctggtttcaaactcctgatctcaagcgatcctcccacctctgcctcctgaagtgctgggatcacaggcatgagccactgtacctggtccccattctgatttttaaaatgggataatacctgccacgcctatctgagacaaggttattgccaagtctaaatgagatagtgcagggaaggcatttgtaaaacactcaatatttaacatgtgtaaagaatgttaagtattaaaaattcatccactgctatgagtctttccttgtctaatctagtctacatgtatctggaataggcattagcaccttcacagagcttggaataaggaatttaataaatcttatctgattttcaaggggctggaagaccccagctgttacctaggttacacactttttgaaaagagagcaacagatggcaaataagcatatgaacagatgtgcaacaccatatgtcaggagatcattgcaaatgaaagccacagtgagataccactgcacacgtatcagaatgctaacatccccaaatatgacaataccaaatgtgtacagagcaacaggaactctcattcattgctggcaaggagtacagaatggtacagctacttcggaagacagtttggcagcgtcttacaaatttaaacatagtctgattgtacaactcagcaattgtgctcctagatatatacccagttgagttgaaacgtacacccatacaaaaagctacacacagatgtttatagcagcttcatttgtaatggccaaaaattggaaacaaccaagatgtccttgagtaggtgaatgggtaaactgtagcacatccagacaatgcaatgttattcagggc

SEQ ID NO: 129177 - DNA, 3975 bp, Homo sapiens
gccattcccagtgaggtccagggaaaggggggtgtctggaaggtgatctttaagacccctaatcaggacactgagtttcttgaaagattgaacctgtttctagaaaaagaggggcagacggtctcgggtatgtttcgagccctggggcaggagggcgtgtctccagccacagtgccctgcatctcaccagaattactggcccatttgttgggacaggcaatggcacatgcgcctcagcccctgctacccatgagataccggaaactgcgagtattctcagggagtgctgtcccagccccagaggaagagtcctttgaggtctggttggaacaggccacggagatagtcaaagagtggccagtaacagaggcagaaaagaaaaggtggctggcggaaagcctgcggggccctgccctggacctcatgcacatagtgcaggcagacaacccgtccatcagtgtagaagagtgtttggaggcctttaagcaagtgtttgggagcctagagagccgcaggacagcccaggtgaggtatctgaagacctatcaggaggaaggagagaaggtctcagcctatgtgttacggctagaaaccctgctccggagagcggtggagaaacgcgccatccctcggcgtattgcggaccaggtccgcctggagcaggtcatggctggggccactcttaaccagatgctgtggtgccggcttagggagctgaaggatcagggcccgccccccagcttccttgagctaatgaaggtaatacgggaagaagaggaggaagaggcctcctttgagaatgagagtatcgaagagccagaggaacgagatggctatggccgctggaatcatgagggagacgactgaaaaccacctgggggcaggacccacagccagtgggctaagacctttaaaaaatttttttctttaatgtatgggactgaaatcaaaccatgaaagccaattattgaccttccttccttccttccttccctcccttcctccttctctccttctctcctcctctctcctctcctctcctctctttccttccttccttccttttttctttttctctttcttctttatttcttgggtctcactctcatcacccaggctagagtgcagtggcacaaaaatctcggctcactgcagccttgacttcccaggctcaggctcaggtgatcctcacaccttagcctcccaagtacctgggactacaggcacgcaccaccatgcctagctattcttttgtatttttggtagagacagggttttgctgtgttgctcaggctggtctggaacccctaggctcaaatgatgtgcccaactcggcctcccaaagtgctgggattacaggcatgaaccgccatgcctggcccttgatttttctttttaagaaaaaaatatctaggagtttcttagaccctatgtagattattaatgaacaaaagattaaactccaaatattaaatagtaagcctgaaggaatctgaaacacttgtacttccaattttctttaaataatcccaaatagaccagaattggcccataccatagaagaaagaattggcagtcaaaaaaaaaaataccttttgtaatgtttgaaaaataaagctgtttgacttgtcaggtgttttcctttctcaaatcagcaaattctctctgagtgcctggctttgtgagacactgtacaaggagttacaagactacagctataacctgcagttgagcagttataaacctacaaaatgggccctgccctcagagaggttccagtctagatgaggagctgatctagacaggtaaaaggctaactaaccctttgtgtaaataagttcatcaccccagtaaaagtgtcatcacccagtgaataggaccacctctgcctgcagatttttgttgttgttgttgtcattgttgttgttgttttaacctgggaagtgttcttcctgcctttctgctaggtgtcagatagatggtcccagagctaggtgctgtgtcaggccctgaagacacagatgactcaacctaagctttactttccagaggtccacagcctgagaggtgtccccaaagaaagggggacatgaggggactgcatgcttgagagcagggttgtttagggcaggtttggatttagtgagcaggctggtttgcttagagaaggcttttagtggcaacaaaggatgaagaggagagaaaaggaactcacatttattgagggcctactgtgtgcaaagtgtttcatgtatatctcattgaatgtatacagccaccctgttgtggtataattttgctctttataaagagaaagaccgaagctcagatgagttaagtggtctcctcaacaccaaaatgccaagaagtgatggagcctagacagaagcccagaactttctgactcacactagtccatcctctaccatcacgatgactttcaaattgtgctctgcagttctgcagattttctagcagtgccatctccaaaatgtgttttaaactctttatttttttaattattattagtattattttgagactgagtcttgctctatcacccaggctggagtgcagtggtgcaatctcagctcactgcaacctccgcctcccaggttcaagcgatttcgtgcctcagcctcccgagtagctgggattacaggcacccaccaccacgcccagctaatttttgtatttttagtagaaatggggtttcaccatgttggccaggctggtctcgaactcctgacctcaagtgatccactcacctcggcctcccaaagtgctgggattacaggtgtgagccaccatgcctgggctaaactctttaagtctctagtaaatgcagctagattcaaatgggctgataaccaaattttaacacatcagcattcaccaccaggtttacttttattttcagattggctcattttgtgcagaccttagagcaaagtttcctttatggtatctgtgtacgtatccaaacttcttttaattgttcacagattttaaaagcggtagcaccacatggttgtgtagatcagacctgtgtatttagatcagacctgtgtatcacgtaagtgtgtgagtgcagtgcagatgagcaccatttagttatatgtgctaggcaaatctccaacacagttgatgtgtagtcttgtggtagatttgtgcatactgtaagcaaattgcttagcttctctagacatcagtttccacatctgaaaaataagaagatgagagtacacggttgttatgaacaaatgacttaatgctttttaagcacgttgcatgacatctggaacacagaaagccctcaatacattgaagctcttaggattttcacgatgttcctgtctgctcaatgcatgctttctttattgttctgacagttgtgtggtaacaagctaatatgcttccagttgacttccagtctaccctggtgttagaaaccgtttcatctcttattgtaaatttgagtgcttgttgttttttatatttgtgatgactcttccagcagttgttgacaattgttagaggtttgacttttaaataattacttattttttctgattgtggttcagtttaactgaagaatatcctgagattgtaagaaaagcattttttaaaaggtatcacttgtgatcatttatctttctaaattctatttttaatactgttccaccaaagtgatgcagtggttaccatgacaccctaatttcatgtgtttttgtatttatgaaaatagtttcattgtcatttattggcggtatacaaagtaaaatgttataaatgtgaagttataaaataaatatatgctaataaaatcctgagtttttctgtttcctatatcgtggtctctataaagtactgcttgaagaaggagctttgttactgaaaaattttgagagataagttgagaaaatcaagctaaagccaaaaggtcttagaatcctgtaggcaagaaaacctgaa

SEQ ID NO: 129178 - DNA, 1048 bp, Homo sapiens
tgagaggtggggcgtgggcatagggaatgggctgatcccctgctggggcgggcggtggtcgtctgggagggggttggccgcggttccattcttctgaaaccctcccgggcggcttccgattgcagctgcggctgggtgccccaccctttttttgagcggctcagagcgtgcggtggaggctttgcgtgaaggcccgcggctccccggtggtcgggaggggcgggggttcggacggccgctccctacagcctccgcccgcgccttctgcgctcacgtcccgagctccgaggccaggaccatggtcagcgccccccggaccccctccgagcaccgcaccgcccttgactcctgctcgcagcgtgagaagagccaggaaggctgtggagtcacccgaggaaaccgagacgctcctaaatagcctatgtggggaacaaagttccaataagtgtctcagccggggcttcacagagcgctccccaaaccgctatgtgggaggcgctttaggaagcggggaactaagtggattatgttcaaagggtcaaaaagacaagaaaagggggaaaacccctcgcactcgaaatagactgtcgaagaagactaaacccccttttattgtgttaatgggggaaacaaaggccaatttggtcacgcttgattttagaaaatgtttgtcactttctgacaaatatgaacagtgagcattttcagcgcagtaataatctcacaccacaattctttctttatctgagtgatccttacactagtgtaattcttttccacagccttaatttcttaactgataatttacaatgcaaaatgttttaacacgttttccgtttctctcccatgcctgctggtaaaaataataagtcaatcaatgaatgattgttgattgaatacctattgtgcgccttgccttgtagggcagagggaaggttagttatagaaagtgcaagaggtttcttcttctcagagggcttccagagtagttgggagtggtctatacatattcagcgagggattccacaagcatttacatttgtgtact

SEQ ID NO: 129179 - DNA, 1110 bp, Homo sapiens
ggcgagttgtgctggtgattgtgatgtcctagagaaagcagaaaaacaactggagaataaagaagaaatcatgtaaaaagtggcagatcagaggataggggttgaaagtggcccacccctatcatgaattagaactcaagtttgaaaggcatagttttatcgggttgaataacacttcttttttcttggccatttagaagcttagatatatgaaattctaaattgtaaaactaaggcacgcagagggggagatttgaagagaaaatactcaaacaaactgcaagggagttttagattgcaattcacattgatttcagttgcccagttattagtaacagagggcgattctagcttggcctttctgcagcaccttcccctgaattttcatgtttaatcttgccttatcatataaggcctactcaatgagattttgtcattcacgactaagagcatttacctggatcagtacttgcaatgtttcaatatttcatgtctttagaaaaggggaaaggctgtggctatacatgtgtttatatttataacaatgtgacttccgaaaagctcaactggcccaccattttgactgagttgacttgtcattagttggttttcaacgaatgagttgggtgagtgccagcatctctgtgcattctaattggaagccctgacgcagagaaaggtgggggagattgagaatgggtggatcctgggaccctgactcacaccatccctcctctcttgcagctttatttatgtgttactaatgtatggtcagatgtggctttgctcatctgttgcactaagaggcctgctgttcccctaacaaggctttgggaagggagagaataggcttccttgacccacatgccacatggctcatggaagatgagagatgttggacatgtgcatttgcaggaactaaatgaaattatattcagagtatgagccagacagcaccagaaagcgatgggtgtggcttgactcggcatgtcagattttggcggaggaaaagagctggcatagtggttgtgaatgaggaaagcctctatcttgttactctctttttcctataagtccactttgggcttcagtgaggttacattgatcacc

SEQ ID NO: 129180 - DNA, 1033 bp, Homo sapiens
tgatggacacttgatttagttggttgcagctggtggtaacctagtaccataggtactgcacacaaatactgtcttacgtgcaagtgcctggtcttaaaggtggtttgtgtttgtttttgagaatatgcagataacctgcatgggctctgattctgagggcactctgcagaaagcactgagtgaagccagctggtagtcctggctctgccattgactgactgtgtgacctgcacagtcatctaacctcagtggtcattgggctgtcctaggaatctctaatgctccttctatccatttccactgaaggctctgaaagaaagctatgctgcccatggctgttctttttttttttttcttataatcgaggcaaaattgacttaacataaaattcttattttggcaggtttgaaatgcacaatttaatggcttttactgcattcacagtgttgtgtaaccattgccactgtttaattccagaacattttcatcacccctccaaaagaaactttgtaccattaagcagtcactttccttttcccattccccccatcccctagcaatcactaatctgcattctgctttttttttcctgagtggatttgcctattctggacatttcatagacatggaaccatacagtatatggccttttgtgtctgcttttgtttttcacttagtataatgttttcaaggttcatctatgttgtaacatgtatgagtgcttccttcctttttagggccaaataatgttccattgttttgtatgtatcctattcattagtttttccaattatttgatggacatttgggttgtttccaccttttggctattaggaataatactgctattaacatttttttacaagtttttgtttaaacatatgtttttaaggctgggcacagtggctcatgcctgtaatcccagcactttgggaggccaaggtgggcggatcacttgaggtcaggagtttgagatcagcctagccaacatggtgaaaccccatctctaccgaaaatacaaaaattagccggg

SEQ ID NO: 129181 - DNA, 1024 bp, Homo sapiens
tggaaaccttgctatggttgaacccagtgtatttgtgtggtatatcccgtgacagcagactttttggtcaattgtgcttgcttgacacagtctttccaagacatggctttcctatatgtaggtggttttttttgttgttgtttgtttgtttttaaattgaggtttagccaaaagccattttaaaaagtactatcttctttttttttttttgagttggagtcttgctgtgtaacccaggctggggtgcagtgacgtgatctcggttcactacaacctccgcctgctgcttcaagcaattctcctgcctcagcctcccgagtagctgggattacaggcgcccaccaccatgcccagcccattttttgtattttttatagagatggggtttcaccatgttggccaggctggtctcaaactcctgacctcaggtgatccgcccatcttggcctcccaaagtgctgggattacaggcatgagccaccgtgcccggccctatcttctttatatgaaataattttcactgctttttttttttctttggagtccaaggtctaattgaaagagatggttcgtttatctaggataagctgtccctgtgtgttctgactcatcaggtgatgaataggttgccacatacaggcttacctttgtcactgaacctttccaaaatgggcttattttgaacatcacttttgaacagtgaaaatgtatccttagctcacatatcttagcacctgtttctcataggtcagttacgcgttgtgaccttactgcctctttgtttcagagcgatcgtcttctgatcaaaggaggtaaaattgttaatgatgaccagtcgttctatgcagacatatacatggaagatgggttgatcaagtaagtgtaactcatgatatacagatgtatttgaacactttccagacttcccaagtattagataccattcgcatccaaagtatcaaacttcaggaacatcagagagtgaccaacttagtatctgttttaaactggttttgattggtgg

SEQ ID NO: 129182 - DNA, 1049 bp, Homo sapiens
ccacactgagccaaggatttcaacatctcttggagaaattctgcatggacctgaagtttgaagctttgcattgtaaccaagttggctctccttgccttccccccaggccacgatttcgtcatcctgctttacggatggcatttcctattaagtgtctgtctgtgaacataaacatggagctgagacaaagcacagcttctccctggacccggaaagagggactcaggcgcctggggctggggcctggctccagacctgctgctgctgcctggcctggttcggggatgcctagcctaacaaggcagcctgggctgggaatcgcttaggcctcaggttgatgaagctgggagaagggttgagagggcaccagacctaagatggtggccagagccatttaatcatgtggttgtaaaattgtcagtaacttctttgtatggctagttgatctgatctctcatgtaggactcagtcccccagttggatcttggaaggtagacatttatttgaaacagacagcctggtagagtgaaaagagctttgtgttttaccccctcagatagtaagcaaagaaaatggaaaaagcagcgctgtctggggtgacatcctgatgcattgctggtgacagagtgaagaggtgacacatttggaacataatgtggccatctgtatgaagaaccatagttcatccagtcatcccaaccctaggactctccagagaaaaccgtttaaaatagggggaaagttatttgcatgaatatgttcataagaacattatgtataatagaggaaatttggaagaaacctataggttcttccacagggaaattgttaaggaaatgatggtagattctccgcaagaatggctcccattaaaaattgaattagtaagactctaagataatgtggtattaagaaaaaaactccatgattaaaaatgagcatgggccaggtgtggtggctcacgcctgtaatcccagcactttgggaggccgaggcgggtggatcacttgagctcattatctgatgccctgaattggctttttctcatg

SEQ ID NO: 129183 - DNA, 1086 bp, Homo sapiens
accatgttgaccaggctggtctggaactcctgacctcaggtgatctgcccgcctcggtctcccaaaatactgggattacaggcatgagccactgcacctggccacccctattgtctttataaccttgacacactgtgtgtcttatggggtgagcagtaggaggggactttagtctgttcccttccagagccttctgagtgtgagtccaaatgtgcccacaccatggttcccaggatggcatttgcattcaaactgttacccattaatctgtgaaagcctgagctttagacaaacctgagctgccagaaaggaatttccagtgcattcaggtgctaatgagcaggaatgagaagtcctagctaacttcctaggctcttaggctctttcccatcttgctggaacttcctagcaactttgggaggcagccctggcaggaatttttatattttgttttactttgcagctgagtaaactgaagctcagagctcatgtatagtggaattggggcttgactgtcaggcatctaacttgaggccacaaatatccgtgtaaatgtttgactgacttaccttcatgctttgagattattttaatacggtgatgcttgtgacctgtgtctgttggggcttagttccttaagaatcctgattgaaacagtggcctgacacccagcagagatatgggtaatgtacacacaaggattcccaaatgaccaagaaggaaagctctgtaagggagtattaattgtttgcctccaggatcagtattcattcttggatcaaaccccagctccactgtacaccagccacgtgatgctgggtgcttcctcatcatctccacatgtccttttgccatctgcaaggggaggatagtaaccatgactcatctcacagggtgatgatgatgtgtacatgagatattgcaggtaaagatggagatgagaagcgtgaccagttattgtgactacaggatgaaggggctggtctaaccttgagcttgcgaggaaagcagagtaaagatgcctgctgaccctggacaagggttttctgctcagaattgtttgtccacttcaggtgggttcttctg

SEQ ID NO: 129184 - DNA, 1050 bp, Homo sapiens
ataaattcttggaaaggcaaaggagaatggtgagagcgtgtgtaactgtctgtctgtctgtccatcccagttggttttcactgtgctttggtggctgcatatggagctacagatactgatttcccacagttcccactttggatttgttctcctgcttctcgtccatgggaaatgactgccagagctgggagctatcaagcatatttaaaccgcagccttccatttattcttcatgaatgcacacgggccccagactggttgtaaataagcaccagctcccatcccctgcagttcttggccttatagagagcctgccagaggctggcttggtcacatccttcagtttagactttacctggagaagaaaatcacaaaggtctaacgggcacccagatagcatcagcagtgtatttagagaagtgcagaagggccaattaagcccatttcgtggtttattattattagtggtaattatttctggcatgcagttcaagggtgtctgtggcctggctgagctccggaagtgcatccacagcaccctcctgtgaatgtttatagacccaggaggggagccctgggttgggagctccagaccactggggatgggaggcagagactctatgtatagatcatactcttgtggaggtagaggcctggaacatgatggctaaactcctgtcgctgattctgggctaagaaagaaagaaaatccaaaagacagcaaggacctctgaatccctgagggaagttgaacagagcaaagtagaaatgaaccacaggatggctccatccctcccctggcatccactgcccctgcccctgaatgtccctatctttgcttagctgtggcccagaagtccactcagcctttgtctaaagaggcaggttctgctcagcagtggcgttgagagctcagaccccattttgggttttctagaggcagaaggccaagttcattctcttgaagtgaggtagatattcctgtgcacagagagaaggggaatccagctcctcatagagcagctccccaccccaagctgagttgtgttt

SEQ ID NO: 129185 - DNA, 1044 bp, Homo sapiens
gctggtctcaaactcctgacctcaggtgatccacctgccttgacctcccaaagtgctggcattacagatgtgagccaccatgcctggccaggactcacttataattctttttttttggctgggggagacagtttcactctttccccccaggctggagtgcaatggcgtgatcttggctcactgcaacgtccgcctcccgggttcacgcaattctcttgcttcagcctcctgagtagctgggattacaggtgcctgccaccatgcccggctaattttggtatttttagtagagacggggttttgccatgttggccaagctggtctcaaactcctgacctcaggtgatccacccacctcagcctcccaaagtgctgggattacaggtgtgagccaccacgcccagccacatttatgtctttggttgaacatttatgttgtttctggtttttttttttttttaacttgaatgacatttttataatagacacattcttgattatgtttgtaggagaaatttctacaagtggcattgctgggtcaaaggatgcatatatttttaacatttttggtacatattgtcaaagttccttccagaaagtttgtactgctttatacgccaccaccaatatatgtcattccccagtgtcttctaccacctgggtgtcatcagcaaagatccattgtttgctgatttgataggtgaattttgtgtcttattgttttacatttaatttattcaattactgattagagtgaaaattttttcctatgcttagtggccatttgtacttttttctccctcttaataccagcttatttcctttgaccagttttttactggatttagagtgggtttgggaggggaagcacttgaggaaatgtgattggcacctaaaaccagatgtggggcggagacttctaggttggctagactagaagatgacatctggccaggcatggtggctcatgcctgaaatcccagcactttgggagagcgaggtgggagggttgcttgagcccaggacttcgagcccagctgggcaa

SEQ ID NO: 129186 - DNA, 1051 bp, Homo sapiens
gctcctgggctgtgccgtccactggggactggggatgggacacctgaggacattctgagacttctttcttccttcctttttttttttttgtttttttttttaagagcctgtgatagttactgtggagcagccagttcatggggtcccccttggggccccacaccccgtctctcaccaagagttactgattttgctcatccacttccctacacatctatgggtatcacacccaagactacccaccaagctcatacagggaaccacacccaacacttagacatgcgaacaagcagcccccagcgagggtctccttcgccttcaacctcctagtgtctgttagcatcttccttttcatggggggagggaagataaagtgaattgcccagagctgcctttttcttttctttttaaaaattttaagaagttttctttgtggggctggggaggggccggggtcagggagagtcttttttttttttttttttaaatactaaattggaacatttaattccatattaatacaaggggtttgaactggacatcctaatgatgcaattacgtcatcacccagctgattccgggtggttggcaaactcatcgtgtctgtcctgagaggctccacaatgcccacccgcatcgccattctgtagtcttcagggtcagctgttgataaaggggcaggcttgcgttattggcctagattttgctgcagattaaatcctttgaggattctcttctcttttaccatttttctgcgtgctctcactctctctttctctctctagctttttaattcatgaatattttcgtgtctgtctctctctctctctgtgtttcctccagcccttgtctcggagacggtgttttcctcccttgccccattatcttttcacctcccaggtctaccatttcatggtggtcgttgggtccgcctaaaggatttgagcgtttgccattgcaagcatagtgctgtgtcatcctggtccatgtaggactggtgctaaccacctgccatcatgaggatgtgtgctagagtgtgggaccctggcca

SEQ ID NO: 129187 - DNA, 1076 bp, Homo sapiens
tttacaggttctcttaagcaatgttgtatttgcaggcttttctgaataccaaatctgctttttgtaaagcgtaaaaacatcacaaagtaggtcattccatcaccacccttgtctctctacacattttgcctttggggatctggttggggttttgggttttttgttgttgttgtttatttgttattttaaaggtaaattgcacttttaaaaaaataattggttgacttaatatatttgctttttttctcacctgcacttagaggaaatttgaacaagttggaaaaaaacaatttttgtttcaattctaagaaacacttgcagctctagtattcacttgagtcttcctgtttttcctgtaccgggtcatggtaatttttggttgttttggttgttttcttaaaaaacaagttaaaacctgacgatttctgcaggctgtgtaagcatgtttacctgttggcttgctttgtgtgtctgttaaatgaatgtcatatgtaaatgctaaaataaatcgacagtgtctcagaactgaataactgcagtgacttgatgctctaaaacagtgtaggatttaagaatagatggtttttaatcctggaaattgtgattgtgacccatgagtggaggaactttcagttctaaagctgataaagtgtgtagccagaagagtacttttttttttgtaaccactgtcttgatggcaaaataattatggtaaaaaacaagtctcgtgtttattattccttaagaactctgtgttatattaccatggaacgcctaataaagcaaaatgtggttgtttcaggggtgtgtctgtattgagatgttcgggaggcggctgcttgacttgggcctccaaccagacttcccctccacaagcattcacggagccctcggcttcagtttggtgaatataccaattcaagagttttcactccatgtcacaggctgctacgtccaggccacgggattctaattctaagcaaagatgcagcctgcgggtgcatggcaaaccaagtgtcagaaattcacagactctatcctggagagccctccagaatcaagctgcatactgaagc

SEQ ID NO: 129188 - DNA, 1057 bp, Homo sapiens
ggtcctagccaggctgcatggagctcacagccaagtcagggagacagatattggccaaataaacacaaattagttgtttaattacaatttagttagtgctgcaaagaagtacaggatgctataggaatgcatatgaagaggctgtgacccagtcttggggtcagggaaggggttggtgatgcttaggctgctgtctgaaggatgtgtaaaaaaggcttagcgtgtgtgcagagggggagctttccagacagagaggaaggagcagctaggttcaaggagttggaaggcagagaggggtggagagcaaagaggaggggatgagaagctggatcaaccggggtcttgtatggattttggattttatcctgagagcaatgagaagtcattgggggttttaagcagggacatgattgatctggcaggaggccagggagggatttaggccaaatgctcattggtaatgatgagttgtcacttgccaggccttggactttttgcctaaaatggcttggatgccaacagggatagctgtggacaaagtaggatgtggggtttctgggtcctgcccacctgctcaacagaattgtaaccaaccctaccttatgggtagcagaagtatctgccccagggcctggagtttgtgcagcagagcttctctagttcctgccagggagtgatctggatactctgtctgtggcaagttcccattggaagagacaggcacttgtagcagaagttctcagaggaaggtctgggattgctggagatgagcggccaattctagggccagggcagaactggtctgagcaaatcacctacctgtaggcaatttccccagtgaagcaggcaagggctggtcttgagttgaacagaggtttccttcaaaggccacagtggactcagctcaaatagacagcccttcagtgcacaggctacagggtgagagatgttgcttcatttccttttgtcctgttccttaacccagctggtggattgccgtggtgctccataagaaatagatttagggccaggcgcagtggctcacacctgtaatccc

SEQ ID NO: 129189 - DNA, 1093 bp, Homo sapiens
ttttactatttaaactttatctttgtaaatcatcatggatgcattataggcagcaaaatgatttcgttgtcaggaatattggattaagtttctgtgttaatactggagagtgaattgcttgtgacttgttatacccagagataaaaatagtttgttttctctcacatctgatgaagaaagcatgtgtttttgattcagctttaaatactgaggcagaatttctgttgcacaaatgtcagctctcacttgttgaagtttaggtatcagggttgcatatggtattcagaagaggaagacggggccagataagctgctgggaatggagatgaaagcaagcaagggacctcagtttttattcaattacttcccaataaaagtatgactctttttttttaaagtatgtagaaaactagcaatggattgttatttaaatatttgtaatgcttgctttgatcttcaaaatacttcacagaagtactttttaatagccttcctacttgtcggattgaatttgggcatccttatttgtagattcaagctgtcattcagcaccacattcatcaaggtctcctccttctctgctctttacaaccactgtcacctctgttatgactccaggactgactcggggaggcactgtggggcacgaagtactctgcccgatgctcagcttttgattaatgggccacagccctcccatcccttgagacttcagttagccgaactcttttccttaagaaagataaggctgcatttagcaacagggatgaagacaagggaggagaagaaacgcaatttttaaagataaatcaataagccattgctacacttattcgaacttggttttggatggcttttgggcttgaaaagacagaatacttttgtaggctttgccttttgatgtgattttccccctgtcatttctagattggactgaagctggtgcatcacgtgactctagatagcaagggtgttctgatgtgattgatattgtggaaccagatatacttgcaacctgagagtccccagggaggaaggaggtggataggaggccacagcggcatggtgtcttgcccagaaaacacaacagtag

SEQ ID NO: 129190 - DNA, 3535 bp, Homo sapiens
gctttgaccccaacaccgcagctggctggctctccgtgtctgacgacctcaccagcgtcaccaaccatggctaccgcgtgcaggtggagaacccggaacgcttctcctcggcgccctgcctgctgggctcccgtgtcttctcacagggctcgcacgcctgggaggtggcccttggggggctgcagagctggagggtgggcgtggtacgtgtgcgccaggactcgggcgctgagggccactcacacagctgctaccacgacacacgctcgggcttctggtatgtctgccgcacgcagggcgtggagggggaccactgcgtgacctcggacccagccacgtcgcccctggtcctggccatcccacgccgcctgcgtgtggagctggagtgtgaggagggcgagctgtctttctatgacgcggagcgccactgccacctgtacaccttccacgcccgctttggggaggttcgcccctacttctacctggggggtgcacggggcgccgggcctccagagcctttgcgcatctgccccttgcacatcagtgtcaaggaagaactggatggctgagctggcccggggctgccccggtcttgtgccacagcactgttttctttctgccctcttcctaatgcccacactgcttgggcactattgcgcccctgcctccttgccaggctcttcctcctgtcctgcctggtccttttccatgactccaggctgtgcctctctccatgtttggtcccttctgtgcccatggtcaggagctattcgggtggcacctcgctggccaggctctcccgagtcgtggcacctccacaatgtgaattttctgaatccctattccaggatttctgggaataatgtttacttctagaatgggcctgttgtaaaccatctcatcgaggtgtggtaaagccattggatgaggaggggactgccatggaaaggagagtttgttacttacggttctgagaggaggggccacataggaaagccccacggtgggtcagaaggcggaaggagggaggggaacgtgtgggcaagagacttcctctggtttcctcaggaggaaatgggcaaggcagagtaagcaggggagacaggtttaagggtagctggcttgagtaatttcagtggctctcaggataggggctgccctttttgtctgatacctggccccgggatagtcaggacaggtgaatgttggcctggggtgtgacagccctgggagagccatgtgaaggaggcagctggcgccatcgctccggattagttggtttccataggaaaggcatgctttcagccagatgcttgccatctctagggattgggggattggctagcctgggaggatcagtctgtccaggtcagcgaggccccagataccagagcatcaagagtacaggaaatacagttaatgcagggcctctgtgtggctggatcctccgtctccatcagatcagctctgattgatctattcttgcacgatttcctctgaacacagggttccagagtacttaaacacaacattttttaaatcgtgatttcggcctatttccttgccaggcctgtttccccaccaggaaatgagataggaggactggatgaggatgtcctgttatagttgctgtggaggaagttcctctggttaattctcatcagcgtctgcagaaaagaaggaaagagggcacccttttcagttgggaagaaaggagaggggtggcgccatggacgtggccctaaacgctgtgggagagggaagaggaggctgggcctcgctgccctcttgtctctgctgacttcagcctggtcatgcttgctctgccacttgcgatttcatccctaatttcttcctccaccatgcctgcagacttttccctgggcttgttttttctcgcacatctctgaagagtttttaatcttcagctcatcatgtcccaggaagtggcatcataaaaggaaatatttttttttcctaggagcagtgttaaaatctgggtcacattcctgaccaaggacagcatcctgccttctgcccatccccttcagttcacaaaagctgacattttaaacaaatcatgactcacacgtattaattggttataaatatgttgtgtacactggttagataaaacttaaggccacaaggagggcccaggtaggcgatgtcagtgtgtgaaggggctggattgggcgtggtgaggatgttggcaaaccagtgcatgcacctggttggaagatgctcagcctcacaaaagctccaagccctttgggagccaaagtgtctgagagtgtgaccctctcctgtaaagtatttatcccacccattaatataatttctgtataataaacttgacctgaaattatttcattctttatattaaacttttaaaaatgttttttattttcaccttagatatgggaagagttttttttttttttttttttttaacaggataacttgagcaggctaggcctcttaaaaaaaaatttgagctaaaactcatttttcttttggcattttcttttcaatgttcttataagcaaagttcatccatgttgtagcatgtgttcaactttattttttcatcgggtaatattccattgtatggaatggtagtactacattttatttatcatgcatcgattggtggacatttggatcgtttctacttcttgactattatacataatgctgctaggaacttttgtgtatgagtttttgtgtggacatatgttttcatttctctttggtatatgcctgggagcagatttgctggatcatatgaaactctatttaacccttgagggactcccaaactgttttccaatgtggtgacacaattttatatcccatcaacagggcatgagggttctgatgactccacatccctcagtgctttttattatctatcttttaacttagccatcctagtaggggtaatgtggcatctcattgtgattttggtttgcatttccctgatggcgaatgatattgagcatcttttcatgagcttattggccatttgcatatcttcttaggacagctatctttagatcacttgctcattttttaattgggttatttgtctttttattattgagttgtaagagtccttttatagcctggcacaagtccctttaactggtatatgattataaaatttttctccgtgagctgtttcatttccttgatgatgtcctttgaaatactaaagcttttaattttgatgatgtccaatttttatttattttttcttttgttgtacatgtatcctagaaatctcacttttgatactgcccttaggtccatgtaagttcggggttttggctcagggatggggcagttattctgttggcaggaagcgctagtccacgagttcattaattcttccctgaagcccctctcctgcccttgccttccactcaccccgtcactctccttctcattactgtgtccaggctcaaagcagcagctctctgggaaggcccccgttctccagtttctcccacttttgcatccattccacatg

SEQ ID NO: 129191 - DNA, 1091 bp, Homo sapiens
ttggtggttgctgtggtttaaatatgttccccaaaatttatgtgttacaaacttaatccccaatgcaacagtgttgggtggtggagcctaataagaagtgattgggtcatgagagccctcatgaatgggttaatgttgttactggcagagtgggttagttattgagagagtgggcttgttataaaagtgagtttgggcccctcttgctctcttgctcttggtcttatgtgtagtctcttgcccttcttccttctgccatgggatgacacagcatgagggctctcatcagatgctggtgccatgctcttggactttccagcttcagaaccacgagtgaaataaactattgtttataaattacccagtctgtggtattttgttacagcaacacaaaatgaactaagacagtggtcatttgggttgtttctattttggctattatgaataatatgactataaacattcaggtagcaatttttatgtggacatgttttcatttttcttggaaatatgtctgggagtagatttgctggatcaaatggtaactctaggtttaactattggaagaactgctaggccattattcagagcaactgtatcattttatattcccatcaggagtgtatgtggattccagtttctccatatttttgccaaaatttgttttttaaaaattataaccatccttgtaggtgtgaagtggtatctccttgtgtattgcatgtcatcacatccctgatggctaatgacttggaacatcttttcatgggctttttgatcattagtagatcttccttggacaaatgtctattcacatcctttgcccatttttaatgtgggttgtctttttattgttgagttgtaagagttctttatatagtctagatacaagttttttatcggttttagctcttcatgtaggtctttgatgcattttgagttttttttttgtatatggtatagtaagggttagtccaacttcactttttttttttttttttttttgcatgtcaacatacagttttcccagtaccatttgttggaaagactattcctccattaaatcatcttggcactattgtaaataattg

SEQ ID NO: 129192 - DNA, 1008 bp, Homo sapiens
ttccacatactagctgtgtgcccttgggctggtcatttcccttctgtgcctcactttctcatctataaatggggccaataatattacttatctactagggagaagtaatgattaaatgacataatttctcaagtaattggtgttgtccctggcacagagtaagtactgaataaatgataaccatttataattatttgaattatttttcttaagaaaaaacttgagaagctttctgagaatgtagatcgaaaaggataatgagggagaaaaaatgataggcctaagatacaagaggcaggaatccaacctaaaacactctagtggttcttcaagttgtccaaggacatcagaaacaatcattaaagtttaagaaacaaaaactactaaaccaaaagtatttgtgcctgctgattaaagtattccgtgcgatacaagcagtgttagaatgtcaggatgcaggaggggtatggaggggcatgttgggcatgttgaggtgaggcctcatgggaggtaactgaaccccgtgggaaatgactggctccacccccattgtcagtcacctcacattagagattgcagacccattcagtttaggaaactgcagagggaacctatgaccacactgtctgcagttgtccacacagctcagggattcagacccagcatgaaccagcttttggcccacatgggacactcttctggcctgtgctgtgaccaacatgagagagagcagcttgcttcttctcagccccatctcccagtctgtaccaggctgggctacaggatgtctgagggctctttatcccatggatgtctgattcaggatcaggaccttacttaccatttgtgcccagagcacttggcatggatggggttaggcaaatgcagttgagttacacttgtgttgaagtggagtcccagttgtaaatgtgatgtgtctgccctctctgcccagcctccagccctaacctgtcttcctccctctctctcattcccatgtcaggccaa

SEQ ID NO: 129193 - DNA, 1310 bp, Homo sapiens
tgcctggtactgcaaggtcccagggatactgcaggagacaagatagaccatttccagcctcaaggagcttccagcagagacccgagggaagaggaggtgttagccaggtgaaagagggtatttcagatagaggcagcagcatttggaagggtccagaagtgggaaagcctgactttctaggcactgagggaatttaagggtagttagaatgaggagggacgtgcaggaggatccaggaggccggtggctcacccttgctgtgaacagcagctgggggttttagcagaagaatgatggtgtcaagtcagtggacactcaggatgatgtcaggggctgagtagtctagtcccaaatggatctgagaagaatgagagccaggtgtggtcagcctgatgcagggtgcaaatcactcatttactagacaaatgggtactgatggctgttgtgtgctgtggcctcttcttagcttcatggaattctcatttgagcagggggcatagacagtcaatagacaagatgtagttctgtgtgattcaaggtaggtggttgtgggggagcggtatgggaagattccctccaccacttggtaagaagggactgggtaagaagctgtgtgcctcactgagggggttttccgttttgtgctgtggggagctctgaaagattctaaacaggggagtttgtgatgggatgtgtgttttagagaaagattactttgccaactatctatgtgaggaacagcaaagtcaaaatcatcccagctaacacatttcagtgctcactgtgtgctagatgcttttcagtgttcacacgtcaacaaatttaatgctcacaaaaacgtattttcaggtcctgtgtttcctgttactgcgtaataaatgtggtggtttaaaatagcacaagtttgttctcttatggttctggaggttggaagtcctaaaatcgaggtgtctgcagggctacattccttttggaggctccagggagaatttatttccttgccttctccagcttgcagaggccccttcttccagctctgaagtgtgtcattccgttctgcatctgttgtcactttgacttctttgaccagttctactacctccctctcataaggaccctgtgatgacattgggcccacccaggtaatccaggataacctccccacagcaagatccttaatttaatcatctgcacagtcccttttgccatacaagattctggggattagaatggggacatcttttcggggaaataattattcagcttgctacagttaggtgctattatccccattttatagacaattatag

SEQ ID NO: 129194 - DNA, 1178 bp, Homo sapiens
tgaggacacaagggaaagaccatgtgaagacactaggagaagatggccatctgcaagccagggagagaggcctcaggagaaaccagccccaccagcaccttgactttggacttccagcctccagaactgtgaggaaataaatatctgttcttgaaaccacataaactggtattttgtcatggcagccacagcaaactaatacaaaggcccagagagtttgattttggccgacttgaaggagagacctttcagcagagctgtgctggagtgactgctgtgtgagcttcgcatggtgtcccacatgagcctgggcgaccatcggaggagctgccacagaagcaaataatattaattaaagtccaaattctctcgcttagagcaagtgatttttgcttcttgcttatatggagttcagtggccagtggccaggggcttcgcctcatgcagtcattcagggactcaggatgatggaggatgcactgtcttctacctgtggtttttgaggtcacactggacacccagctggaagatggggagttgaggaatgtagagaatcatttgggggttttaatgtgccaggtaggaggctgcactcttccatctgcatccattggccagaactcagtcttggggctccactcaactggaaggcaggagggagaatggagtctggctgtgctggcaggagagggagatgggctggtcagccaccaggagggctcaggatggagtggaaaaggtgatttccaaggcctcccctggcaccagtattcaggagagcctctcacggaaggaggctgctgctgtctctctcactatacctttcctgcttacagcttctcaataccccggcccctctgccgacctcttgcaatccaagtgacatgagccatgggtacgtgacagtaaaggtgagtcagttttgtctctcagtcggctaagtgctctcccaccaggtcacctaaaacgaccagcagagacacccaagaggctgagctgtgaggatcacctgaacctgagcctgggaagtggaggttgcagtgagctgtgatcacaccactgtgctccagcctgggcaacggagtgaaaccctgtctcaagaaaaaaaaaaaaaaaaaaggaccagcagtgacatttgttaaatatcgagggtggttgaacatccactatttataagg

SEQ ID NO: 129195 - DNA, 1008 bp, Homo sapiens
gagtcatctgctcctcccggtgggtgtgctgtcttgcagctgtcttatgctggtcttgccttctacctgcctgagcgctccacgcctcggtgctttccctggtcccagatcagagtagccttccccttaagagagtctgacttcacctctttcctctcctacggtgccctgtgtctctgcactttgggcctcagatgcccctgccccccacactctgaatgaatacagcagcccctaaggctcatgctccaagggatctcccactgatcatgggggatggcggacatagaatgtaccatccatctccagaacattcttcatcttgcaaaactgaaaggctgtattcagtcctcagttcttcctctccccaacccctgacaacttccattctactttctgtctctatgaatctaactcctctaaagactgcatataagtggaatcatacagtatttgtgcttttgtgtctggcttctttcacttagcataatgtcctgaagtttcctccatgttatagacggcaccacaatttccttcctattttttttttttttttttgagacggagtctcactctgtcacccaggctagagtgcaatggtgtgatcttagctcactgcaacctctgcctcctgggttcaagtgattctcctgcctcagcctccctagtagctgggattacacgtgtgtgccaccacacctggctaatttttgtatttttagtagagacccactttgctggatacatttatctttcagttcttgtaacttttcatgaattatttctttgataattttttcttgtattttctctatttttgttgttctttttctttttgctttctggaattgctattgttaaaatattgttattgttaaaattgctattattttttaaatcatactacccattgatttgggtactcatatgacccaaagtaacctacagatgcaatgcaatccctgtcaaaatctcaatggcattttttacaaaaatagagacagcaat

SEQ ID NO: 129196 - DNA, 1194 bp, Homo sapiens
gaaggagaggggaagcaggagaggaagactccacaccctgagcctccagtaggaatctcctccccagccctcagcacatgacattcagtgacctggacacttcactttagtcctcatccaagcccctcccccatcctttggtccaccaggaaggttctggagcctattttgtacattggcatctcttggtccagtttgccagagaaggagctcagtgtctgtggagctgatgaagcaagttcaggtcagagaattcccaccatacacaagccagagacctgggaacagccagagaactgtgtgtcgactgggtaattaaatgccatactgctcccaagaactggaaggacctggtcatttgtcaccaggaaggctatgtgtcccagctctttaacagtggaaaccttgctgccctgtctgtggaatacaatctattggcaatctaatggtctgtaacaattaagacccaagtcaaaggagttgattttgaagtttctacagcaaaaaaaaaattgtttaagtttctttgtaaagatggggtctcgctaggttgcccaggctgctcttaaactcctggcctcaatatagcgaaatttagatgcctggatggaagagcatttggtatatagtttttggcttttctgcttggtttctcagaatccttggagcccctctcttcttaccaccagtcagcctccaacccattcctctaccagccccctcccaagtcctttcaagagattattataagtagtaccttctcattataggaatattgaaaaacacaaagaaagtggcatctataaacctgcctcccgtggggaactacagttagcatcttgtattttatgctaacctttttaaaagacatgttttatgatgaaaattcaaatggatgctattctgatgaaacttgggctggatggggcacaggtagggtgcttgttgctttcagtcagatgaaggaggggtacagtttccacgatttctagggggtccttcattttgctttcttgattgttttagggagtggctgaggctgaactggaacagaacctgagtcggactttcaaaagcctcttcagagcaagcgatgaggtgaggggtggggatgggtgcagaagaacaggagggggcagttgtgaaggaagtagggtacctagtgtgtggcagggaccaggagtagcaatctgg

SEQ ID NO: 129197 - DNA, 1078 bp, Homo sapiens
ctcccagggtgagaataagtggagaatttgaagtccatctagcaaagtcaagaccctatgggagtacgccctctttggttggtgactttgtgcaactacacaaagcaatcctggcttcccagtctgggcggtggtgggagcacaggggtggaggaatgctagacccagctcagcccagtgaacttgggccagtctctcctcctccctgtgcctcatcttcaccttcgaacagaaggcattacccagaatattcctaaagctccagcactctcaggctcctgcagaggacgtggctcaagctgaccccaggctgggacagacccacttatgctcccaagaagcttggcagcaggagtgagggctgggcaaccacctggctcctcccggcctacactggtctcttgcaggtggatgaggagaagaagcaggtgaccatggaggctggcatcctcctggccaacctgcacccacagctggatgagcatggcctggccctgtccaggtaagagcccatgctgccactcctgggtgggccaagaccacctgcccaccccccatccttgcctggctggacactcaaggatctgtcaggagccacagaggagcgcctcccagtgtgcacccctttctctgggctcctgttcttccccattgtggtgcctatctccccatcccccatgggttcaggggctgttgtgttgggaatagaaagaaataggccagagatgagatgagcattaaataatagtctcaaacagaaatgggacaaccctggattaagtcattctgaaaacttgcaacaaacaactccagggatccaaatacaagaaaatgccaataaaccctcagaggaacagaagaccctgatgactgagccccagggtttcctggcatgcctatccatggcttcacttgttcctccatccaaacatggtgtcagcgattgctcaggtttaatatcaggggatttcctttgaaacaggagcaaaacacagccaaaggagtgaatctctaactgcagaatttcaaccattagaaacaggtgacagagctgtttggagcagtgaggtgagcaatc

SEQ ID NO: 129198 - DNA, 1024 bp, Homo sapiens
tttcgctgcatttgtcaccagtgctataccttactcatttactcatcttcttattcctgtcgcctggcactgcattggaacaaagaaatacacatatctgtttaaactgaactctagaaagatttgtgtccaaaataacaatattttatattttgatgctgcaaagctgacacttctgggtttttttttttccttgccaagtttcttctgcacccagctcattctccaggggcacatggcagtggctgggcataactctgggtgtgccggctcccatggtctgcatttctaagcagtagggtgcagtcagcaaggagcctgtgatgggagcctgtgccagggcaaggctggggccatgctgctgcctgctggcaggagtgggggtcccagccttgacagcccctgaactgaacgggcctttctggccatccagctcattccagggtcctgaggccacctcttcctctcgcctcattctgcctcttgcacttctcttgcagaaatgtccaatcagggaagtaagtacgtcaataaggaaattcaaaatgctgtcaacggggtgaaacagataaagactctcatagaaaaaacaaacgaagagcgcaagacactgctcagcaacctagaagaagccaagaagaagaaagaggtcaggaggagccgctaccgcctccctgccttgaccatcccactggaggggagggagggggtcactgcgcggtgccctgctgggttgccatggtgacccgcagtcctcccaggctgtgtcagctgatgctgaggctgcaattaagaagcagggaaggttcatttgcttctgaaagcatcagggagtgagatcttggatctggttttgttatgagcctggcccagggcctaatgcccagattcatttcaatagatgtttctaagccctgatcacatgctagttccaagcaggctctggatggggtggcggcaggggcccagacaggcgtggcgtccaaccttcaggaagcttatctaataggggtgatatggttag

SEQ ID NO: 129199 - DNA, 1070 bp, Homo sapiens
tgggatgcagtccctctgtggaggtggcatggggagggacggatgcatgacctaaggggggtattttcagtgtctgacatgatcgataccactctggacaaggaggccaggatgcagaaagcctgtgtgcctcgctgattgtcggggaggatgtggcttggacaagagcctggttcctccgatgccagggttcttgtttcttccactcaacattgctgtcctgcagtccctccctccctgcacctcctgccttcgctttcattcgaggtgtccatggcaagtctggtcatttccccccatttcctcaggaataaaagtgcagcagtgcctgctgtggggacagctgagggcagtgaggccctggggagctgctgcaggcagcaggtgggcgggacgccagcaggctgtctagctgttcccatgatggtctcctgttctctgcagaggcgtgcaaagactccagaattggaggcatgatgaagactctgctgctgtttgtggggctgctgctgacctgggagagtgggcaggtcctgggggaccagacggtctcagacaatgagctccagggtgagtagaccaagcatgatgttcctctggccacagggtgatgaggtcagagggcagggtagctaattctgctcagtgcctctctatcaggccccagtgttacagaccgtttttatcttgtgcactgggtctgggtgcctgtgtctgggcccactctgagcctcagctccgaggcccctggttcaggctctgcgtgcatcagactgccggcatttgcaggcatttcccaagcactttcggctgttgcatttcattcagctcttcccctcccaggccccttagcccagctcccaggcctcctccacgaagctgtgtctggaccaccggagctcttatccctctcccctttggagtgcccagagcttatccctcctgtgagctgacggtttctgcaggatcattgttaaaaacccagatcagacatgggtgtgagtctgtttcacctcttctcagctgggtgactttgggccactatcttgatctcatgacactccccccac

SEQ ID NO: 129200 - DNA, 1024 bp, Homo sapiens
caaagggcacacctgcagccacctctgagacttgagcccactttgccagcagccctcgtcggtgaagtctcaacaatttagctctcacctggaacccagctttctgctattgcttccctgtgatcgagggaaaccacttgctaaatgaggcaagtccagtttggccagctgctaccactgtctccccaacttgctgttgtgggtagctctagcttgtgtcctgccttaagaattatccaggtgagaagcaggatctgtccacccccggcccatcgccaagttccagaaggctcctcattcagcttggtgtagtaggattggaagagtggagctctcccttcctgggcccgtggattcccttcagtgcagtcctttaaattgtcacatcttgtagagctgttggggtgattggtttggctctctttctgtatatcatgcattgtgtgtcttacaaccagaatcccttcttgctctctgctttgagacttcatgaatacccggtaacataacattacaaatctagattttttaggtaaagtttccaaatttttatatattggctcaaaattatttaatattgtataggccaaacaaggtttgtctgtgggctgtccattgtccaggagctatcagtttttaagggctctggagagctctggctcggagcccagtttagaaagagctctgggtcttctccagtcctcatcatctgtgaatttctgattttcctggatttagtatgagccactggaaggaactctaggtgacagagtattatccagtgtggataccaccagtgtcctagagaaagaagagatgcagcgaaggaccagcaggtggcaggagagagtaaaccctggtctcggcgcgcatcacgcggaggttcagcggtccttgagaaggctggacacaggaagtgctgcacctcacaaaaagctgtgcttcaaggggggtttcaaagctctttgcctttgaaatcttaaaaatgtgggcggaaggtgcctgaatcttcttctaaaccaat

SEQ ID NO: 129201 - DNA, 2093 bp, Homo sapiens
tttcttacagtcacatttgttttgcactatactaggtcaggtgggacttactgcattatttagagatcagtggtcacttactgctgtgtaatcaggccatgtaatgacacctcacaaaatatagctgttaattcagctatgtcaggaaactgacaacttaaggcggagaagtgatgagtcaatttagttattttactttctgaactcagtgactgagatgagaaggcagctcgctaattaagataattgtaaattttaaatattgaattattttcaaggcttttatgttctcatttttgtgtttcctacaggatggcaatgattcagatgaattcatgtaaaaggagaaaaggagaaaaggacctttgaaagatgtgaatgtagagacaattgcagaccttttggtttcatctgtgttctgaaatataaaatacaaccaaaattctaccttcatcctacccagaaattattgattttcaagttttaaaaaaattgtaccttttttgctgacagaaaaggatcagatatgtataaaatagttgaacttgacagcatataacttaaagtgaaaatgtttttgccagaacatgtcttggtaccttgtgaaagcaggctgcccttgttcttgagatagactttaaaatgaaccagctctgaaaagtacttctgctgctctggtctatccctgaaaacagatgtcttgaaacacttttcatattcttaaaataatcttcacttctgttaagaagaacatgttggtgggtaattatgcgaatgtttccctgtccctgatttctcgattaggcgtatgggttttgaaaaagagatttttcagaagattgtcagcttcagtattcatgttccatcgtgtcatctgggtctgttagtgtagtgaccctcagtgcagtctgtcccagcgtttacgtccttgcttcctctgagcagaggcctccatcttagtatcaacatatttaaagaaattgatggtgttcatcaagctggggcctgtggcagttgttgcctgagcaccaagtaacccaagccacctatgtgacaacttctgggcccaggagtaatttctcagcattgagggtaaaataggatggagtgctctgttgatcatttgggagatgtaggttacctgatttgtgccttaggatgcagcgtgaagcagaagtccatattgcaattatgattttagaaggaactaagcattttactcacacccacagcagcaagaatgacctcctgcagcagatattccacctgtaatagcactttggaactgtgggcaaaaccaaaaggctagtgtttccatttattccatgttggtgtatggggttgaactggaaaattccctgaggcaaaactcactggccaaattttgagagggtatagaaaatgactttagagatgagtggttttgtgtatgtgtctgatgatattcagtctgatgttccgcaattttaaaagttataataaaataccatttttttaatctggaaggacattgatatatgaattcttagaatttgctattaaaaagggtagcccccattccacaagctggttttgagggtgatcttgctctaaaaaacctcattcatcataggctcagtctgacaggttctgtacggggctatcatctttctcctcctctgctaaatgcctctttcttccagctgctcactgggtcaaagggatgtcctttctcagatgtattcttgatacatctcagatgtattcgtagctgtgctccttccatacttccaaggagtccggcttctacagaattcctctgtacctcacactgcaacacatgtagatagcgcttttgaaaaatacatatatttttactatagtatgagaggtcctggggctcaaactttaaacatttcctaactcagcttacactggtttaaaatgtccaggtctctgctgaattctcttgttgaattcatagctctgtgttgattcctatgcccctaaccctgcagcctctttgttttatttttttccccatctctgttggtcccagggaaagcaaggaaattttcttttgaggacttataggttgattgcccacaggtcaa

SEQ ID NO: 129202 - DNA, 1003 bp, Homo sapiens
tattaaattaaatagagctttgaatttgaagtttagagacttaactgtcatgtgctaattgaggtgggggggattaaacatcccttgggcaagggaacgttgtcacagtggttgggttagatcctaataaagtcatttaacctctctgagggagtattcatcatcagtaaaatggacacatattatttcacagggctgcttagaattgaagcaaagacacatcgatgtgaaagtcttccttgacctactttgtaaatagtcataccttatccagatagtctttggttgctgtttttccagaatatcattatgaaaagatgagatgtgtttaatcctttctggaagctaattttagatttcttgaaactattggaacagtttaacactaaacagtagtcttcaacataccacaactcagatgccattgttgtggttattttgcttattgaagttttctgtgttttagaggcactttccaccagaaatctagcccccatattatttcatgaccttagtcattttattctcatcattttggatttttaaagcttgtatataattctagagttgagaaataaacaaatacacacacacacacacacacacacctacctaccgacctacatacatacatatacaaacaccatctgatcagtgacagatgttaaaagtcccgagactaggaaattgaatttgtagcccaaaagattgctaatctttctaccctaactctccctctgttgcttgcaacccctgttcctgagctccaagtatgaatcaagttcaagattccaaggaagttttgcactgggtgtttttattctctctttcagtgaaaatgttttcctagtttttctccatactttaaaagaatagactaattctccttgtaaccgtcttctgttaagggatacagatgtttgtgttttgttttgttttgttttgtttccataagttattggggtacagatggtatttggctacatgagtaagttctttagag

SEQ ID NO: 129203 - DNA, 1079 bp, Homo sapiens
tcatttctgttatttcttctttacagtgaatggttgagatctacacaacaataacttttttcctgattaaagctgaggatagatgacctaccagatgtctgagaactaaaactacacgtattcttttgagaggaaggtcatagggacctcggccacgaagacatccagttgtcaaaaataggcaccattttcccacaaggtttctagaagtcagaatgagaagaaagagaataaaaattactcagacataattataattaatattctgggagtttttttcatttcctgtttttttttgctttttttttttttacttattaagtgtcaatattttcatattacagccttctcttattttaaacaaacattcccgtaatgcacacagtaaatttacttttcagtgttctgtaacagttgaagaacctctgcttttagtaaaatcatgcctagtaggtaaggcagcaaatgccctttgagtgctccagtgtcaatggataatgaggtagtggaccaattggtttatttttgtgtttcagggagagaatatagaagacatcccaaaggaagtgctgatggactgtgcccaccttgtgaaggccaatagcattcaaggtcagttttcctagaggtgtttttagaattagcacggactttctctgtgtctgaaatggattacattttagtgagcatgctgttgactttggcctccatcaaagaataacatgtgctgtgcctttgccatgttttgttctttaagatggatggcaattttggtacctgtcaaagaactaaaaactgatctccccacccttgtcattttgaccgtcctgtctaagtctcggctctttttactgtttccttaccttgaatagaaggttgtctagatctgtctgtacttagtgttattataaaaagactttgggaaatttggcaatgttgatagctaagcaagaacaatgtgttttatggctttatttttaatgttgtttgatatctttatttctattatttgtcattagattctagaattaaagtccccaaatcatgcttctctactttttctttccctcctcctctta

SEQ ID NO: 129204 - DNA, 1016 bp, Homo sapiens
ctgtggttctgctaatctcccaggctggcagcattggagacttgctgacttctttcatcccccactcttttcacctgaaattcctttccttggttttgctctaagtcctatgcttcagtcaggggccaaccaaatctcactgcctcctttttatcatgaagcctttgatcactgatagttctttttatatcttgaaaaatcacccttcccagtacagttaatatttagtatctctactcatcttggcacttactcacagctccataattcagtgtttctcgtacctcttcatggtgatggggagccctttggaggtggtgactgtgctttatactcctcatgatgcttcacatgtggcaggcatggagtgaagactttttagaacagaatgctttaaatggcatgtggcctgaggagatgattgtcttgtacctcttgctaaaagtggttttcattctttgtaggtttcatgtggacaaactctcttcggctcatgtataccttcgattacataaggtaactgaatttaaacatggattcttgacttttctcctgatgatgcatcatatcttgttctttatcctttgcaattaaattgcttacagtaataagttggtacgcaaatctaaaagttaacaaatgaagacgtgtcttccctctgacccagaaaatcactctaacattctagatgatttttgagatatagaaggaggcagtgtacatatttcccagctagatgcactgcttatcctgtcacttccggtgtgctgtctgtcatctctgctttccttttctttcaattcagttgacactcccagactttctgtctcctccagtggatatcatgtgtggctcatgtgattctcctgcctcagtgaagggcccgtgttcccagttatcatgggcttctttaggaagtttaaaagaacatgctagtaataaaggaaaaaaatttttagtggcccctagtaatacaataccactatttttccaatctatctctattcatatatttt

SEQ ID NO: 129205 - DNA, 1660 bp, Homo sapiens
tacagtagatgcttgtctggaaacaattctagaaagactgtgtactcagatattaattactctacccaggaaaagccccagggggtcagttcattacagacagttattatagggggcttgtaaacaatagagcaaaatatatgagctataatttatatatggccaacacatagaaatcgattttaaaacatacatgcatatatgtctatcatagcttctttgtatatagtatttgttttcatgaactctttgggaagatatttgaatgttttatttgataaagacagaatttgagaatcctactgttaaactaatagaaaattgtgtgtatggggggtacatgtattgtttttaatatgacctacaagtagagcttacttagcagtagatttatgtaaattttgacgcaaaataatcttatcaatggactttgtttctttttatagccttttacacttcactgaaaatctgtttccatcacctaataaaaagcactgtttttatcaaaacagtgataaaaatgaagaaaacctgcattgctctcaacaagagcattttgttttaagtgcgctcaaaacaactgaaataaatagactgccatcagcaaatcaaggctcaccatttaaatctgcgctctccactgtatctttttacaaccaaaataagtggtacctcaatccactggagagaaagctgataaaagagagtagatctacttgtctaaaaactaatgatgaagataaatcttttcccattgtgacagaaaaaatgcaaggaaaaccagtctgctccaagaagaacaacaaaaaaccacagaagagtttaactgctaagtatcaaccaaagtatagacacatcaagcctgtatcaaggaattctagaaattccaagcaaaatcgagtgatctataagccaattgtggagaaggaaaataattgtcattcagctgaaaataattccaatgctcctcgggttctgagccaaaaaataaaaccacaagttacactccagggtggagcagcattttttgttagaaaaaaatcttctcttagaaaatcgtccctggaaaatgagccgtcactgggacgcacccaaaagagtaaatcagaagtcattgaagattctgatgtagagactgtcagtgaaaaaaaaacttttgcgacaaggcaagtgccaaagtgcttggtcctagaagagaaattgaaaattggactactgagtgcaagcagtaaaaataaagagaaattaataaaggtaaagctaaatatatcactttaaaaatggctgtataacaaaacttcagtataaatgacatagttgaataaaattttattttctggactgcttttataaagccagatagcatagtgtttagttactgtaaggagtttatttatttatttattttaagacagggtctttctttatgacccaggctgtagtgcagtggcacactgctcactacagcctcaacctcctaggctcaagcaatcccacctcagcctcccaagtagctggtactatagatgcacaccacctcacccggctaattcttgcattttttgtagaggctggggtttcaccatgttgcccaggctggtctcgcactgctgggctatagtgatccacctgcctcaccctcccaaattgctgggattat

SEQ ID NO: 129206 - DNA, 1048 bp, Homo sapiens
tgatccatttgagttaattttacataaggtttgaataggtgtaatttttttgcatgtggacatttaattggtccagcaccatctgttgaggactgtttttcctccatggaattacctttgcctctttgttaaatcttgatcttgagtattattttgtcttattaacctttgaaatcttatgaattaaagctttgattttatttggtaatacacattatcatgatttttcccctaccagtttctcctaagtccactgtctatccaatcttcagtgcatcttcagtcaattcaaaaaggtgagaattgttattgttttaaagtccaagccttgtaaattatacagttcctctgggtctctttttcagtctcatgctacttaatttggggagtttttttttcttcctcactaaggggaataggagaataatattgagaatagggtgatgaaatcagtccctcatagaaacatcataagaacttaagagttgagagatggaaaagatctttatatacttgagtaataataattgctaacattattatataataccttacccataataagtagttttatatctattatcttaattttcacaacaacttagaagttagatactattattctgttttcagcctaagaaactgttagtaatttagccacagttgccacagctattaggtgctaggaccaggactagaatccatatctgaaccaaatgcccattaggttatattgccttccctgggtgatagtatagtagctacaatttaataagcatttacaacttcatgatgtaggtaccattattaccccatgttgtagatgagaaagctggctggaggagtaagtaacttgcagcagcttaatgttatcataaagtatagctgaagctaccagtacccaagctaaagactgcaatggaggaggcatggatgggtagagagcatgataggcggcagagctctgaaaaagtagtttcttatggtctaaacatcctcttcctaagcagctttgattcttctctccccatttgattataaataactc

SEQ ID NO: 129207 - DNA, 1979 bp, Homo sapiens
ctgatttcctgtggatctgtgaagttcagtattatacttattttctccagtaccccaggaatttcttcatagctgtatggggtaaatattgtcctaagatttgataaagcaaaaaaatctttttttaaagggcaaagtcaatttccaaagtgtgcatctatgtgcatctgatattgtggaagaaagtccctaggacttggagtcagaggaccaggatttgagtgttaacactgccatttactagttactttaccttgagtaaattactgaccctctctgagtaggcctcaggtttctctttgttcctgtccttattacttcatcaagttaatgtcagatagaaagcactaaaaattgcaaggtactctgataaatggctgctttctttcccttgtaattcctccaaaattgtaaatttatatatatcaactttctgtgtcaagatctttaggtgaagaacagttttctgtgggatctgtcaacttcatgaaacagaccaatatccagaaaaatactaataccagagatacaagtaaaaaaacaaaagaccagctcatcatcgtgagtaaattccaaacaaagcttctcctatctagccctttgcagaaaagcttgccaacccctgtattagacagttcagaacttggtattttcaatgtcattaagcaatgttttatgtgacagaatgggagttgtaggtggtgacattgaatattcttgaatttatctgtgcttttcctgcactctattttttgtcaactcttgggtcaaataattttaatattgtttaaaataatttaatattcttagctgcttaaggaaaaatattgtataattaatatagaagtcctaaaatttttgccctccctgtttgaaataaggctttttcaggtctttaagggtttcattaaaaagttccgttgttcattttagctgtaatttccacaatttaatcttattctttcttagaaccatgagtctagtaaataatcttgtaaaaataaaaaaatctttggtttttacactgtccattcaaataattccctttcatcaatttattgcatttttaggtctcttgtctcttttttttccccccccaaagagatggagtctcaccatgtcgcccagactggtctctaactccttggctcaagtgatccacccacctcagcctcccaaagtgccgagattacaggcgtgagccactgtgcctggcctgatctcatttcattttgtcttgggggagggaaggaggatatggtaaccagattttcatttagtttttcacttgtgtcagcaggaaaaaaaaaattaggtgaaatttgaatgaatggttataggaacttaatttagagctatttgtgctatatttaaatgggtttctttttttaccccccaattataggacgctggtcagaaacattttggggctactgtgtgcaagtcttgtggtatgatatatactgcttccaaccctgaagatgaaatgcagcatgtacagcatcaccacaggtttctggaaggaatcaaatatgtggtgagccaaaacatagtctttcagtttgttctagaagtaaaactaaaagagacatttcttttccaccacctctaccacccagccggaaaagttaacttttaatgatgatgtttcaagcttactatctcaatttaagataaatattttgtaaacactgcattctgagcagagctgaacagtccagatatacaaaattcagagactgcagagatactctcttcccactatagtgttgtctttataggtagccttaggaaaaaaatagccttcccatgacttctccaggttttttctgagaggagaggtcccacccatttattaaacacctttcaagtccaaacacatcctatcattggccctatctttatgattgtacctgctactcagatacattcctttttccctatttttattgccacggttaatgccttcacaatatttt

SEQ ID NO: 129208 - DNA, 1538 bp, Homo sapiens
tcaaattatttaatgttggttttttttcctcttcacaaattaaactgtgacccttttgttttcctttggcagggttggaagaaagaacgtgtagtagcagagttttgggatgggaaaatcgtgttggttctgccacatgatccaagctttgctatcaaaaaggtatggaacattatctttttatctcttgcctttccccacccccaagaaatcaacctatgttgaagtgcaaactgcctttgctgacagataattcacttgggtacctgcttaatgattactttcatagcaatttatacaaaactaagaattgtaggacaaaggagtaaagaaggcagataaggctccacagcttatcttttatattcatctttcccttgtgaaagataaactaagctttcaatgttgagaaattaatggcccccagggtctatttcttatattggtgttgcttgtgtttctgaggttgaatgtttagccaccgtgaataatgaataaagctaaaacaaatctgttttaatgcttcctattccttatccctcccaggtgtctcaatttctgctgaaagtgatctttaaaataggttcttaaaaccttgtttccacagtagcagctacatgcatcaatagtgaaataattttggaggtgtataaatttaagaaatagaaattaaagaggctaaagtaacagtaatcatacattctgtgtatataaatatgtatagtttctattgtactttttaaaacattcacctgtcttggtttttaaaatcattaggtagaagatgtccaagaacttgttgataatgaattgggcttccagcaagttgttcctaaatgtccaaacaaaataaaaacttttctttttatatctgatgaaaagagagtagttgggtgtttaattgcagaacccatcaaacaggtatggtatatttgttttaaattattggcataatttgcaggcaaaataaagaaaagttgggagaagtctcagcatttaagattgctaccattaatgacactcttcctactgaaatatccttgacctagtggataattgaagttatttatttccattaatatttggaattttgctttgtataaacaggataggtaagccagtcttttatgttcatgtagtcattaacacagctggattataaagtctagtgattttaagtaaacaaatctataaactgaaatttttaaacatgtggcttagtgaaggttaatatttttggcaaaatagtcattacttatcccttaattagaatctaatttaggtactaattagcaatgttctagaagacatgtagtttctccttgtgttattagaagttggagagaaaagcagcttttttgtatttttgccagtataagtgatcagtttggccttttccttccccctcagctttattaaggtataactgacaaaaattgcaaatatttacagtgtacatgtgatattttgatataggtatacattgtaaaatgactaaatcaagctaatatagctatacctcacatacttaccaactt

SEQ ID NO: 129209 - DNA, 1040 bp, Homo sapiens
aaacgaaatgccaaccaaatttcatagttaatagatataaatcttctttagtgttactggtttctttaggtggtcatatatacattttaggatggagagaatgagagagttttatatactttattaaaaggaagagtctaatgtttacaattgtttaagaggaaagtctcgtaatgctatgggacacactagaatttgtgaatgtctcaacaccactagtttttttaaagcattgtgtgactaaagggataagaatttaagaaatagaaaatattttttaacatacttggagatataagttaaatttttgatacttatttaaggaatttttttttaaagcagtgtgaactcatctgtggtgttagctatagatgcttctgtatatcattgcaggcatttcgtgtcctgtctgaaccaattggtccagaatccccaagctctacggaatgtcctagggcttggcaatgttcagatgtaccagaacctgcagtctgtgggataagtagaatctgggttttcagactgaagagaagaaagcgcattgcaagacgactggttgataccctcaggtaagaaataaaatggatctagatccagaaccttagattcatagctttcccagaacctctcggcttctgagctaaagggaaggatattggtaagatacttcagtataaatactattaaagtcaggctaaggaaggtattggtactagaaaaaccatactagatgtactcagtctagggtgcaacattccaggtctgaaacatactagcccactgcttttcaaactacctgtgctaaaggactagtttaatttgtcacagaccaacactaataaaataaaaatggattgctagaaaaaaatagaaaaaacaaaactacaatctcaaattgttttagacttaacagatgtgaaattacgcttcaataaatataatctatacaaagtaaaggtttgaaaaattacagaagctgtacatggtcattgatagtgactagataatgaagacttggtataactcataagcataactaa

SEQ ID NO: 129210 - DNA, 2032 bp, Homo sapiens
ccgccttggcctcccaaagtgctgggattacaggcgtgtgccactgcgcctggcctagcaatatgatcttatattagttgctctttaccatggatatcctagagttaggtggatggttccctttgcctctcatcagaattttttctggaccttagttttcccatctgtgaaatgatatcattagacttctgtctctaaaatataaggcattttttcacttactaaaaataaggttgatttaagtcaagagtatttacttaaattgtgctcatgttaattagaatgttaagttgcttccatcattaaatcatcttttcttctcttttaggaattgcttcatgtttggctgttttctcagcactgatgaaatagcattttctgacccaacaccagatggcaagttatttgcaaccaagtactgcaacacccctaatttcctcgtatataattttaatagttaaagctgatttcagttataaaggagttactatctggataagttcaaagagctccttattataaaatacaaactatttaatatcaaaataaaaaataccgagactcacactcatacacacacacacacacacgcacacacacatatcacagttttgttccttatgagttgaaaagtcaggaataaatttgttgaaaattatctggggattcaaaggaaaaatctttgggtgattccctgattagcactctgaatgtttaattatgaaactttgtagctataactggaaaattacctgactctttgtaagagtattaaatacaaagtgatttttctctagaaatgtgacctggtcttttataaagcccactcttagaccaggattatctaatgccacatcagaagcaaacaggcaaatttaaacttgggcaagtaatttctgtgcccaatttgtaaagggaattcctgaatttttttttttttttaatagaggcatgggtctcactgtgttgcccaggctggtctgaaacttttgggctcaagcgatcctcccaaaacgctgggattacagtcatgagccaccgtgcccagcctaattcctgacttctctatacagagtcttcacttgataggcactcgtctgtagtaactcagtttgaatatctttagaaaatgtttagaatttatttgtaacaagatggtaaggaataagattatcccatatgcatttctgtagagcagaatttgatagcttagtgttcaatctttttgaaaataaatgtttacctgtcatcagatttaattaaaattatacttagtaattgcactattacttagttaatttttgttgtatggaaatattggtagtactactttgggaacctgttactgacaattgatgtcattaacaaaatgcctagttggattagatgttttcattttctaattttttgcttgtttaaaatgcaccttacttgttctgagatacctggcaaaagtctttacaaaatgtatggtaatagaaccaaggttagtaaatatacataggctggtggatgagagaccatggaactgtgtaaatacacttaaatgttcacacatttttctagtgtaattcttggatactttaaaaagcaaaacattgttcaaattgttttgattctgaaaaatcattcaactgctaactggcaataagactctaggcaagtcgttttccagattgtaattatatgtagaaactattcatctgcattcattttatttgcctgtaagttaacatgtttccaaaatttaaaagcctgggtccccaaaagaatgtggaagtattaaaatgtatgtaattatgcaaacattttaatgctattttctgcacttatttcttttaaatattttatttaaaatttttaattaacattttgtttgcttaatgcttttgttatgaatcaattaaaattctttattttatacaactaaatctgattttaattattttattatgaaaatagtatatgttaaataaaattcagataatacagaaatagagattgccaaaagaagaggcttcccggccgggcg

SEQ ID NO: 129211 - DNA, 1007 bp, Homo sapiens
gacaacttccaatttacttgtcacattattttgatggaatatatgcaaattaatgttgtgtcctattgcttggtacaatcttataccaaaaggccttcagtgatttctaggcatttttaaagttcagagtgcagttgttcctaatgtttctgagaacgccctgtgtcggtaatttttaaaattctgtctacacccaaatgtaggtataccacctacattggcaattcagtaatttggaaaattcccaggggactgtggcttacagaaactactgatccaaaacactttatagattagcaaaataaggccaagagagggaaagaaacctcacatttactcaagtttaatgacaacactcaaatcaatgaagtataaaataatgctgagacaccttctggtacccaaagtgtcctttattctttatcatcctatttgagttttattgtttttacacagctgggaaatgcttaaggtacaaattaataaattttaaactcagtatggaaaatacatttaataaattaaagcaaaaaccaaagatctgaggagatccaagagatcaagacaatctgtaaccagagtctgaagtatccaaggagctactctttttgaggcatattctcctcagcttccagttatcatttgataaacacatcagcaaaaggttcagtgttttaaacaaatgtagactttattttgtactgtacaaagtgctaatgtcagtagatccattaaaatatagaatatttaagaaagatcattaataaaagtaatggtcattcaatttaatgttacagtttacagcgttttactgctagtgttttaagtcagcatgagcagtatcaaagtacttatgtagctagtttctaaaactttacagaaaacccagtacaattccaagtgcttatagccaatataagcatatttcatattagaaatagttatccatatgttaacaagaaactatggtcctcaaatatgccaattttagagtctaataactactg

SEQ ID NO: 129212 - DNA, 1003 bp, Homo sapiens
ctacaatgtgtcaggttttcatattagagttatgctgaccacaaaaacagactgggcagaggtccttattcctctattttctgaaaaagtttgtgtaaaatccatatcatttcttccttggatatttggtagaaatcaacagtaaaacatctgggtcttgagttttctttgtgggaatgtttcttagtagacatagggctatgtggatttccttttcttcctatattaattttggtaaattgtatttttcaaagaaattgtccttttcatctaagttgtcaaattcattgccataaagccgtttataatagcctaattattctttaaatgtgtgtagaatttacaataacccttttctcattcctgttgttggtgacttgtgttctcttttttcttgatcagtctagataaagctttatatatttcattatcttttcaaataaccagcttttggctttgttaatattttatagtatttgttttttatttcattgatttctgctcatagctttattcccttcctttggatttgctctgcttttctttttctagattaaatcaatgaacataggtcattgatttagaactttccttttttccaatataatttacaactatagatttccctctgagccctgctttagctattgcttgcacattttgatatgctgtattttccttaattattcaaaacattttccaatttcccttgtcattttatttgacccataggttatttaaatttgtgttactgaatttccaaatacttggggtttccttagatatcttgttagtgatttctaacttaattccattgtggccaacaaatatactctatgattcctcccatagtgtcatacaaacctttacttctgctataactaggataaactcaaactcttacagacagaatattcactaggcagtgttagagtgtattatactaaaaaatgaaaattttcagtatttgattactataatctgcatttcctcacaaataagg

SEQ ID NO: 129213 - DNA, 1029 bp, Homo sapiens
ttgattatctcttctttaaatttcctaatgtttttttcttcaggatcctataactcatctctgatacatataattaaatatttaataagttgtagtccaacatgctcaaatggaaaaattggaaagttacaattttcaggtttaaagtttgtaacattccatctttacccttcaaattcttttcatcctctcccttccacagtatagatagtaagacttgttttagtatattagatcttacctcccaattgaaatggaaatgtagcagaggtgttcatagtccaaactattttaaattctgtttttaaaagcaaatttctttcaagctttttcccaaaaatttggaagtcattttaaaaagtattgtggttttattgttttctatcctttttaaatgaatttttttcttagatctccaagaggtttgtctcattctccttgggctgtaaaaaagattaatcctatatgtaatgatcattatcgaagtgtgtatcaaaagagactaatggatgaagctaagattttgaaaagccttcatcatccaaacattgttggtacgtttaaatttggtagcagtatctggtatattattttgtttattcagaaacagcttatatgctctcttaactggtttcactaatagaaatgaagaggatggggctggatatttaatgggtatcaaattaatgtgattggtctaaaataaaaatttgcatatagtattttttgatgcctaagtatataaacttcatgagaacagatataataattatgttgctagttctatgaagattttaagaatataaaatgatcttcatttagataatttaaatccatttaggtaatttcctggatttcatttttcatttttaatacaagtagggctggtgaaactattatatttagggaagcaaaggaaaataaaagtattttaatttgtggtactactggcaaacactgaaggcattttaaatgagatctactgaattagtcttgtaaatagtagctgtttcattgtatatttgtcag

SEQ ID NO: 129214 - DNA, 1055 bp, Homo sapiens
ctgggttcacgccattctcctgcctcagcctcccgagtagctgggattacaggcacgtgccaccacacctggctaattttttgcctctttagtagagacggggtttcaccatgttggccaggctggtctcgaactcctgacctagtgatctgcctgcctcggcctcccaaagtgctgggattacaggcgtgagccaccgcgctaggcctctattgatttatttttctcctatattggtcatattttcttgctgctttcatgcctggtactttttgattgggcagtagatattttgcattgtctagtactggattttgttattcctttaaagagtgtttgatttagttatggtctgaggttaagttacctgcacattagcctgttccttttgagactggcttttaagctttgttttgaatgtttatctggggctaaactttagctgtactatctagttgtgaccctttagaggactttactatgtgttacagggttaccatcctctagctcatggtgatatgaagtgttcctagacttgtatgatctctggtaattgttgagccaattgctttcctctggtgctttcccagctttggggcatctacacattgttatgtgcggataagtacttggccaaacactcaaagagaaactgttcagatctttggagtgctctctttggagctctctagttctctgctccacaaattctagccgcctagtccttcttgacctctgatctctgtctcttcaatgtgacaggacttctggattatgtgacctctgtcctgcagtctggaaactgccttcaagcagtaagttagggcagtgatagggcccacctcatttgtttctcttctctcaggcatcacaacactgctctgcctgttgtcaagtgtctgaaaacaattatattttgtctagttttctagttaatggcgagatggtaactctaggagcagttaattgtccaggagtagttaattatttttcatgagcagaagcagaactccatcttttcatctttttttttttttttttttttttttgagact

SEQ ID NO: 129215 - DNA, 1048 bp, Homo sapiens
tgccgaagatgccagcgtgacatgcaacagacactgaaagtgggcagagcccaagttcggggtcctgcacagagcacccttcctgcatccctggggtggggcacagctcggggccaccctgaccatgcctcgaccacaccccgtccagcattctcagtcctcacacctgcatcccaggaccgtgggggccggtcgtcatttccctcttgaacatgtgctccgaagtataactctgggacctactgcccgtctctctcttccaccaggttcctgcatgaggagccctgatcaactggatcaccactttgcccagcctctgaacaccatgcaccaggcctcaatatcccagttccctttggccttttagttacaggtgaatgctgagaatgtgtcagagacaagtgcagcagcagcgatggttggtagtatagatcatttactcttcagacaattcccaaacctccattagtccaagagtttctacatcttcctccccagcaagaggcaacgtcaagtgatgaatttcccccctttactctgcctctgctccccatttgctagtttgaggaagtgacatagaggagaagccagctgtaggggcaagagggaaatgcaagtcacctgcaggaatccagctagatttggagaagggaatgaaactaacattgaatgactaccatggcacgctaaatagtatcttgggtgccaaattcatgtatccacttagctgcattggtccagggcatgtcagtctggatacagccttacctccaggtagcacttaactggtccattcacctagactgcaagtaagaagacaaaatgactgagaccgtgtgcccacctgaacttattgtctttacttggcctgagctaaaagcttgggtgcaggacctgtgtaactagaaagttgcctacttcagaacctccagggcgtgagtgcaaggtcaaacatgactggcttccaggccgaccatcaatgtaggaggagagctgatgtggagggtgacatgggggctgcccatgttaaacctgagtccagtgctct

SEQ ID NO: 129216 - DNA, 1028 bp, Homo sapiens
gtatgtgcttgcttcctgtgatagcgtatgcatgtcccacattgttacatggcagacttcatggttgtcatttttagagcttcattaaagttcatctggttaatgtaccatgatttaattgttcctaattgctcatccacgacttctctaggttttcactgctacaaataagagagtgataaatttctcactgctgtagcatttcccttcttttgggttacttcttaaattcccaggagagagactattttgcaaaggatgtgaacatttttatggctattgatactttttgccaaattgccttccaaaaatatttgcacagtcatcagcaatgtttaaacacactagcgttcaccacggtcttgccagcatgatgtagcactgttccattacttttagagatttccttttttaaaatttgcatttctttgatagctaataatctcatcaagctttccatacatttgattattcattgtgtcatctcttaaggagactggctgtttaagccttttgcctggttactatgtgaggtcaaatcaggcatttataaagtgtctaatacatactcactaccatggggtgctatagggggaccaaggaagtataagacctggttcttatcttccagaaggctatgattgacactcacatcttatttacttgttgttgatttctttgtacccaacctgctgctttgcacaacctgtatgcttcataaatctttatgtagttaaatcccggatgacatgtttgttgtctttgtggttcacagagatcagcactcaatttaaaggaatgcggaatcagaacccaaaataaggctgaaacccagagagatagcttagacctggtcaattaatatggacacacatgaagtagtgccccacaaatggggaagccacggcttgacatcagtttttaaagcaaggttgagggtttgagtttggcaggatgcagtctatgagtcagtgtgtgacatgcctgccaccaaaagctatcgtgatcaaagttacgttcatagagaa

SEQ ID NO: 129217 - DNA, 1326 bp, Homo sapiens
aagccaattgtgggctccacccgcttgtgcttcgttcattcagcctggccatgtgggtttttataatatctgcttttgcaatataaactatgcacatcgatatacacaaacggccataacaccacattgcaaattacaaagcaaaacgcatgaactctcaaggatggatttttaaatttccttgataaggctggggcttatggaaaagtgcccattcccgtctgtagtccattgctttcaatttaactaggcgtttggggctggaatcgttttttcctcccctttcagtcttggagcgagtcccacagctaggcttcctgcgctcagctgtttgtttttcttccttggagagggactggggaatgttacccaccaagccccgtgggactggccagtttgaagagctctccaggcccctagctgctcaaatcccaaacacatggaaccgggccacacccttcggcccagtggacagaaaggctggcctggcggtcctgacctgccggtggaacggcccagccccaggccctgccgcctttgtatttgatggaagagaagataggggaaggggaaggaaggctccagctcgtggctcccagccaggtcctgagacttcagttgtgaaagctgagctggggcctccctgcctccctcccagagggcccatatatcttgtggccttgggtgtggccaaggctgagtctgagtaattgcttgcctggagcagccagaccctcccctaagtcaccgccctcaccctggggaggaggcctgcaacccagcccgaggccaaatctgtcctccacccccgaccccacccagctcccctcctcagttaccttttagaattttctttattctggtgaaatacacagaacataatatttatcattttaaccatttttaagtgtaagggtcagtgacattaagcatgtttacattgccgtgcaaccatcgccaccacccactagcagaactcttcatatctccaagctgaaactgcatccactagacctgaactcctcattcccccagcccctggcaacccccattctactttctgtctctatggatttgtcttctcttggggacctcatatcagtggaatcagacagtgtttgtctatcatgtttttattttatcttttcactctgtcacctagactggagtacagtggcgtgatctcagctcactgcaacctctgcctcccgggttcaagcaattctcctgcctcagtctcccaagtagctgggatcacaggcatgtgccaccatgcctgacttttttttttttttttttttagtagagacacggtttcgccatgtt

SEQ ID NO: 129218 - DNA, 1027 bp, Homo sapiens
aggatccacgacgtgtcaggccagggtgagcagccagggattctccaaacacaaattaaaaaatctctgtcctcaaagggcttatgatcccagtagaagaggctggcatgggaacaactgcctataatatacagtaggccaaaatgtgtgtgaataataaagtcaggcgagcagagggctttctggaaaagggctggaagactgaaggagattgtctaagagaagatgtgggaaagatattcctatttgtgtgacaccaagctgggtcaggtttctgtaaggctcacaccagtcaggcggaggagaaggcctggggttctggtcccatgcagagctcccatcagtccatccgcaaaggggaaggtggcatccatatccactggcacatcagcaaaggggcttggtttggcaagaaagactgggtacagcacagtggggtgattggagaggactatcagggccagcctggggggcctcaggggtgggaggggtcagatgtccctgggaccaccatacccacttcctagtacctcatcttactctccctttttctgaaccccagattgtttttttaaaaagctcatttggaccagaacgactggaaattaacagcaaccctagccactgcgccttctgggcccctcctctgtggggagctctgtcagagggcactttgggagccatgctagccatgtcctgtcccagggttccctgatgctagggcccaggtgcagggcagacagcagaggttgagaggtgtggagtccaggctgattcgtgcctcctgggcctctgtgggcctcagtgtactcatctcaggctgactcgtgcctcctgggtatgtgaccctctgtgggcctcagtgtactcatctgccaaatggggatgcagggggttatctctgaggtcctatctggttctagaattctgtgtgtaaaattggacctggccattgaattaggagtgtggcccttttcaaccccaagttagaatatgatactatgctgggcaaagcatggctgtggct

SEQ ID NO: 129219 - DNA, 1047 bp, Homo sapiens
cagccattgcactccagcctgggcgagagtggagacctcgtctcaaaaaaaaaaaaaaaatttcaacagtcaacaatgaaaccgcatctcagctcaggctgttgggggatcagttttcaaaactgacaccttgtggcagcaagaaggaacagcagcagtatactacgctttttggactgccgctatccaccccaacagctggtttctcggtggagaatgctggaaagggcaaggaagggcttgagcgatggacaagaataataagatctgtgatctaaattcggacaagtttattttggttacaatctaatataaaaatactaccctcgtatggtataaatccaagatggaatactttctcctttccagatagttttgcattttagaaattgaagaaaaagttttaaaccctgctgtattggacttcctagcatttgctttagttgagaaataagcttccaaactcttatcagattcgttgccagtccttacaatgttgaaataagggccctggatgtgtggacttggcccttgttttatacacatggctaagagattaggcaaacattgtttacccaaaagagttcctgagttacaaagtctacatccctttccactctttccacagacaggttgtggacacatcctggagttctgagatgctttttcgagcacagattaaagtgttcttcagccggtagctggcctaggggcctgaccagcagacttctttctttgcctcttcctctccagctccagccaccaagccagcaaccacttggtatttagttctaaggcagtcctcaaaccgagccagggcgaattcttgaatttgagctcaatcatcagttagaatgtctgagagggaagggtcgaagtataacctctctcaactctcagttgtggcttgagcgtggagcatgaggtggcagagattcaggccttggcaaatagcatggcttgcactagaatattctacggggtgtgcgttggcttccatttctactggaagatgcaaggttgaacagagagggagggctgcctgaa

SEQ ID NO: 129220 - DNA, 1052 bp, Homo sapiens
cagcaagaaagataaaataaaggctctgaaatgggaagcagcctggggtgttctagggacagagaggaagccagcatggttagatcctgtgttaatccatttgtgtccctataaaggaacacctaagactaggtaagttataaagaaaagaggtttaattggttccagttctacaggcttcacatgaagcatagtgctggcatttgcttctggtgaggcctcaggaagcttccaatcatggtggaaggtgaaggggagccagtacatcacatgacgggtgcagggaggtgccacactcttttaaacaacaaatctcacgtgaaacaactgagcgagaactcacttatcaccaaggagatggtggtaagccatttatttatgaggaatccagccccaggacccaaacacctcccaccaggccacacctccaatattggggatcacatttcaacataagatgtggaggggacaaacacccaaaccatgtcagatcccagtgaacaagagaaagaacgtcatgagacggggttgaagtgttaggtaagggccaagatacatgcttttaaggagttgaaattttatttgaaatgcagtagggagcagatgaaggggaagtggcaagttctggttaacaggtagggtcattccggctactgtctggctaatggattagaggagtaccagggtgaaagtgggaaaccagataggaggccatctgattacatccatccctgctcagatgggggcggcagcagtggtgatggagaggagattgagatgggggtaagagaaaagaagggatcaagcctgacactaaggttttggctgtcagaaatggtaggaaggtagggtagggctgtatactgaggtgggaaagatagcgggaagagcagagaaaatctcagagggagaaaatcaagagttctgttttggatgtgtgaagtctgaagagcctgtgatacattcaagtggagatgtcggtgggctctgaatgcaagagaagtctgagctgacggtacgaaactggggattatcagctcataggtaacatt

SEQ ID NO: 129221 - DNA, 2055 bp, Homo sapiens
gaatgtgagtgtgtctgtatgtatgtgcacatgtgtgtgcacatcatcagagcttgaagatcttggaaggaatatggcctgtttttccttgccctccttccctaccaccctcaggcttttctctggcttctcttttatatggggtgagggtttcatatagctaattataaggttgttcaaatagtgccacctcttaagattttttgtgtaggacaaaattttggatagacctaagagtggtttttattaccctgtaagtaaagcagttcttggcacatagtaagcacaagtaaatgcgtgaatgaattttgaatgaacagttagctaatgacctgggtagggttgcctcttggaattgggggcagccacatctttttgtgccctcgctactccccctacccccttaacttcctttgttctccttgggtttgtaaaagtgaaaagaagagaggagctttttcataaaatttaataccaagggtagctcaaagagcccatctgaaaggtttggcagctgggagagtttgtgtggacagcagcccacttctgtttgattgactctagggaatgcaacaggtgaattctgtgtccgtgaatctggacctgtagcattgtgatttcttcgtcttacaggggctttagtaatagaggagatggcgactgcattgttactgctcgttcaaaactgatcaagaggccgggcgtagtggctcacgcctgtaatcccagccctttgggaggccaaggcgggcagatagcttgaggccaggagtttgagaccagcctgaccaacatggtgaaacttcttctctactaaaaatgtaaaaattagctgggcatggaggctggtgcctctagtcccagctacttgggaggccgaggcacagaaacacttgaacccaggaggcagaggttgcagtgagccaagattgcactactgcactccagcctgggcgacagagtgagactgtgtctcaaaaaacaaacaacaacaaaaaaaactgatcattaatatgagtcatacttagtaaatgctgaagtcttcaaactttagaggagtaatgatatcatccagctaattactcttaataatactgaaaaatcaaactataccttagataaaatgtgattgaggaaaaacaacctttattagttcaaagccaggcgacggggatggcagcagaaggttctctcagagggttgctgaccacagttcattcagctctgaaaattccctggcagggacatctatgaagataagtttttctctgcaagcttatatacttctgtactcatttcttggaccttaatatgtaaggtcttcttatcttgaagaccttacatattaagtggaattgagctgtaaatatcttagacttgcctctctcccccataaaaatttgccactaagcttttcatctcctacagtttgggtcccctgaggtatatgaagcaggccaactaagatctgcatagtgaacttttagtatgtatctagtttgacattttcatcaattgaaagtaaaaattttgttttattcttggtgtaacattttatttttgcagaaatgttctagtgctaatggtgcttgaatgtaagttttccatcattgggttgaaaatagggttgtctagtccagcgagctcagtgcagatcatgatgtgtttgtagaaaaagccctgtggaagagaaatcctctttcagtaatattctaggcagtgccagtgttgttttgtttctgttcttgaatttacctcaagagggcaacgaacactttattttcagataaaaatttatatatgatttgggtcttcattgcaacacatctcatgaatgcctcttgagaagtaatgaaagtacaatctgggagccataaaaccatccataaattacactgaattctgccaacacacactttaaatgttttgctcttttctctcagtctctatatttttatgagatcatctggaaaaaaaaaagacctgatttgtggcgtgttgttgctttgttaaggtaaagttttactacaaacccctcataatagagtttgtatt

SEQ ID NO: 129222 - DNA, 1317 bp, Homo sapiens
ctagagacagaaagtattttcaagtgttggcataattgtgaaataaaaagcagcccagagaagttgtggttttgacataatgtggccctcggaaatgtttggatttgaccttgcccttctctctcatcctgcccagagtctatgagtgaaaactggttggtttgcacagcgtagcccactgctcttagatgtaaggtgatgaacttcatgtttattttacttttgtttttgcttgctgactacatagatgtaaactgactttcattagcttagcagggttttttaaagattaattttaaattaggttaaaaatgatgtattgtgacctatgagtcagcaagcagcatttaaggttaatagtctgttcacgttagggtcaagttttactgctgtgttggctcaggtgtccctgctatgttttcatatgttgaacctgattaaagttttgcttcttaaaagaataggagttaaggtaaagaaaagccccagcaagcagagcctggttattatttatggcaagctagtagcaagcagtgtgttatatatattctcgtggatggataaattggaaagttgagtgaacagagagttcaaggacaaaacaggtatggcttttgtgaaggctcattaaatcaagcaaagtgctaatcactcagtactatcagctggactgagattcttcagtagtctccagagagcaacaattactggtgactgtcatcgtgtaacaatcaggctctggagatgaaaaagaccggtagtgggatctgagtcacccattcactagaatgcaaatgttgccaaataactccaacaaccttttaaaatagttttattcctttttaatcagctttgcccagaagcagttttacattcaatctttaatgctccttggctgttttcacaagatgcaatttaaagggtagttacccattaaaaagtgagtgagtcatactttctccctgtggaattttaaattcatttcccgttccttcctcttcccccgccccgccccccacgccccattaatgactttagatcctccaactatgttcttacctgtctgagaaaagctgaagtgctaggtaatgctaggtaccaggcccagaagacaatttcgtagacttgcacagctgcaacggaagcaaaaggaacctacagagacctgagagtgagtgactgtggccctgctgccctgggcgtcatttctggcaggcctcaggaccttctgcatttctgggctttgacgctgacactgcttatctctcactttttctattgaccattttactttctcttttggtcacccagatttcc

SEQ ID NO: 129223 - DNA, 1047 bp, Homo sapiens
tttatatatcttaagccctgccagctaatgtgatagggcacaagggtctttgattagtctgtaagctgcagtgccaccaggttggtttttcataggtagtactcatttttaaatcaaaattctgtcgttacttcattttgtgttgggcgtggttaatttatagaacctcatgatataaccaccaatatcgaggaagcagacttgactaccatctcaaaaaaagattgggggtaatagttatttttaaatcctcaagcacatcaaacatccaactcagttaagtctagagcatcactagcagagcattgggcagaacttcaaattttattgaggtattttcaagatagggtaatagttaagaagaggaatttgttcatggtgctgctgccaaggagttacaccaataactcaaggtgttatcaacaattcaaacaaatctggctgttcaaagaagtgagtaaactccactgacttgttttgggaccgtagatggagaagagattgtatgttgtgactaacgaaaatgaatatttcatctctgtaccattttttactgtgcaatttggtttgaacaggttgagtatgaggttgcagcatgtccacacagggaatgttctgtaagccattcagcaacttgagccttgagttcttgtgagagtttaagcaggactagactcaggcacatccagttgcagtaaggacagaggttttgaaagaggagctgccacgaattatttgtaatgagaggtgcccacctctttgataccacagcttcttggagtgaaacaaaagatagtttccagaagataataaagagactttaaaatcagtgtgctatcttccttccatcagtgtccccctggttgggcccttagtgcaaggagacagtaataatagatagtgcttctgtcaaaaggtcgctttcttctttccagaaatagaaacatgcttcccaagaaataatctaaatctatttatatttctgccacttctagctttttgttctgtagtcatttctctttttttttttttttttttttttctgta

SEQ ID NO: 129224 - DNA, 1023 bp, Homo sapiens
ttgtgcaggagacaagctggaatggtgagggcctagtgcagtccagcacacacttgctttgccccagtgagactacagaaacaaggagtttctgttctgtctgtacgccctacctggtcagaagcaaaggctgccccagggcctactgggtgtgccagagaagctgtcaggggttgagatttcaccctcggtgatctctgcataactaatggagaagtcattttctgttctctattcacaggagttttttgagaaccctgcttttcgtcccgatgggctgaaactctatcctaccctggtgattcgtgggaccgggctttatgagctttggaaatcaggaagatataagagttactctcctagtgacctggttgaattggtggctcggatcctagccctcgtgcctccatggactcgagtgtaccgagtacagaggtagtgtgttatcttttattcctaaaatagttggtgactagtctgtttactatttctcatggaaatagtctgatttcatattgagggttttggatttttcttaatggaaataagataactggaatgctatctgtaaatagggagggatggaaatcatagcatgtctaagccactttgccaataacgtatttatttatctacccattcattcatgagcctggagacagagccatgacggtcaataggcatggtgcttgcttccgagcagcttatggtctagttcagtgtttcctcttccaggtctgcttccatctagatgcagtaatgggtatgagcataagaagtgtggccgtgtgtgcaatctctgttctagagcctctgaaagaaaaagtagcaacaatcactctttacagatattaatgtaaatgtggaggaaaggtgacatatttctgatggcttgaagaaaacaaaataatctgaactgctttcttcctagaaaagagaaagtaagatctcatttacaatcaggaaccttatctacctatttatacttacatacatacatacatatatactggaaacataaca

SEQ ID NO: 129225 - DNA, 1632 bp, Homo sapiens
caagctctaatttcaggaggcccaactgtcacatatgtttctctatcaatacatcacttatggagcttgtgagtgaggagtggtacaggtggatgtaggcttaagatttcgaagtgacactcttacttcacacataggtgggtggattaaaatgtaatggaatactgtaaaacaagaggcagtggtgcaatctctttcaaaatgtggaattagtaatgtcctcgatgagtctgaggacagtttattttttgaagatagtgatgactcagttcctaacacagtaaggccattggtgaagagagtcatccagagtctagctgtgatgtcaggtttttatgctttaggattgataatgtagttaactgtgaatatgatcatttgctagattttttagtacaaagactaatatgttcatagtattttccattttgttttcttattttttatgtagttttggtgcttttaactatgatatttgttgtcacacacgtttctgttagaattcattttttttttaacgtaccttactgtggactgaggttcagtaaagcatttacttttttgtaagcatgaggagaattccttgagatgcattatgttactttatgttttgcattgagtgttactaaactattactctgactgcctgcgtaagaactcattcatatttattatattttgctacttcctttttactcatttctttgtatataccacattgaaaaatgattcagatttattttatattggaacttgctttttattcttaacagccactgaaatcactgaaattttagactaggcatatgcagtgctgaggtagcttatgagatttcacgttctagtcaatgtattacatcttgtgtttctgctgtgtagcaccactcccatgatctcatacacttcttttttgatcatgtgattttatactcccccccaacagtctgtagaatattactaattatccagaacttatgtttcttcctgatttctagccataaaatattctatttacatgagcaaaataatgttttctctgtaaaactactaaaccactttcaatatatgtattaataacaagttaacattatttttccaaaaatttccttacaaagttggagtgcatctttacgtatcagtatattttatacactagcaaatttgctgttagcactttcatgttccatttcctaaggatttagaataatcttcatggttataaacttaatggcagcatagtactctgcaattttaatttgtcttttttagtaaactgttcgccttgttagaaatttaggtcgcttccaggtttctttgctttcttcttccttttttaaatgtaattatcctggcctccactacagctaaacttcatagaactttctactgctgttgaagtaatctcttagagtagtataatctgggagaaggattacgcatggtaaagggtctaagcatcttttcattattattatacttcttaaatcctttctggaacaaggggaaaataaataaatgttacagtttttgctatgaatattgatatggctttccaaagggattataccagtttaaagtaaacatttactggttttatcacaacctctatagaattgggtgctttatagtatt

SEQ ID NO: 129226 - DNA, 2128 bp, Homo sapiens
gagatcgtgccactgcactcagcctggtgacagagtgagactccatctcaaaaaaaaataaaataaaaaagaaacctgtatcaaaagctagatagtaaaattttgaaataaaagtgctcagaaaaatgttaattgctaacttaaacattatagtcaaatgtgtatgagaaggctgagtgtttatacagcatcaagtggctgagaagctttctgatttgggaagagagactcatggggattttactcagcaatgtttttttctagcttcagccttaaagttttagagcaattctgagactgtagaaaattgctgttagtcttaagactacagttaagcaccctgactctgtttaatttgatattagttatgtcttgctaggaagaaaccactggcaaaggagaaaagtctccttccaggatatttagtccagatgatttttaataattatagtttatttatttttgtttgaaatcattgtaaaggaaaatcatttgtgtctttctgttcagtgcctttagaaaatctgcatagcctccatggaggttcacctagtggcagcttccaccaattataggcaacacactgttgactggtgaagctgaacttacaaggtttatgtggagaaggaccttttttttgttgttgttttgagacgaagtctaacccttgtcacctaggctggagtgcagtggcacaatctcagctcactgcaacctccgcctcacaggttcaagcaattctcctgcctcatcctcctgagtagctgggattacaggctcccatcaccgcgcccagctaatttttatacttttagtagagacggggtttcgccatgtcggccaggctggtttcgaactcctgacctcaggtgatccacctgcctcggccacccaaagtgctgggattacaggcgtgagccaccatgcccggccaagaagaaacttaggcaggtatcagaagggagaatggaggaaaggaagataatttgagtgagaacacaatgtttcacacttttaaaattttactgtattttactgatagattacttgatgtttttaattggttattttccccaccctgccctacccattaccttttttttaaaaagactatttatactttttagttttatgacagttgagttaggaacatcttccagggtgtttttatgaagcagcatcctaatagaagattctgtgttccagccctgaagggtgcagtcaatgattaaatgtaaaattctgtccagacacatgatggagccatattaaactgttgctgccctcaggctatttgacagctgtctgctgatgtgatatttaaatcatcatgaaacattagaataggaataccaattcacaacccaagcatgtttctgaagtatgagcaactgcagacaaaaaaaggcctagacatcacttgaaaggtttctgatgagcaaattgcaaatatcagcacctctaagcttgaaatgttacctgttgaaatagaacagtgaatgttcttgtatgtaatcgatcttcaggccaagaaagtggaactagattgaatcaaatggagaaacgtaaaaataattttaactcctacctagatgaatgcagcaagctcagatagtcagtaatctcatctaggttttcaactcctagaagactgtaacaatgcctgcttatatagtccagattgcttactgcagtactctgtccattgaacatgttcagcatacatagaattatctcttttcattttcagtgaaaaagactttgtcactgaaactggcaattaccacatttctgttccttaatgaggaaaaacttccatctggtatactcgcagcacgatactaccaaagaccattgaatccatgttgcattctcatagtggcagacgtaaatttgaggacatttgtgaattgtcagcatcaatgtgaatgcctctgttaccaggtcctcactgacttgtgctctctggtaatcagggccagcttcaaggatatgtgacccatgcagtctcatagggtcttgcacttggcttaatattctgctgtcaccgtcttgaaattattaataatttttttcacaaggactcatgttctcattttgcaccgggccccacagattctgtagcagc

SEQ ID NO: 129227 - DNA, 2090 bp, Homo sapiens
cctccctccctccctctcttccttccttccttctttccttccttccttccttcctcctttcctttcttccacagtgcccttcttgcaaaaaaaaaaaaaaaaaaaagccatcttcaacatgtaatttttggatattcctaaaatgatacaaatatggggatgctaaaaatgttaactgccgtaaaatggaggttttaaacatttaggaatttactttttactctttatatacatacttctggattgtactttcagatagttatatcccctaggcaaacctgtttcttacttttatgacttacattctttactgctaagattatattatatattgatctttttcgaattctaaatttattttaaaagcactactgtactacttcatacattcctactctggtttccccatcctcagattcattaaaggtggttttattttgaaattcagctcttttatctcactgcaagttatatgcaaacttaattttgagcccagggtttggtggagaggtttaaataaaaataaagattgaattggttaccagttttatatttgtacccctcccaccccccaaccccgctcacgccatttttttttgacagtgtcgagatgtgagaaccagagaagttggaatccaagaaattcatcacaaagtacggccataccaggttagtctcttcatgtcatagagggcctaggtactgtccttagatctttgccaaccctgggcccacatattcttaaccaaggacagagccccaggagtgaataactaagagcagagactaatcgaggattagataccggtgtcaaaccgtgaaagccaaatacaagaattctagaagagccaggttaggaaaacgaagtctgaacctcattctagattagcactgtccagtggaactttctgcagtgttggaaatgttctgtgatctgagctatccaatatccaatatggtggtgactgttgagcacttgcaatatggcttgtacaaatgaggaactaaatttttaatttaaaataaattcaattgtaaatagtcccctgtgactacgagctacatttgggaagagcatagtatgatctgcttctctctttatgtgtaactattcagctgttggcccaatggtgataagcaaatgaatagatcagcccttacccacaggctccacaaaaattaagcataatgccttaaggcattcatggtatgtaatgaattaacttttctcttatactcttataatgtctagctgtatgccagattttctgtaggatttgattctcttgtggaaccccatttgagaaaggctggaatagatgatctctgcattgatatttctgttctcagcatgaatcagttaattgacatttttcacatttaggaccttttgagagaaaaagtagacccaacacaatttgccagattcttgtgctgttcagttatttagcaaacattgttgagaaggaatatgtgttagtctgaattgttcaccttgctctgggtaccatctccccatctaccgagtgtttctgcgtgtggccatgtccatatgtatacttttctctgtgcgtgcaatattgttacatatggcttctatttaagaaaagtacaagagccatttgtacaatgagctgaagagccaaaagcctgtgcagactgctaccacaaagcttccccccagaagctaccctccatgactgaactttctctaacatttttatcccataattatgcataatatttaagtgccctgtgggaggccacacttccttgaaatttcgtcaaggtgcaggtgaccagcatcacatttttcttccccaaagataggtttcagtggaggcgataaggactagaagatgaaacccaaaccattgaacacctgacagttttgagacaaaggggtgctcctgagagctacgcatgagacgtgattttgaaattttacattaagagactcttcatggggagtcaaatgcatggaagcctttactgagctggatctctgtaagagtctcaaggttaatgaagttcaagtatttgtgaaattatacagttattttccttttataatagtccatgaacaaggt

SEQ ID NO: 129228 - DNA, 1015 bp, Homo sapiens
ctagctttttatcataatctaaataatagctcaatttcagatcatctgcatgtagagtttctcaaataacaagaagagacttgctcaaattaacagggaagaacctttctcttgtcagctggtatgataggtctacttcatttctatacaaggggtttcttttggcagtgggtttctctgggaacagccctggaatgccttcttgggactctagtgagttcagaagggaggatgccgtaagcattacttcctgtcaccctgcctggaagccccaccattgctctctataggggaaactacgtacgcctggactttctgtttgacttaagctctggtcacccttcaaatgaaagaacaagaacatttgctgtctggatgatgcatttttatttctccaatttagtaatctattactgttctgtgtaagtttctgaatcagatgccggagaagttagtccattattaagaacttcaaggagggcagatgtgaagagcttattattatatggtgtttttaatgttgtgtttttccggtttttgcattttgactttggtttctctgatgtgagtacagtgatgtgtgtgcgtgtgttttagttttttgtaaataggcagttattctccataaattaatccttagaatgaaaatctctttatgaccgtgctggtgtctgtgggctgcattttgtcagcgttacctcattggattagctgagaagaggcactgatttggatgggagtggggtggggaggacgggtggccaggattccattcctgctttgccagtagctcttcttgtgatctaggataattttacttactctccatgggcctttatttccgtattttaaaaaagtggatgtggttatcttttacagttctgactctagaattctaccccttagtatcttctttagttctcagcatgaccaattatgttttcctaattaaattgtaggtgggaccttttctgtgccatattaagagactctttaatttcatcaataatagatc

SEQ ID NO: 129229 - DNA, 1020 bp, Homo sapiens
aaaatgttaacatgagcagtttttctgtctcctctcttataatgtaaagtgcaaggaattatactggagaagctaaccacaacgtctgaaatgccatcactaataatcaccgtggaaacggagatctctgatgtcacactgcctgtaccatttccaaaagggcaaatagaactgtgatagtcactatttaaaaagccatttaacacccccaacagaatgagtttttttcttctggcagttttggctaggtatcagatccaatcgtgtgactgtttcagtttgccaagctaattgctatgcagcaagatgaccagctattccccaagctcgtctgactaccttcatcataagcagtattctatttgtgtcctttcaagtagaaaattaatatggccattggccaagaatcgtacaaggccgatggatcacacagtgatggtgaagaataaggaaaatgtctgaatggtcaatgacagaaatcactgaagtcagagactgatagccattttgtttaaatctattaaaaagccagagaaggggagaggagagaagaatttaaatatagggtgattaaatgagtcactatggagatgaaatcatccttaatcatgatggtcttagttatatgaccctaaaactacatcacagtgcctcctggtcagaaaataagtgtacctgcgccttatacaatccaatatggctttctaggactgcagttaatggtcttgtttgccagaaccactgattaataaaatcatatgtgggcagaaaatagcagttgttttgttgaagcatttaaactacaaatggctgagatttacttattcgaccttcacctgtctctcaggctactacacatctccctcagtttcaggagaagatagttttattccttgcattgtactctagttgaaaagaagggtacattcataactacgtttgtctgaaaatggactcataatccttaccaaaatgcctggaaaagcatttcttcattgtagcatatctatttgctaatgg

SEQ ID NO: 129230 - DNA, 1040 bp, Homo sapiens
tacaggaattcaatttcaacatcattattaatcagactggaattgatgatatggaatactactttgctagataatgtattagctaggtgtttgcttattggtgtctgttgtagctgcactgtggcagcattgttttgtagctcctcccaggaatctgtattccatgacttgacatttactcatttgaaggtgaatcaggtaccagtttgtagtacaccgcacatcaagtgcattagaccatctctaacttggcatcacagactatgttaattagtacacatgttttgaatattattgaataggccactaatgagtttctactgtttggatcttggaggcaactgaattttttgtgatgtttcccagccagaagctagtgatactgatttggagtggctgattggcatttgaagtacagcatttggcaaatgctgttgctaatcccaggtccatgcagtccagcctcttacatttcagagtgtgcatgttgagatcttgaagtccagccttgccagtgtagacacaacagcacatttgtagactttttgtccccattcttgttcctcttagtttatggatatagggaatcatggtcttatgcttttgcttaggaggaatagggttatatcatgtgattcctaataacattcctgaaaggtctggaagctttgagatgaatgactacctttatttaaaattagacacttcacaggcttttttctgaggaagcaagccctctccaaaagtggcccaacctatgctactcactaccagctgtctatcagaaagtctgttttaatagtttgttgcaatgttgactccttatcaatgtaacttgaatatgaatagtactgttcttttctctaaatatttgacattgccttaattcattcaatttgataaagcttttctattttagatctgttagaggcagagatttggcaggttattctttgggtgaacaggtattactgaataatgctggaaaatattggtgctgccttccttagcagcaaccaagatactagttttgtggagcc

SEQ ID NO: 129231 - DNA, 1048 bp, Homo sapiens
ataaaagagcaaaactaaacatgtctccaggaactgagctgagcagaaccaaaaggaaatgttagagatgttttctaagttcacgtgagtagaaagctcgaaactcagaagtctcctgggtggaaggcggaggttgcagtgagccaagaccatgccattgcactccagcctgggtgacaagagcaaaactccatctcaaaaaaaaaaaaaagagagagatctcctgggtgaattgtccctgctaaagctgagtgatgggtgcagggaggttcagtgcactgtcttctgcacttttgtgtgtttgacattctccaagatacattgttttaagtccatggaaaacagtatctgttttgtaaaagtaaaatagaaacataaaaagccagaagtatttctgaaagatttggggcagtttttgttagatagagataataatataagtcaggaagctgcctcttaatctctcagctaacaaggtaggaaatttgtacctaggttaagaagtcatcctgcccttcagctcttgtacattgaatcattccattacccaacacccaacatagagccaatttttttttcaaatacatcctccaggaacacatttctttgtatatacacaacataagaatagctgaacagcatatgagagatctgcaaacatttattgcatcttgattatatgccagacactgatgatagaagccattgactttaaagagctgacatcctagggagggagacagacctgcgcagtgtgattactaaaacagtggaactctaattaaggcacacagccagcctggagagagagtgctgtgaattctggcttctttgtagataggggaagtatctgcacaggtctcctggtgggggatgagtgggagggtggctgggagggccttagcagacagaatgggcggctgctgagggaagcgcccagaggcagtggctgagcccgcgtggtgatgctgggctggtttgctgatcctggacctagtcaactgtgccaggaactaaagttgaagggtctgggcaggaaagactttgt

SEQ ID NO: 129232 - DNA, 1979 bp, Homo sapiens
gcttgtaggaaccctccatttgtagccaacttggacagcagttgtaggcaacctgcagcccctctgcttgcaattggtgtctgaagttgggggcagtctctggactgagctcagaactggggggccttgcgctcatcagagtaggtagggtccaaattgagttaaattatagaacacccagttggtgtcaacagagaactggacagttgcttggtatggaaaacctacacttctcttcacaaaccacacttcatgagccagggccatcccagcaaagctgcttctttgacaccaactgatgaggaaaacactttttcctgttaagccttgtatacttccaacacttctgacagtagccacaagtgtaccttcgctactggggctgagtggagatcccattttttcccccactcttctctctttaaaacttctgggaaaccgtctatcgtttggcctcatctggagcataggcagctcagacagtaaatccacctcttctccttcacctgtagcacctaaggtggtgcctggtgttgccagtagggtagtgaatacgcaggctccaacacacgggtgcacacgtttgctgttgcctgtgagtgtgtgtgtcacataccctgagcttgagttaaaaatcagggaaagagtcttcttctctccacttagcagtttctatattttaatgcagcctgaattcaaagtaataatgttccaaacttattaagctgagattttatgtgggagagaatttggtctctgggtgggagagagtgtaaggctgagggaagcacatgccgacttttgagaattgctaaagtgaatgctccttttttaacttcgatttttctgcaggggtcggcaccaggaattattatagaaagatcggctacagattacaaggcccgtacatggtgaagatgctgaaataatggccacaccagtccactcttctgcagtatcctccctggcagaacacggagaatcaggatttcttaaatactcaacagagaggctgagcagagcaaatggggggcttcaccctcatcccgcagctgcagagactggaaactgccttcaaggccacggctggtcatctgctgaccacaccccagatccgccctctcctgcgtgcaccccaaaaaatcacttgcgtttttgaggcttaaatcatctatccagtttctacattttgcatgaggcctgcaggtggcctattttgactcagacggtgaaaaaagcaaattaactcatttggacaccataactcatgcaataaaactgattgtcattcgaggagcaaacttaagagtagtttatttatataccctggggacagaaagtcaggttgaaacaggaaaaccaccagactctaatctcagccctttaacgacatacgcattggagcgcaagttaggaaaatgagcttttgttttcatggaaatcattctgattacagtgctgatgtttagaaataaatagcagtgtgactgggaaagaggaattgcagttgtgggggtgtgagcctggcagcagccagccagcagcctctcccaggcgggagtctaccatccgagacggcgatgacaaagagcttcattccacattctttgttatctctacttcccaccctcttggcaactacagagcagtgtgggcagccccaagtgtggtccccagagagcgtttggctttcctgtctgtctatcctgagcgggtggagtctcaggttgtgtgcccctaaatcaagatttgcttccacagaagccattacttgcaattttttttttttttctgagaaagtctcgctgtgtcacccaggctggagtgcagtggcgcaatctcactgcatcctccgcctcccgggttcaagcgattctcccgcctcagcctcctgagtagctgggattacaggcacccgccgctgctaatttttgtatttttagtagagatgggggtttcaccatattggtcaggctggt

SEQ ID NO: 129233 - DNA, 1073 bp, Homo sapiens
tctggtggctcacacctgtaatcctagcactttagaaggccgaggcaggaggatcgattgagcccaggaattcgagaaaagccttggcaacatggtgaaatcctgtctctacaaaaaatacaaaaatgagtcagatgtggtggcacgcacctgtagtcgcagctatttgggaggttgaggtggcaggatagcttgaacctgggaggtcaaggccgcagtgagctgtgatcgtgcgactgcactccagcctgggtggcagagggagaccctgtctcaaaacaaacaaacatagcttttgaaatcagacacatttgggctcacattctgagttctgtcattttctagcttcgtggccttgggaaaattactcaccctgagattcagtttgctcatctgtaaaatgggaatgatgatggtatttataatctcatgggttatttgtgggggattaaatgagacacagtctgcgaaatgctcagcaagttgactggcacttaagtctttgataaatgatagctgttagaacattcctgaatgcacatcagtctttgaaaggccacggattacatataagggttcctgttattctcttgtcacttagatgtgattttatttcttgggaacatcctactgccttttcttcaaaagattctcctcttctgctggccttgaactaagtccagtctacctgctggcctgaggtggcgggggtgtgtgtgtcagccccctcagttgtgttcctggggcaggcagaactcaccagcacccggtgctgattttatcccttccttctctgaaaactcggagagtatgtgccagctgctgtctgcgattgatgcacatttattttgtcacttgggctcagaacgtcctcaccagtgagcagcttctgattaatgccgccaccccatccatttcaagaaaagcttcagagagtggcaccccaacatcctaagctgggactggggtgaactctcattcagcctgtttctccatctctctttcgtctcgaaactcattctcatgcccacagttattggggcataaagattccttaaatggcttcctccaga

SEQ ID NO: 129234 - DNA, 1065 bp, Homo sapiens
cacatactcacatctatacctataggacttacaaaaagttaagtgcattggctgtggattacgtaaggtctctttactgaattgcctctccctccctcaacagggtgcttggtgatagttcccggctcctatgcaaaggtctccttgattttgtttaacctctgcccggtctccctttgaattagaaggctacacaagtacttcacctttccctaattcatgggcacttcagtcatttccagatcctttactgttaaaaacgctgataccaaaaaacattgctgcacagacctctatagcacctgtgagttttctctggggtaggtactgagaaagtggaactgctgggccgtagggttcttgagttgtacattgtaacaaagatgcattatggggtcagttcctcacttagagttactgtgggacgggggatgcctgccctgtgctcagacattaagcagttatttgaagacaagggggcaggatttagagtgtgctaggtggatgctcaccggcctcacaggtcgcacataccattgctggtttgtgggaagggttggtattgggaagggctcttctgggcctcctagttaattctacctggttcccgccccccaacccctgaggactttgacccgtatgttgatagtggttgtgtggaaaagaatcacaggccgaacgggcagcccgttgtggactctggatgggaaattctaaactcagttcacttggcctggagaccgtcaccgcacctgcggttcttctccaggctgcctttgtaatccagtgtggcttaaacactcaagcaaagcgtgaggcgtttggaagcatgatgttctttaaaggcatctagaatgcggccacgtggctgttattagcagtttatgttaattacagaagaatggcatgtgccactgtttacgattctggccttcatctctatctctctatagaacttgtggaaaacatgagaattaatcctatcagatcaaacccatgcatttaggagccagtgtggcaagggagggagtggctgtgcccttcccgaagacagctttgtggccg

SEQ ID NO: 129235 - DNA, 1054 bp, Homo sapiens
ggatgaactgtttttggtgtctcagggtgctgcagatgtggggaggtatagagtgggcaaagccttggagttaggaaagtgtaaagtctatgattgtgtgagagagaagaacagagggttcttgttagagattagggagaaatcaagttgttaaagtgggctggggtcacatatagggcaaaggttgtaaaccggtggccagggagtgttttaagcatatggatgtgttctagtttggactacataaaggtgtttaaaaattgggggaaaaaatacagaaaaatctctggatttgcagctcttttaaagagtcagatctggtgttcatctcaagctgagaaggctgtcccctatggacaggagacaggcttgtggtccccgggcttccttttgcctcagtccagtcactttccattcttcacttagtcctgtaggcgttttgctttgcgacctgagttttcaagagactcgaatgctgggccaggaaattcgggattgctgtcatgggctctgggtggccactgaggattccgggtaggagtgtggcattatggaatctgagatatttctgtgcaccggatttgttttaggcaagtcaatagcactttttgaggagctgctggctgggactttgaaatatttttatgatgatgggaatggaattatagagggctttgacctgtgttctccgtagtaaggcaagtttcaagtgaccccaagatttctccagcctttccattttccgcttctggctggcagggatctctgagagtgatgtcgaggtcataccttggtgaggtgtgagtcacagccatcaggtgccatatgacgtacaattctcaggagcctggtattgatccaaatggctcccagcagacgaggctgatttggggtccagctgaagtgactaagttcaggactctgtgacctagaatagtctgatttaccacccaagactaagagctcgtcccagatgagccactggtgagagagactgacaaatagtaccctgatgtttacaggtgggactaaaatcagttatttaaaaatactg

SEQ ID NO: 129236 - DNA, 1027 bp, Homo sapiens
cccgcgccgaggagccagcagcagcccggcgcctcctcctcagggatcgttcctctcgtcgcggccacaacaaaagccttgggcgccggactgtggcgggctgcggagcgggggcccgggcccgcggtggcggctgggggcctcggggacgcctagtttgaggctgggggctgagggctgagggctaaggggggagctgccccgggagactgttaaccctgtccgccctgagcccgcggctcggcaacctgtgcgagtgtggaccgcggttcgctcgcctctaccccggctcagaccctgcgcggcggagagaggggcccggccggagccggcggcagcgcggggtgccgggggccgtaggcggaagacaatgctccgggggctcccggccgcccgaagcgcgcgccgccaggctcccggccccggctcgggtcagcttcgggcccacctttgcctgcccacgcctgaaagtttcccctcccgtccatcagtttgcaaagtccttgctcccttccgcgagcttcccccggctgcctcctccgcgggctgtgggtttgccgtggggtggctgctgctggatccccgagggtccgcatctgaaatgaagctgctgtgaaatagccagcaaggtgaaggagccttgtgtcctttcaagacatgtaaacatcttcctagcggtgttttacatcttaggagtcttgagttcgatccctctgttgtaagagaagccaagggtgcttttcttggctttgtttttaagaacaaaagcacgtgccatgaattgaggcagaggagtagatttcagatttagagagactggctccatgaaggaggtccggcggtttgcccagtgtagaatgactctttgaattttggttcccgtctgggttgagggagatgcagcagcagcacagcagagtagccgcatcagtgactgttacggggaagtgtttagatacagcctcatcttagagaagtagttctgatcgggaatgcttattgatgggaattgagttactttgtaaag

SEQ ID NO: 129237 - DNA, 1101 bp, Homo sapiens
ttttaagggagactaacctaagtctaagaaaatttgtaagattattattcatagattttgaaataaggagggcatcttatatattccaaatatttgaaaatgctgtagaggttgaacaaaacattttttgcttttcctctgagtacacgaggtctaagtggttgaagagagagaattggtataggctatcagattaggatatataaaaatgggtattggtttaatacagtaagttggttccaggcatggtagtctttgctatgtattaaagctatcaatttctcacagaaaattgaactagaaacatttttatttctggtatcattttaaatcataactcctttgggaagcaaataggttaataagaagcaggtcataaagatgtttgtcctgacttgggttcaacttttggctctgccatgtagtaggtttaagactttggacaggttacttaacactcctgatctttgttttcttcatttgtgaaaaggcagtataatgatacaccttgaagggctgttaggattaaataagagatttatgaagtagctagcacaatgcatcatacgcaataggtgattcacaaatattaattctactccaaattccatttctaaatcatctaaagggaagtactagaaacaccatgtatttgctccagtgaatttgcatccctcattgtaggttcatggggcattcattcatagtgatagcatgataggctctctctgacttctcaaatatgcacaagtagtctagatatttcagtgacaatggggttgcctctgtttgaatttcagacactgacattctggggagagcacctaagtgagtaatagtttctaagagaaggctctaatgacttgaagtaatgttgggaatagttgcatattgcatgtttatcgtatcaggacagtgatgccactgacagaaagaataatcaaacacagtttgagagtgtaacgtttctttaatagcaaatgacgtggaaactcagcagacaacactgcctgctcagtgctgctgatgactctccacctccatccctctactgatccaggaaccagcttagcaggcacaagtaattggagcaaacccagc

SEQ ID NO: 129238 - DNA, 1051 bp, Homo sapiens
atgaagggaattcatgacaacggtctccttagttgcataaatgtctgcaacacaaccttgttttctttgtctcgaggctatcatactttttcaagacatacaactagtattttttgctcaactgtcgaaaatctagttgtatggaccacaaacaagatatcaccatttactttatttctacatattacatttgctctccaggaataaataaggttgtgagtgccagatttggaaatccaaactgttagatcgtgatagatttccccataagtaaaaatagttctcatcttgttttgttttttaggttcccagattgtgatgagccatatcctcgacttgtggatctgaatttagctggagaaccaactgaaggagccccagtggcagtgcagagagactatggtttttggtgtccccgagagttaaaaattgatcctgatctgggttattcttttctgcatgtgcgtgattgttcacctccttgtccaaatatgtacttcagaagagaagaactgtcatttgctcgctatttcataggattgatttcaatcatttgcctctcggccacattgtttacttttttaacttttttgattgatgtcacaagattccgttatcctgaaaggcctattatattttatgcagtctgctacatgatggtatccttaattttcttcattggatttttgcttgaagatcgagtagcctgcaatgcatccatccctgcacaatataaggcttccacagtgacacaaggatctcataataaagcctgtaccatgctttttatgatactctatttttttactatggctggcagtgtatggtgggtaattcttaccatcacatggtttttagcagctgtgccaaagtggggtagtgaagctattgagaagaaagcattgctgtttcacgccagtgcatggggcatccccggaactctaaccatcatccttttagcgatgaataaaattgaaggtgacaatattagtggcgtgtgttttgttggcctctacgatgttgatgcattgagatattttgttcttgctcc

SEQ ID NO: 129239 - DNA, 1058 bp, Homo sapiens
tttactgaccactttgatctaaaattgcttgctggccggccgctgcggctcactccttaatcctagcactttgggaggctgaggtgggtggatcacctgaggtagggagttcgagaccagcctgaccaaaatggtgaaaccccatctctactaaaaatacaaaaattagctgggcctagtggcgcatgcctgtaatcccagctactcgggaggctgatgtaggagaatcgcttgaacccaggaggcagaggttgcagtgagccaagatcctgccactgcactccagcctgggcacaacagagtgagacttggtctcaaaaaatgaaataaataaaataaaatagcttgcccatccactaccacaccacacccacacacgctatcccctaccttgtgttttagttcttattgctacctgaaattgtaagatttctttagttcctatacattgatagcactgcacccttaccctgctctacagtgtaagttcaacaagggcagagaattttctgactatttgctgttatgtcttttgtacaaggtcatggtagcactcagtatttaagtgactgagttaattagctgtgtgaccttgcagatcagttcacttccctagagtttgattgcatctgtaaacaaagggatgagtaggataggatgtatctctaaggataggatttagactctagatgatcagtcatctagaattgaagacaaccttgaagtcatgaagttcaagcctcttattttataaaaagtgatttgacttatgtcacgttgctcaggccagtggtcttcacatcacacaattgttctaattctgcaatcaactctgattagctctctttatcttttttcattacaattcttagttttaatttttatgttctttgccttcatcctcttcatcgtattacttacgtaagtcacctctttacaaataattatttttcttcagttagtccttgttttctcaccatttattgagtataagccagtgtgatttgaagtctgcttcccagctctcattctttgccttgccacactccactgttttt

SEQ ID NO: 129240 - DNA, 1040 bp, Homo sapiens
attgcttattggtctgaaggaagattggtatgtatcttaaacttactattttgttgtctaggatagtgaatgagagccgacaggtactccaggaacctgattttgctcagtctctcctgagggatccaaatactcctatcataagaaagtcaaggggaacttccactcaaggaacatccacccatgcttcttcaactcagctggctatggtggatgatcaaagaagcaaagcaggaagcatccacagcaaagtgagcagctaccacggcagcctccacagatcacgtgatggcaggtgagttttgttagtagtgtagtttatttcataagctgaattatgaccatacagcttaagaaagaggagcagccaattctgaaatagaagtcgaacataattaagcctttgaactttgctagatagagttgtcccagactatggtcagacttaaagtcagtcagaattgtttagatttgatggagtaagcaatatgggagttattgcaggggattgagcagggaaaagacagggtaaaagtggttattttagtaagattaatttagtaaacaattatggaacacctactacatctagcactcttgctaggccctgagaatacaaagatgacttaggcatgatctttgctcttggtaagctcacagtctatttagaaagatagtgtagtcagtttgtggtttagaacatggatctagaatgataaacctcagcttcctcatttataaaatgaaaatagtattaatatctgcctctttaataatcttgtacaaattaaatgagatagcatacctaattccttggaacagtgcctatctcagtgagtacctcatatcagcttctgttattattgtaattgacaattgaactaacacataagtatgacagtatagttcaggaattagcaaacgttttccgtgaagagccagatagtaaatattttaggccttatgagccatatggtcttcactgcaactatttgagtctgctgttgtagcatgaaagcagtcatagacaatatgtagtc

SEQ ID NO: 129241 - DNA, 1045 bp, Homo sapiens
gctctttgaaaactgtaaagcattatgaatgataagggattaggttattgtggatttaagaggtgtgaggactgctatagtacattccttgacgtgtgttgaattcatgtatactttctttcttaccctttaaaacaaactgccaagaaattaggtgttgaaaaagaatattctcatcaggcagcaaagtcagttttctgatagtaataatttgtctattatgttatatatttcaaagtacatgtatgataatatgacttattcttcatgagagatatttgaatatttggcccaaaatgtttttcatttttctctgtgttcattgcctttctccttggagctggagttaatgctcaaagcaggcaggtctgaattccctcataaccgacaattagtaaacattttctctgaaagccaaacatataacaacttatttatcaataattcatgaagcttttgtctgagaatctctcctgcaaacagcatgagagaactaaaacaaacattcacaaacaaaaataagttaaaatagaaggtaccagtttgggctcgaagatgttgtcatccattgccatctgcattatattatcaactgccaaaatgttaattggttttcttttacaagtgggccaagtatagacagttaagtgaacatcactatgaaaatcttaactttgtgcttctagatttttagataatcatttgtattttctctattaaattgtgggtatgtatgggaatactatattgacttttcagttactttcagtaagtatcttaattttgtcccacaaaatttatgtaatattaatccatggttttaaacaacagtattcagtttgggcagcagttttaagtctaactagcttaaaccaatctgaataagtctggacagttttcctaccatatgtttaactttgattggcatatgataatgtttagtgttttcttttttcagttgacaactgagaaaataatagttctctctaacatgttaatatattatcaaaaggttttcaaaaagtactttgatttcagcaacttt

SEQ ID NO: 129242 - DNA, 1022 bp, Homo sapiens
aaagtgttagtgactatagcccttttatctctcttaaagagaaatctgcattaaaagcaaacacattgctgttagctcaaattaatgtcagtgagtagaatcttaagctttaaaacaaaagtggaaataatttaaattagtgttgatgggactattttgaggcaagagataccattaagtgacctagcttggaaatctgccccctttgcccaaacccatgtgatgtctgaaactactgtatattttcaatgaccttgagaaagggagctagtcatttgtatttatgggccttatgaagtcagggcctgctgatcctgttttttaagttcaagcgcaatgcctgaagcatcctagatctccttcaccctcattctacctgacagacagctaggtctgtcttccagctctttctcattgatactacctttacatatgaatactatccatgcttgttaaaaaaaaaaaaagtctttccccattttactgttacaatttttcaagagctataaaggtagaaaaagtattccttttcattattctaaaaaatatgtcatttttaaatagctggcacttagcagtttagttttccaaactttattctgaatcaaattgctgaggtgattctaaatgtctaatgttgatttatcatataaacatctaattagaaagtgtttatgctaaagacttgtattttgtggcattagttcttcatgtttcttttttatatgtttattaaaattgttcacttccaaatgagtggaaaagttgctgttgttgggatgtacagggcaagtgcacttggttagagcatgaactgggaatttcacattctctgatgtgctttgcactctgctcttgtagatttattttgtttacagtagactgatgtcagtttttgtaaatgttttttcttagcactttaactgtgagtgtacaaactgattttaaatgtagtggttgtatattttggttataaattggagatttttaataaaattaaataattctcttttctgtcatta

SEQ ID NO: 129243 - DNA, 1031 bp, Homo sapiens
tattttatttgatgaaagatcccatagctaaaaaccattggcttagcccaatacttccattttgcagatgaagaaactgtgcatatatgtacctctgtgctctggcacacacattgattaatcctcaactggcgaatgaccggcatttgcccaccaagttagccaataatcaacataaaacactcaaaaataccctcctcccttccctcagaggcgaaccttaaatttagcaacaatcatttaggatatttttccatcttaattaagtctttggtatatcttaaattgtcaggagattagggactttattttgttcactgcctggcacatagtagataatcagtgcctcagggaaatatttgactttagttgacaaatattacagtttggacaattaataaatatgtatatatacatatcttcatcacataaatggctagacccttcaatggttagagggagatgattgtaaaaaagggctcctgtttttctgcataaacttagaattaacagtagtgtacagaatataatgtacaatgcaatcttcactgattttacagcatctggagatgagtgttcagttgtctggaagactttaagaggaatattcacaactggagtatttcggagaactagggtctgacaggatgccataggagaactgaagaataggaattgcagaataggacatattttgcctgcagagatttggaggaaacaggatgcctttttttcaaatgtctacttctgtgatagaattattgtatatctgtagaatagcatcaatgagtgaaggtacaatttccactcaataaatagaaagtcttttataacaattagagttgtctcaaaatgaaatggaaggccaaacaaaaaaaaaacaaaaatataaaataaaaatgaaatggaaggctttacatagtgagcttcctgctactgaaatcattcaagcagagggttataaaggatggtgttttgaagaaggtctgcaccaggttaagctggacttaggatttctaaggtctcccaac

SEQ ID NO: 129244 - DNA, 1050 bp, Homo sapiens
taattttgtattattagtagagatggggtttcaccatgttggccaggctggtctcgaactcctgacctcaggtgatctgcctgcctcggcctctcagagcgctgggattacaggcatgagccaccacgcccagccccagccactcctttcttaaaattgtattccagtcctctcctcctgccttcgactccctggtttgtctccttaccttgcataaaggtccccacagcaatgcaacctggagagtcctctggcagactcaacttgaaggtgtgggagcttcctgtgctggtcagtctgttgacccagacaccagatcctctggggcggcaaggatgaaagactctggttgtgctaatggagctccctcattgtttacctgtcagagaaaaattgcgctgaacaagttaagtaggcaaagaaaacttttttcaagactattgcattgggggtcaagactcaaccctgaatataacagtggcagctggggatttgtagacaatggacaaggtgcaggggccagtggatggaaaagtaatgcaaggaacttggtaaagtaacaagggtgggggattcttgcagaaccagattcagcaggccaaggatgaggcctggtcaagaagagcattcagaggagcctgactcaagtttggtcaaggaccaggagtcactgttggcccctccttcattcaaggtactgtgaatatttctgttcaatactgggcctcttggccaagtggctaccctcctcactggacttgatagctcaggcctctgatatttctttattttgcatggttccgattggtgaggtttccttaaagcttactcagctgtaatgctttggcaagcagaatcaaattgtgtttaagcccaggctttggaatcagaagcacttaggttcagatcttgtctctgccacttattagctgtatgactttgggcaggtcacttaagaatattttcttcccttggtgtggggggaggggggagggacagcattaggagatatacctaatgtaaatgacgagttaatgggtgcagcacacc

SEQ ID NO: 129245 - DNA, 1003 bp, Homo sapiens
aattcagaagtggcttagctgggtgttttttctgggtggtggtggtggtggtggtggttttgttttaacttttaagttcaggggtacatgtgcaggtttgttgtagtaaacttgtgtcatgggggtttgttgtacagattatttcatcaagctgggtggttttggcacagggtctttcatgagactgcagtcatctgaaggcttgactggggctggaggatctgttcccaatcttattcatgtggctgttggcaggaagcctcagtccctcacctgggcgtctccatagtgttgtcacaacatggcagtgagtttctcccagagtgatctaagaaggagaaagcaaccaagatggaagctgaaatgccttgtgtcgtttaatcctgggagtgacataccttcacttttgctgtgttccattggccacacagatggatcctagttagggtgtgggtggagacttcacaactgtgtgaataccagggggcagggatcattgggggccctttcagaggctggctgccatgggagtctccaaaaacattctgtattgcaggggtgaagttggggggaagtgtatgccttaatatatatgtgtgttgttagacaggctagactggtattatagttaccagacttttaggtttaatagaccagtaaaataaaaaataactgggtaggggataccaaaattagtatatttcagtgttttgttgagtgagaaagatacagaaaaagctgccgttgaccaccaccatggtcatttcataaaaacacattttaacataaaaaagggagaataacataatctcagaataaagtctaatcctttcaattgaatcattcagctttgttaaaaactcacaaacttgtctgtgcttttcgcatttaactgtggactgatgaaaacttcatcctagcttggtcaataaactgttattcaggaatcactgagctagaccataggatgctccagtaactttcaagatgactgtgaagatca

SEQ ID NO: 129246 - DNA, 1057 bp, Homo sapiens
aagcttgcacctacaaatgttccctaaggcaagcataaaggcatctaacatttaccctaaattatgccagtgagtagcaaaaatgtgctcagttagacgcaacatgtcacaacatggtctgactgttggaagaacttagtgcagggagagctatacccagaggaaagaagtaaaattaggcagagtgttgatggctgagttccagtgtcacatttatatacagctcaatgactctagaattgtccttacaccaaaaaaaagttattcatagattcaaaaaatcaactgctcactactttcatttaaaaatgccttgtgtgaacaaggcgttccaactgaaaactggcagaattcatagaggttcttaaagaacatcaattagattcttagtcaaccaatttggctgtaaaatcaaaactgaaagtgcaatttccaaaactaattatgctaaatacttttaaatatatataacttgataataacatttggactttatgtatggaaagaaacagtagtttccaccacaggaattttcaaaagaaaaatatataggttttaaaccaatttatgaagatctgcaataagattttattgaagagaaagttttcccctattttcctaaatattactcaaaattaattctcaacccaaaaggtgacagcatgattctagtagggtccaagtcaatcccagaacacaataataattgatcccttccccaacccaagccttcagccttgcaaacactatgccatagatcaaaagtggaaccaaatgaaaatgtgaccatatttctacaaatccatcaatttggagggcaaaaaaccaacaatccaaagcccatctctaatggacagtgttagatatttcaccctcatgtcaaaagaaacatgtataattacatcatctaggttactaagaaaagcatatctttaaagtgaagaggtatttagaaaaaggatacttgacataaatgatgcaaatactcaaaaaatatattaaatatctgtgaaatgtgttaactatgaaagctttttaaaagcacatgctgagcctt

SEQ ID NO: 129247 - DNA, 1760 bp, Homo sapiens
gatttacttaagagtcgtctttagcatttcttgtcactttgtcctattctttgtccaatttaggtagcttcatttttactggcagagctccccgtgctttcttttgtttttaaaggctttgtgtgttgcagccatgcagactctgcagttttctgtattttgttcggcagtgagtcctgcattctgatacagtgactatcgctgtgacctgtgtgctgggatagtaactgcggggcacagagtctggagcgaagcgaagccttctcagcgacttgctatttagcagagggactttgaaatattttgtgatgaaagaaaaaccgttttcttaaactgttatttgatgtgttaaaaataccttatcctgtgggaatttcccattcgtttgcttgtggggagccggaggaatcataagaactcacgagcaagagagaatcgagcctaagtgctttctggaagagtcagaattgtggctcttcagacttccggaaacgtgcttaatgtccagagatgtgaggggcatacctacctaaaaaatgattgacaggcgtatgtctgtatccctccacttctcgcttttctagtgggggaaaaccctgttaatacttggtgtgtagttgggatctttcagtgattaggcctcaagagttttgacctcggagtaaaaagattttaagggaacagtttggagagaagtaagtcgggccaggccgagcatgggaaatgtatttctaggagagagggcaagtccagagggtggtttgaagccagcagaagactagagagagacctgttcttttccgcagggccctaggccagctgtggattggagggttatgggtgatgaggggctgcaggagtgatgcggagtccttgtctcagttgagactggtggtcttctggaggagggtgggagggattccctgatgtagactcaggtgttaggagaaaaatgaagtcccatcagacctactcttggtaaaggttcgagcgcctttgtatgttactctagagtgaggcgaggaatatgaaaccaggacgtttcataacgtcctaaaactgcctactccattcgctggttattaagtttagctcagaaaacttctattaacatatttctattttatttttgttaccccttcatttcggcaactatcatttcgaagactttcaatgatagggcagctgactgagagggaagaaaggatttttcacgtttggaggtttcatggaaatagcatagcccaggcagagagagtttgtgagctcaagagggacagaggtgggctcacctgtaagcttcatcttttcttttcttgcctgaaccagttgcacagtccttttaaattttcagtcattcagacctcttgggtgatgttactagggagaagagaagcaggatttaaaaaacctgtgatcttgaaaatagaagaggattggggagactcattactaacatacttccctctcccacagttaggccataaagtgcagtgtaggatactactcacatgcacccaaatgacccatcaaaagtctagaagtggagccataggaagatgaactgtagaatctgttggagagtgaaagcatcatatacataatatataagaatgcctactatacgcagccatacaaacggaatccataactgaatgagcaaagctgtattccagtgaaactttatctacaaaagcaggcagctgccgcttgcgggtgcctgccttagagtgccacccctcacacacatgcctttcctt

SEQ ID NO: 129248 - DNA, 1001 bp, Homo sapiens
tcttcaagactgacatggttctctttcttttgcaggcctgattgttggcaaaggcatcataagaagctggcatttatttctgttctaacctattactgtataactgtgaatagacactatgcatatttgttggtcagcaaaaccaagaaacaagagctatggcatttgaaaaagtctgtctgattccagggtgtttttcctgggtttcatcatcaggtacctcctccctttcatctcagcaagaatgtggcaccttttatcgtttgataaagattaaggacatgttctttggtcaacagccagaacttaaaatctgctggaatagggtcagagaccatttcagctgcagctgaggaaaatgaaatgttcattttatttggtgccttgtctggggagcacactaactcttctggaaacgtgtcagtgaaacagagatcgttttgtggaatagcaacccatggttatggcgagtgacccgacgtgatctggggggcaggctgcagaggactcatgacaggctataccatgctgcggaatgggggcgcggggaacggaggtcagacctgcatgctgcgctggtccaaccgcatccgcctcacgtggctcagcttcacgctctttgtcatcctggtcttcttcccgctcatcgcccactattacctcaccactctggatgaggctgatgaggcaggcaagcggatttttggtccccgggtggggaacgagctgtgcgaggtgaagcacgtgctggatctgtgccgcatccgggagtcggtgagtgaagagctcctgcagctggaggccaagcgccaagagctgaacagcgagatcgccaagctgaatctgaagatcgaagcctgtaagaagagcattgagaacgccaagcaggacctgctccagctcaagaatgtcatcagccagaccgagcattcctacaaggagctcatggcccagaaccagcccaagctgtccctgcccatccgactgctcccagagaagga

SEQ ID NO: 129249 - DNA, 1084 bp, Homo sapiens
tcatcattacccccggggaccctcgcttggttatttcctctgggtgtgcaacacggctcttcgaagccctggaagtcggtgccgtcccggtggtgctgggggagcaggtccagcttccctaccaggacatgctgcagtggaacgaggcggccctggtggtgccaaagcctcgtgttaccgaggttcatttcctgctcagaagcctctccgatagtgacctcctggctatgaggcggcaaggccgctttctctgggagacttacttctccactgctgacagtatttttaataccgtgctggctatgattaggactcgcatccagatcccagccgctcccatccgggaagaggcggcagctgagatcccccaccgttcaggcaaggcggctggaactgaccccaacatggctgacaacggggacctggacctggggccagtggagacggagccgccctacgcctcacccagatacctccgcaatttcactctgactgtcactgacttttaccgcagctggaactgtgctccagggcctttccatcttttcccccacactccctttgaccctgtgttgccctcagaggccaaattcttgggctcagggactggctttcggcctattggtggtggagctgggggttctggcaaggaatttcaggcagcgcttggaggcaatgttccccgagagcagttcacggtggtgatgttgacttatgagcgggaggaagtgcttatgaactctttagagaggctgaatggcctcccttacctgaacaaggtcgtggtggtgtggaattctcccaagctgccatcagaggaccttctgtggcctgacattggcgtccccatcatggtaatagagaaacgaacagttcgttttggtgcatgaaatagtatttcactcttaatcccttttccaacttccttcactttagcaatcgtaacttctagcagaggagaatacatgcatactcatgaaaaacctgtatagattcctttcttcctgaagggtttgcttgctgctttttcaagccttggcagttctgtggctgttactcacttcctaaatcgaggatccccaaa

SEQ ID NO: 129250 - DNA, 1033 bp, Homo sapiens
agtaagaggaagagttggaatttgaacccaagcttttctgattggccccaaagccatgctttctccctctgtaccagtgcttctccccatttaatgtgcacaggaatcccccaggggcatgttaaaatgcagattctgactcagtgggcttggggtgtgcctgcactcctacaggctccggtggtgtgtgctgctggtcttcgcctcacactttgaactctgaagctccttgctatattcctggtttactaattgtgctgtagataatccacctgaaggttaacccacaaaactgataatctacaagccaatattcaagaactgaagtggtttttcttcattttaagctgtgtgagggggagctttgtttggctgaattggcagaatcagttctgtactgagtgaatgctaggtgtgttaggtaaagtgaatgttcgaggggagtttgttgagggagtttgtgaacagctaccatatgccgtcatttccaaggcggaccttattttacattttgtcatctctgaaattgagatgtgtcttacaatggatggcctcttaccattgctgagcttgccattcaagtccggccccttcttgccaccctcccgccctttggcgagtggaaccgacagctgctaaggtgagcacttggcatctgctctccttgctgctctctcgtctgacctaggcctcactcggtccttcgttttgtcattgtggactctgagcttaggataccctgggctgtacacttgggaatttttatgctggtcagacatgctgcagggcaaggtggatttctcggtctgttgcttggcttggacatctgttaactgtggtggcgaatctgttacagatccttctttgtcttgagttgggcaggacctcctctggggctgaggtgaagtcttaaagaaagctctggccaagagtgttgactcttgcctgtaatcctgtcactttttttggaaggctgagggagggggaatgcttgagaccaggagtttgaggccagtcaaggctacatagccag

SEQ ID NO: 129251 - DNA, 1022 bp, Homo sapiens
tttgggatttatatcccaaaaaggcgttagaattgggagtcagaagtgacagactcatgaggtttctgagttgggttttaaaattaacaagcatgctgggaattccatagccattggaatctcagatccactctgccaccttgtgttctcttgggagagttgtttttaatttccctacatcgtgtttattgcgtgtataaaataatcttcagcttttgcttgattcacaagaaaattagctaactaatgaatgaagcttaaaaggtaaatctatatacatttattgaagtataaggcagcttttattcctgaaaggcatatgctagattttacaagcgcggagatcaggcaaaattattcagtaaatccagccatggtctccttggacctaaatacagattttgtttggcctttcataacacagccttaatttttaatgtttttccttcctcatcacaggtggtccgtactgagaagaacagtttgaacaaccgattcttaccctggaatgaaattgagacagaggccatcctgtccattgatgacgatgctcacctccgccatgacgaaatcatgtttgggttccggtgagagactaatttccaatcaaaactttaggttgcaagtgacagaaaacctggattaggctgcaaaatgaattttttggctgatggtaactgagaaccccttgcagatagtcagggctgatgtaggacgtggctggatgcaggctcgtagatggcgttggaggagtccatctctcttcatctgtaggctccgctctgtgttcccacaggcctttcctctgtggccaggaaggtggaattctttgattggctagaccctggttacctgcctgttcctggtgctgcaggtgtatcatccttaaatccaaaccacatgggcagagagtagaggcaacgggtagggtagttctctaaaggaaataggagggttttgtttttagaggaatgggaaggcaaaagtgacatgttgctgtgtgttggagcaatggaacagtg

SEQ ID NO: 129252 - DNA, 1041 bp, Homo sapiens
cattcatgtttgagatttagcctctggtaatggagctggtgaattatcattgctgtctatacatcctaaccttttcctaccctgacccttttctcatgcatttgggcatcctttgatctaaaacctttctcttattaatctccccaatttgcttatttcaccttaatgggaatgaaacagacctaagttcaaaggaaagggtaagtctaagaattctttcttctggcaaagatagatcttgactcacttcaacttaggtagccaagaaagaggcagatacaatcaatcataagggacagaaaaggtataccaagagacttgagagcatgtgtccatacagaaaggaatacacaaatggccagagcagcgttattcgtaacagaagtgcaaacaactcagagggataaatactgtggttccattatgtgaggcccctaggtagtcattcatagagacggagagtagaataggggctgccgggctgtgggaaggtgggagtggggattagtgtttaatggggacagagtttccgtttgggaagatgaaagagttctggagatggatggcagggatggttgcacgacactgtgaatgtccgtaatgccactgaaccatacatttaaaaatgattaagatggtatattttatgtttgttttgccacaatttaaaaaaaatcagttgtctaaaaaaacccacctagaaggctgttacattgtgatagaagttgtgatttctcctcttttggattagattagatgcttctagacttattaggagaggaactctgttgaaataaaatcttctgtgtcttaggaactgaagttccatgtaagtgatgagggagtttgcaggcagtttaaatctctggcagcctttctgcaggcctgtcaggtcctgtggagcttaaacgctttcagttctccaatttatcctgtgaaactggggaccaattttatttgttctaatttacctataaatttggagatgatatagaagtttctactgaaacatactgaagtctccatttatttcttccattt

SEQ ID NO: 129253 - DNA, 1163 bp, Homo sapiens
tgacattctgttactaaagggggtgatgatggcagtttgaatgggataattcctcactgcagaagatccacacgacaggatgtctcgaatcccctgccccagtccctaagtgccagtaatacctcctagttactgccacacccaaacagcccctccatccatgcatattttggctgaaagccaacaacctgtgtcttgtaacagagcatgtggttctttttcttcccctgacagtattatgcctacctgtattcttatgtgatgccccaggccatccgggacatggtggatgaatacatcaactgtgaggacattgccatgaacttccttgtctcccacatcactcggaagccccccatcaaggtgaggtcccaccactggtggggctgtggatgcgtgcatgtttacttcacttgttttgcagtagtgcagcacgtaactgcactgtacctcagagtcctcatttgtacaatagggatgatactacctacctcatcaaaggattgtctgtgagcttaaatgagttgttactacaggggcccttcattcctaagggcaatggatagaaatcagaaggtttggaacttgggtgggaaagatgttgcatcattatttttattaatgtcttactggaataaagcattttcttcagttatgaaacaggctataattcataagagtatttgtagtaactgatttgtcaccagtagaaatcactgatatcttcatatcacaatacctttattgcaatatctgcaaaaagtattgtttgtatttgttactgctttgaattcacggcagttactccctttcccctagatgttgtgatttaatacattaagaaaagagcatgtatgtcactgtgttttactgtaactcgtttcctttgtcatcctgtgtattgtagtttatatacctaaaaacattactttgaggagtctacagtcttgaccagattgccaagccagaggcacaggcgatgtccatcaaacaaaaaacttaagaatttctgagttaatatatgtaaagctctaagaatagtgcctggcacataagtactatataaattatttgctcacaaccaaaaataccctcagaattctagaagttctgagggtattgttgtgtttttttcttggaggtattaacacatacactcagtg

SEQ ID NO: 129254 - DNA, 1016 bp, Homo sapiens
cctctttgactagcccctctttgggtagtcttcaatacccaaagcccctctttgggtagtcttcaatattttgattcaaaacattgatgaaacaaacaactcggtacctacctatggctctgcaaccaagtacatactaggagtagacttactgagacagctgacactacacacgttaaggcttttggcatctgagaagcgtaggccatctcaacagaatacctgacaatgttctggagacatctggtaggcaggaggcctggggccgggctctggttcctgccatgctctgcagggatgttgcccctgaggggatcagcgtcttcaccatggacatgggagtgtgggatcggctcagctgcaagggttctgtcagtattagctgggattcccactctgtctctctctcccgtttccaggtgacctcacggtggacattccgatgcccaggatgccctcaggccctgtctcatgatgactcccacttccacgagcggcacaagtgcatcaacttcttcgtgaaggtgtacggctacatgcccctcctgtacacgcagttcagggtggattctgtgctcttcaagacacgcctgccccatgacaagaccaagtgcttcaagttcatctaggggcagcgcacggtctggggaagaggatgagcagagggaggaagatggctcccaaggttcctaggcattgcaggaccttgggcacatctgctggtgggtggcccagagcctctgctggaaggggcagcaggaggagtggaaggaaaccgctgcctttatcttgaagtcagccacactgggcctggagccctgggcggagtccccggggttccccacacagggcactgactgatagcttacactgaggactgtggcgactctgcagagtcactcacaccgttcgtacgcccaggacagctggttcgtggtttttacattcaataacaactattatgattatttaaaaagagaaagtttcagatttgccattcaaggcttatttatata

SEQ ID NO: 129255 - DNA, 1991 bp, Homo sapiens
cttgcctccgtacttatccctgctctcccatttctctcttgtttgagagagaatgaggaagcaaagagtgagaaagaataggggctgaagacgccactcccagatggctctttctatcctgctcttctgttgaaacacacgtgctgtgggcctcaggcgtttctgaagtgctctttcttggattggacaggagatcagcagcgtgcacatctgctgtggtctgaagtggtttgcaggtcagcctcctctccctagtgtagagcaagccagtgtccttcgaggaacccacccggctggccgggaagttttacagcaaggcgcctgccttgggataattccttggtgaaattcaccttccccccgcctctgtctggagccccatcctgtgttatctgtggtttttggacccctaatgtcagcttggctgtaggactccccgaggtttggtatgtgctagaacaatgggaggctgtgatttgctgtgtaagctcacatccagccttggaatctaacgggcattcacaacccgagttaccactttccactccctgcttaggattctgttccctgggctgaaactgaaataagctaattttttgggtcacggtggcagtaggggaacctaggagggtgtgagtggcatttgtcagggatttagcccatgacgtgtttcttgaaccctactttctggaagtggagttgactctggaagttttctagcaactgaacaaaagctcaggtttgtcctggtcatgcacatgccttaagccagttccgtcttccctagaccttggcatcctgtgcttctatttcttggaatacgttctcctctgacctgcctgtaccacgtgggtcctcttcaagtactgttttgaagctgggctcttttgtgtagctcccacccacctgtagggctagctcggcttaagggaactctccccattggcaaaccggacccggccgccgccaggactgtgtttccaaaggttccccgcccccaaccccagcatcagcctgtagctcccctgctgaggcagtgtggttatgttcccagcagtgggggtcagacgcccttcctcagaactttctagttgccctctacctgactcctgacttgtattccttttagcagtagccttcttccctcggggagccaaagagtgtggtgtgtggcgctatattgtggctgctatttcatctggtttcttttaatgtgaggaactcacatactgacttcagtgggactcggtgagccggggccgtctgtgtggtgggaccccctttagcgggactcagtgagctggggccgtctgtgtggtggagccagggcctctccctttagtggagccaggttgtcgggccccgaatgtcactggtggatctaagaagggctgagtggtctgacaccaaaacatgccgcagggagggctgtggtgccggtgcttccaacaaggacagccctccttgaccctgaaaggaacactggcttgaaggactgcagacaggctctgaggggcacgccctcctcagcgagaggcagcaaggtggccacagtgtcactggtcaggtgcttctcaccacgggaaagccgccgacctgtgactcgcttgagatgggaaagcggcgccacagaccccgggtctccttggctgtctgtgggccgcccctggccaccttgtcctggctcgcagggtgcaggagcgcctcgttctctgggtggccggcttgctgctccggtttgggctgtcttaccataacaccgtcccagggctctgcaggccactgtgagcgctggctccctgggcagtgctcctccgtgtggactgtgcctcaggccagggctcaccagctggggtcctgtccggaaggatgggatctttctgggagctgcgccggacagagtggggagctcctagtttgtggggggaagctttgatatccatgccacgtccatccaccccaccccttttcgtcacgagcacaatggtctt

SEQ ID NO: 129256 - DNA, 1135 bp, Homo sapiens
gcgcctgtagtcccagctactccggaagctgaggcaggagaatggcgtgaacccaggaggcggagcttgcagtgagccaagatcgtgccactgcactccagcctgggcgacagagcgagactccgtctcaaaaagaaaaaaaaaaaaaaaaagaaaacctgacttttctcatctcactgtttctgtggtcgggaatctggtgtagtgtggcttagctggtcgaccctggctcagggtctcctctccacacggctgcagtcagctgttgggtgagggaacagagcttaagtaactttccgcagaaccgccagtgagtggcctctgccttaccgcaacaccgtgggtgagtatcaggtcagcagccagccaggaaatggcaatctgtcttttaggccattgctttccaagtcacatctactccatctctcctgatccctgaagagcttgaagcttttggccctcacagttgtcctataaaggcatttccaaactgtaatgaagtatcaacagaaacaagagtgaagaaacctttaaacctgcataatgacatattaacaagagtcaagcaacgagtgggaagggaaggaggacacttttcctctggccctgagtccagtttttttcctgcagccaagaggagtagttaatgctgtctcactgctttatgccatctataagaaggtagacaacacttatctttcaaatgcactgcagtgggactacacataaataacagtagtcttctttgaacctaaaatagagtggaaataaccaatgacaattatggaggaagtcacaggtaaatcctggagaccagcagtgccaagctgagccacagggccattctcactgtagacttgagccagcctccatcaggaactgatcttctaaagatcaaataccagagtctccactgctccttggcagcccattatgggttttaatcacatcataaagcattatatacattatggccaggtacagtggctcacacctctaatcccagcactttgggaggccaaggtgggtgaatcacaaggtcagaagttcaagaccagcctggccaagatggtgaaaccccatctctattaaaaatacaaaaattagccaggcgtggtggcagatgcctgtaatc

SEQ ID NO: 129257 - DNA, 1082 bp, Homo sapiens
ccccacagccagtgtgcccagccacggggtcatgatgtacctgcagcacgacacagtgtattctggagaatttactcagcagatactgaagtgaaccacctgaaaatttaaaaatggatcttgatagaaggcagagatcttagcgaataaggtgttggtaggctggacagttgagcattagagcgcgtggatctggggctcccggcagccagggaacctgaaccgagtgccggctgaggaaaccgggccggggctctgtggcctgtgaggacaggatagtctcaggctctcagtgtggcctgcggtggcccctgctgctcagaggaagctcatgaaagccactctttccttctgctctagccccctcctcggcccgcccagcccacgagcgggaagaagagaaagcgggtgagcgatgacgtaccagactgcaaagtcctgaagcctttgttgagcggttccatccctgtggagcagttcgtgcagaccctggagaaggtgagctggtttcgctggtgccgtgaaaactccacacgtggcagcctttccctggctcactatggccccctggctgcagggagtggatgttgctgcttgtcacttagtccccactgtcctgtggcatctgtttggtctaaggtcctgctgggagacccaggagaaagaaagcagagtgaggagtgccccatccttcctcccagcacgaggtcaccagaaggcctctccagactgaagaaaaagctgcttccacacacacatgtgacgagtggggcagggtagtgaggccaggacaaagagggacccggccctgccagagtcttgcacttccacagatgactccttgctgtcagaggggagccaagtctccagtcgactgtcaggatttgcaggaggcagtcgggggaggggacactggcccttcccctctgtctcagcagccctgatggctgcttctcccagagatgagatttcttgactatgattaaaagaaaaaaatctaaccttaaaggttgtaattttggcttcagtcacaggacttcagagatgactttattaggattatagaatctttgataggaaga

SEQ ID NO: 129258 - DNA, 1047 bp, Homo sapiens
ctcttgcatgtttttgtttttaaataaaggtggcttggctaggtaggggtctacatgtcttaaaaaccatgcagctaaacccagcaacagagcacctaataaggtcaggctgcacggcagggcacccatcaggtgcaggtggtcggaaagataccaccccccaggtaaagccgtggctcccaccatcaggagaagtcagactttcaggaagagagagctccctcaaccgccatgctgctgtccccgtccttcctgccactggtcacctggagaggggatgagggtgaagtaaaggccagaatgaatgaaaggctgcacttggtgtgtcacctgggcgacagagcaagactccatctcaaaaaaaaaaaaattgtttacctttaaagttatttcatctttttagactgcagtgatgtaaatacagattaaaggaagagtaatggtcatcattaaaggcccccagcctgaactgcgccctttgctttcagctcgcagattcactggtgcccatggagatcaagcctggcatctccttggcaactgtctcggccgtgctgcacaccaaagataacaagcacttgcttcaggtagggggtgctgggtgggagtgcaggggaccctctccccagcaagaaaccagaccacctaacagattatatttgaaatagcgcttcatgtgaattcttgttgaagaattatttccctggccatgtgcctcagagaggctgctgtgcccagagatgaggccgcacgtcatcccaagggctgccacaggcacattctgttggggagcgctgccacgcgaggcagggctgtggggagacgtgcagggtggcaggtgcagccctgcccttgggggctggaaccggagggcacctgcgtgaggctgtggctacctgagagcctggtcctaccaatgacccacacacaggtgggtggcacttcagctccagggcaggcactgtgtcttaagaattcctttcagatctggactgtgtcacctttatgccacatgtagagttgctcctagctaccacttaaagtcta

SEQ ID NO: 129259 - DNA, 1050 bp, Homo sapiens
tccactgtgaagtcagtttttcccattgtattaaatcagtaccttgtgggggactctttgaaactatatacatattctgttctccctcaaaatggtatctgatatttttagcatttgttgatgattttcatctgaataagtgatgaactgtaatggttgccaaacggtggttttggtttttatttcatcgtttgtttcttggcatttcgttgtaaaaagagctttcttttctcccccacatatgtatttctccctcatttacctcatctgcctctgctgaagcttggagcccacccacagggtccatcccagcctgcccctccttccacggggcccctttgacctccgtcccccacgtgtgcttcctggctccctcctgaccccctgactgtctgtgggccctcagcgccccagttgctgtctggcttggcagctcctgtgtagtctgcattgtaagatttctttcttgtactttccctagaaccagacttctcctacctggaagccctggctccttaccagccgctggccatgaaatgcatctactgccccatcgacacccggctgaacttcatccaggtgtcaaagctgcttaaagaagtgcaggtaatgaaggacactgcttgtgccttcacgtagtcatgtcaccttggtgtggctcatgcttgtgtggggtgaggggagagagatctagctgtgtttgattcttgtcttcagttctcacgcatctgcagaatgctgggacacatgccagcccccctccacactgaaaaggagtggtctttacaccctgaccgcagtttccattctaaagaaatcagatgtggaagggaaagaaaaccatctgtgtccgcttaaaagcaaaccctctcacccctgccaaaaaaaaaaaaagtcattctagaaacatactcactaagctgagacagtttaaatgaaacgcgttactggggccgtgtcgcacgtgtaggctggtaccacaaacagtgctgtcgggtttgggttttgtggcagtttttggtcatttgtttcacttcacattttctgccc

SEQ ID NO: 129260 - DNA, 1020 bp, Homo sapiens
acaagagcgaaactctgtctccaaaaaaaaagtgcatggacaaaaacagaagccatgtctcaaggtgtagatcactttctttgtgaaattgaccacaactaaatgcaatatgataccacggattggatcctggaacagaaaagggacatgattggaaaaactagtgaaatctgaatgaagtctggagtttagttgattgtcattggcctgatgttaatttcttagttgacgactgtgccagtcatatcagatgttaactctggggacatagggtgaagaggccatggaaactctgtactgtctttgcagcttttctttaaatctaaaattattccaaaataacaagtttatattttaagaaaaaatgtattgagaaattctaaagtttaaaaacatacaagatacatctcttctctgtaggcactggatttcattcacagtgaaattcactggcgggaaatttttaaataaacttcagtatttaatatttgcactgctgccactaggtggcaacagatgccaccgtatgctcttcctcacatgctgatgtgtttttcctctttaataggctttgtcacaacaaacagagtaaggtgtatcttccagaaccaccttttcctcatgcagaggtaagaaaacaaaatcactgggacatgggaaggaagcaatgtggataacctgatgcagatgcagacagcaggtcgttagatgaaatagattgctgtgtaaacctgtagacccctttgcctcccaagtcagacacagggaagtattttaactcaagcttcacttgctttcctcctattaacactttctattgcgcacgtggagcagcccttctccaaaatgttgtggaccgcagaattgtttcagacttgggattcgggaatatacttactggttgagcatcccaaatttgaaagtctgaaatcaaaatgctccaatgagcatttcctttgagcatcatgttggtgcccaaaaagttcagatactggaacattttggattagggatgctcag

SEQ ID NO: 129261 - DNA, 2169 bp, Homo sapiens
tggggtccactaaccgcattcccttaagaccaatgggattacttattaaaaatgcaaatttgggggccctaccttagacctagtaagtcagaatctctggggaaaggagacttccagaagaaaagttgcattttcaacatgttctctggcattttccacgcaaactaaagcttgaaaattactgatctaattcattcttttcatgtaactgatgcagaaactgaggccaaggaaggttgtagtggctttcctgtggtcctgtgggttgggacaaaggtaggatttgagacaggctcttgagctatgaccagcgatgttgattttctccactgtatcctactctagtaccatactctagtaatagcaagtccaccagccctcaagttatagcatctaggtgagcctaagtacttaaagtataggggattttcctgcagacaaatgttaatgaaagaaaatactactaactcctgcagacaaacgttagtcaaacagaaaaactcggcctattttcttataggtcattcagccatggtcagagactgaacagagacaaatccagcaaatttttgagcaggatctaaaacgggaaggagcttggaggctctgtcctgaagctcagctgccattggtaaaaacccaaacccgtagtcacatgctctattcccagggacctagattagacaatgatgagaaaatcattatcagcctatagcatcccctgctttgatgtgttcttcaaaagaagcagcttattagacatgtaagtaaatcataaaaacagaagtaggaaaacaagtgcaaatcttattttacaagtttatctttataacactgcccttttgatatgatgttttttctcctctggcatccacttttctagctctgacagtccggaatggaggaaacgtgttggttccctgctacccttctggagtgatctatgacctcctggagtgcctatatcagtacatcgactcagccgggctttccagcgtccccctctacttcatctcccctgtggccaacagttcactggagttttcccagatctttgctgagtggtatgtccgtggtttttttttttttttgtgaattttatttgattcaggacattcaagcagtaagaataaaaataatcctgttttttctcacattactgtggaaatttcattttgttgtttttctgtctgtgataagattgcattattaaaagccaaatctgttgcattgctaagtttagaataatagttgtcaaagagggaagaatgcaaggcagagacttaccttagcccagcactttcaaaactggtaacaaaaatcttatatacttatcacatgtcaccctctgcctgttactaggtgaaatgacattctaaaagttaaaaaaattttcaagcccaatctcatgttgtctaaaatgtatagtgccaaatctgagaagaaaaactagatttttaaaaattgcaatagtatgatatttgacaaaattttattacatcagaaaattgatcaaatcctagagttggcaaaatatgaaacaatatgaaattagtgaacctttttagagttatttaggtgcatgtttgaatgtaactcacctgaccaaaaataaagggagaagaggaaaataacttttacaatatccccagtggtgccttagaatggtgcttcccaaacgttccgggactgtgacacaggcagtctaggctgcatttaatcccttttagtcatgaggtagccgatagacacagcatgtactgagtttctaattaaaaaggaatttgtacatcatcttctcatgatatattcagttacgctgcccccaacccttgcttttgtaaagtacttttttcattcccttctgtggtcgtttttttccccgctgtgtttagactcatacaggcgtctctatcccatgtacaaattattcttctttgtcacttttttttttttttgagacggagtcttgctctgttgcccaggctggagtacagtggcacaatctccgctcactgcaacctccgcctcctgggttcaagcaaatctcctgcctcagcctccgaagaagctgggattacaggcacccgccaccatgcccggctaatttttgtattcttagtagagacagggtttcaccatgctggtcagctggtctcgaactcctga

SEQ ID NO: 129262 - DNA, 1046 bp, Homo sapiens
tgggaggggcccaacaatccgtgttttagcacaccgtccaggggattctgactcatgaagcttgagagccactgatgacacgtgagatagcattttgaaaagaagaaagcattacagaaatacaagataccttgttttaatggaggtaaaatgtatatatggtgaaacacaaagatcttaaatgtgtaatactgaattttgatataatcagtgccccagtgaagatacagaacttgttcatcccttataaagctccctcttgcctcctcccatcagtccccacccaacttaggcagccagtggttaaggacagactattccttagagaacataagagaactcgatgatgggttaaacgtagaaagagcaatgtctgtgttctcgtattctttcactatttgtaggtaatgttccttttaaaattactaaccatatttctgtgttctttttcagcccatggaccaagcttctctcaaaaacagcgatgttcttgttctgacagggcttacccagatccccactgcaaacccagatggaatggtgggagagttctgcagcaacctaggtgtgcaaccgtctctcatcttacgttggatgatctatcttgcatttattttacaataataaatataatattttacaataatgggggaaggagtgcttacagggtagcagttgtcaaaggagggaggcagtatatctttgcaaataatagcacagaaaagagtgttacactttgaactcacagcagcgatacagtgaacagatagatatgtatgaatgtttgtgtggttgtttttgagacagagtcttctctgtcacccaggcttgagtgcagtggcataatcttgggttactgcaacctctgtctgctgggttcaagcagttctcctgactcaatctcctgagtagctgggactacaggcgtgtgccaacacacccggctaatttctgtattttttgtagagacatggtttcaccatgttggccaggctggtctggaactcctgacctcaggcaatccgcccgctttggcctcccaaaat

SEQ ID NO: 129263 - DNA, 1050 bp, Homo sapiens
aactttctagtttactttattgattgattgactgagacaaggtcccactttgttactcaggctggagcgcagtggtacaaacatggctcactgcagcctcaacttcccgggctccagtgatcctcctgccccaagtagctgcttgaggactacaggcatgtgccaccatgcccagctaatttttgtatttttttgtagagacagggtttcaccatgttgcccaggctggtcttgaactcctggcctcagcctcccaaagtgctgggattacaggcgtgagccattgcacccagtctctggtttactttaaaataatttttgtttttaaactgaggatatttctgttgtttttccctgcagaattacctcatgtgactgtcactgtaagctcattgcacattcttactgtggttctcttttaggagctttttggtgcggtccaggtgactcctctgagctctggctatgcccttgggagctccaactggatcatccagtctcattacgagaaagtgtcttatgtctctggatcctccttgcttaccacacacccccaggtaattccaaattctcttctagcaactcagctttttggttacttaagtcaaattcagaatgtatccaaggaaccatcagccatttttaaatcttccaaatatggttttctacagatactctctagccaaggtagactatttgagtctcaacattttgacctacaggtttctctgaaatagtcctgctaccttgagggtcactcctaggattctgaaatcccccaggccttccaaagaccatagcctgatgtgggacacagatggttatgcatttactcagcaaatattaactgtttaaaatccttcccaagggccaagtgtcaagtgtcatgcacacatctgggtattggggattcagtggtgaccaacgggcaaagcatgtgcccgtagatcttatgttgtaggggagttgatgatgttggggagaggatggtgtatagtaggtaaacaaataaagtgcctggtcatttccgattgagatacaagtactgaa

SEQ ID NO: 129264 - DNA, 1050 bp, Homo sapiens
gcacggtggctcatgcctgtaatcccagcactttgggaggccgagttgggcctatcacaaggtcaggagattgagaccatcatggccaacatggtgaaaccccatctctactaaaaatacaaaaattagccgggcatggtggtgggcgcctgtaatcccagctacttaggaggctgaggcaggagattcgcttgaacccgggaggtggaggttgcagtgagccgagatggcgccatagcactccagcctggtgacacagtgagactctgtctcaaaaaaagtaaaaataaaaacagagaaatggtcataaaggaatcctatgaacaattatatgccagtaaattaaaccatttggatcaaatggacaaattactagaaaggaatgctgtagaacatgaagaaatgttcacctggtagttgacattgtgatccatttgcaggctgttaccttctcctctcaaggatgcagtggaagtctcaacctggagaagatgctatacaatgcaagaggtgaactctgcccttagtaaaatccagctggtgggatattctcagaaaattgtgagtattcatattacatttcagttattcatgaatgctttccattcatattgttgtttgttgtttggaagaatcctatagttacgtttttaaagccattccattgctgaggatccagagcctctgttctttcctccgttccgcgcaggattttattggtgctctttccccaccctcacatctccatcaccagccagcattcgattggccagcgtgcagggagtccggagaaaggcgtctcatcctgttcacattagattttatagattttggatgggtgaaacgggaagagagaagagtttgtcaagtgtgacttttgagctctgacctaaatgataagccttcccatttcttactgtcatcctgtgcccagagctactcagtaccgaacaacaagggcctaacacctaactgaaaatgaaaaaggaaagccaaagtgtgtgagtctttggtctgtttggtaatatttcatctctcccttttaatgtg

SEQ ID NO: 129265 - DNA, 1031 bp, Homo sapiens
aatttactttcagacactgcctttctgacgaaagcaaggtagctaagtggacagaaggaaaactgttttcaaattccactgttacctgtagttagttgtcactgtcactcagactctcagactcaatctccttttctgtaaaataagaattaaattatctctaagtccacttgtgttagagttctaaaagatgtccagagagaggctccttaaggcaggccctcagagagcggcagtgctttgacggagtaatcacagctggttgggctttgcgattctggtcacttcaccgtttcatttcactcggagttgattagcctctgagggactgattcatgctcaccagactcccaggatgttgagtgacaaacaaaaatcccaattaatcactttaaagtaagacctctgagtggctccagaactagagtggcttctctatccaggacactctatgctggccaggaagtccacttaagacctcaaattatggataagaaatttttccatgagcataggattagagcaaagatagttgagttgctctcaagagtcgttcctgtcatgctttggtagcctaagcaattgccatttttttaagcaataatttgatctaaaataaacatcaggggttgtaacctagtttctggttaatattgaaacatacttcattttgaggctccagaaactccatatgtgtccttattctgccaacatgcccagtctaccctagcccccacaggcatgttaagccctttgctgtgatgagagtcaggcagggaactttcctgattcctatcttctttgtattctgtccttacattaattttgttcattcacttattcattcatttattcattcaacatacacttaatgcccagccagttttttacttaccaccttccaagtggtccttctggacttaaaagttttaatatttaataaaaacacaaaagtgtgctgcttttgctggcaggatgaaggaagaggccgcagagctttggcatcatgtcagagccctgggaaagaagtt

SEQ ID NO: 129266 - DNA, 1020 bp, Homo sapiens
tttggttttctgttcctatgttagtttgctgaggataatggcttcagctccatctatgtccctacaacagacatgatctcattcctttttatggctgcatagtattccatggtgtataggtaccacatttttttaatccagtctgtcattgatgggcattttggttgagtccatatctttgctattgtgaatagggctgcaatgaacatacacttgcatgtatctttataatagaatggaaatctcccttttaaaagaagctgctagttgaaatatatttgcccacctggtgggcaaaaatcagaaactgttgagactaacttggtagaggagcaaggagagtagtaacttgcgctattggagaaggccatctttgattctcatcctggccaatgattgtgttttgatttttgagcatgagatgagccatagttattggtagagaaagggaagagtctaattattggaaaacatactgaggtgtgaaagagacactccatagctgtgtcctctttttctcctagataaactcagcataaatactagaagtggtagaagaatttgaagagcttttttttttttttttttaattttttgagacagggtctcactctgtcacccaggctgcagtacagtgatgcgatgtcagctcactgcagccttcacctcccggggttcaagcgattctcccgtatcaacctgctgagtagctgggactagagatgcccaccaccatgcccgctaatttttgtattttttgggtttcaccttgttggccaggttggtctcaaactcctgacctcaagtgatccgcccacctcagcctcccaaagtgctgggattataggcatgagccaccatgcctggcctgaagagctatttattctttaattggcatcaaatgaaagagttcttttaaaatattcacctagaatttaatcttggaccagagttctaaaagtgctgcatttgggtaatgtttgtgctaagggatttacatcacctttagatttatctcta

SEQ ID NO: 129267 - DNA, 1002 bp, Homo sapiens
tataaattaattggaaggagttcatggagacggctcctctgtacagagaatactaattaggggaggtaatgtttagaaagatgccacaaagatgcaaggcagagagcttcagagggaaagagtgtagcatctttaagaagaagaaattttattgctttgctttcaaaaattccccctttttgtggtttgttgtagactataaatggagacagcttgtagaaaatacaggatagataagtaaatagatggttaagttgtctctgctgttgacagagtgaaactgagcagtctaggagtaaaactgcagttttcctttgactctaagaagcctctgccatccctttctctgcttctactaagcctttgtgacacaggtggttaccacaagtagcaatagtatcatttagtgaggaattaggtaaagaaaattactccagaaaaaaaaatttgtcaatttattttttttgaaataaattaataagtacggtataagttgaaactgtcaggttccaaaatgtgagacttaagaattgctatagactcctaggttggattctagagccttgcagatgaaataatgtgttttcttgtttttatgtcaaaccatattacctgcactgtgtatgtaaccattagggagctgaggaagggctctcataggaaagtaaaacactcgaagtgatgcactggtttcaattgagaggataagctaaaaaactagcctctagtctggaaaagttaaagcagtgaggatcagcacaccaaactgttcctatgaaagctacatccaggacaccagtgagcctgaatcacaggtcttgagatgttgaaattagcactcttccttcaagatggaaggaggagatggtattaggccaaaataaataaatgagaatgaaatgaagttgtttagttttcaaatgctaatacattaatggcttaccagtatgtatatgttaacttggaggggatttaagtcaatatggatcacgaatattagat

SEQ ID NO: 129268 - DNA, 1024 bp, Homo sapiens
acctgacagcataacaggatcactggaggtgcttgttataaatacatattccatggcctcatccccagtttctgatcccttcagtcttagatagggccagggatcttttatgtaatccatgtccccacataattctggtgttgctagtacagtttgcataccttatttggaaaccactggattgtgggttatgggagcagcacatacccatgcatggctttcttgaagaggtatcaaaaaatgtgccttcaagtcctgagtctgcaaccaaacagcattttacccttaataagacacttggcctgcctaagcctaaacataggacagtcggcctaataacctcccagcttccctccagctctagtagtctatgattcttcatgaaaagttttgtttggggagtttatttctttggtcctgtatctactggatatctcttccttgtatttttccttttcatttcttttaggagctaaaggagtgctcgggtcatgtatttgtggattctgtgccggaattctgtttaccagaggtaagattaaggtgaatcttattgtagaaacaaaccttattatgtaattgctcaaaatgaagtcaagaaataattttaagaggcttagcttcctgttttcaagtttaaatgaatctgttattccaggcacattgttacacagccaaaatgtcatcatttagcagctttttatattgtttgtaaatcatttacgtcactctcttcttcctatttccggttctttctgtaatccccactaatactcctagtagggcatagttttgagcaaggtaaggaactaactcaagccttttagttttgtgattctgatgcctgtgtgcttaggttagccttatgtgtcctggtcttgctttatggtgggtaattgacaattgctagtaaactgtaaaaattcttgctgacttgaaataccatattgaatattgtttgaaattcatagattctgaactgagtcatagaagacaatcacttacatattattatcacagtgag

SEQ ID NO: 129269 - DNA, 1063 bp, Homo sapiens
cccagtcccctcccgacgggcgccccacgcggaagacacccctccccctcccgccttccctcctccctatctcagcccttcgtactgggacgttggggagggggctgtgccgggcggagagaactcagcgaggattctgaggtgagtcgagcggttttgaagccggactacctcaagtctctttcctcacttctttctcttcacttaaaacaatttttttggaggggttttggggaggaagtgagcggacgctggggatgggtctcgtaagcggccggattgagaggagggaggaagcagggggcttccgagtgggtgacccagacgcgggctgtggggtggggcagttcgtggggtccggtcctggaaaggcgtcgactgccccccaactcttctggtttcctctacgatgagcggaaggtttgaatcctggaggtggggtctccggtgtggagttctggaaactgtgaggtgatttgcaggtgtgttggtttgtttggggtgtgtaagtgtgtttaaactgtgtgacgtgtacttgtgtgctctgctcgtcttggagcggtgtctgtagatgggaagttagacagcgcgagtcctcgctcgctctgggcctgggctgaggggcgggcgtgaggtcctggtgctgggcgtttgggctggcgacgtggtgcgaggcggccgggctcaacaactcgcttgtgtcccgtcgcccgctcacactctgccactcgcctccgccccctcccctggacgaatctccaccccaaactccagccacgagaactgtagagatggtgtgatgtggagatggattttttgcatcctcaagtcggtagataggtgggaaaggaaaagtgtttcttaatattttattccggaaccgtgttttggttacactattggggctactttgaaaggcgtcctccacccaccttcaccccgaaacagtaggtagaggtatcttgtcttcgtgtgaattagatgaataattgctgaagattcggggggcctggggtgggggtcgggagtgctggattgtgtacgcgtctgtgtgtgtctacta

SEQ ID NO: 129270 - DNA, 1354 bp, Homo sapiens
atcttaatgcaatatttgacagattcttaggctatagtttttttttaacatttgcaaaaaaaaaaaacagtaacaatagtctgattttagctttgaagtgatcaattattttaactttttcacccttaaaatgggtgacactagactccttcctgttaagtggtaaaatgattctaatccagtcaaagggcacttaggtttttcttaaatttagagtgtggattgtgataaaaatgttgactaaattccacatgctgagtatgtattctctctggctgcttctttgtttatcttatgtccagagatggtccacatgtggtgtattgaaaatattagtagcctcattactgtatacgtattaagtagcgtggagttgccaagtggcagtaactttaatttgtatctagtcacaatttttatagcaagaaagtgaaatgctgtgggtactgctgaaacagggatgacttaagactgaattgttctgctttaagattttgataatataggccaggcatggtggctcatgcctgtcatcccaacactttgggaggctgaggtgggcagatcacctaaggtcaggaattcgagaccagtctggccaacatggcgaaaccttgtctctactgaaaagacaaaaattagctgggtatggtggtgcatgcctgtaatcccagctactcgggaggctgaggcaggagaatcgcttgaacctgggaggtggaggttgtagtgagctgagattgcgccgctgcactccagcctgggcaacagagtgagactcagtctcaaaaaaaaaaaaattttgataatgtattgtattgttaaaacatgaaatccttggcttgtgtgtagtcagtcaagccttgaaattggatgaagttctcactcttcatccaatcgtgaagtcaagttggtttcgtattttgtatacatttctttctattaatgttctcttatttcatatcttcatcctttctggtttattgcatcagtctcttaactaatcttgtttgaatttttttcattagtcattctaagctcctagtaggagttatcttgccaaaataaaatgtgaatttgattgtcaaccatactttgcctgtaatcctttagtggctcctcagactttgacataaatcaaaaattgagagtcataccacctgtgtccaaatcctggtttttgccagttactagctatgtgaccttgggcaaatcatttaaaatgtctgtacctcagcttccccatcaatagactggggataaaaatagtacctacttcataggattattgtgagcccttgaagtgctggcaagtccttaggatgcttttggcatattatagtttacaggaagc

SEQ ID NO: 129271 - DNA, 1010 bp, Homo sapiens
ggtagatcacctgatttttgtcttctctgggtttgagacaatttttcatttgtcaatactgtgataatttctattaaaaaaagacaaagtttaatttgtttcattagcaggaatatgacaaatattgatggtacttcctgataaataagattcatatttacaaagctttttggctacctgtgatttcagttttttcctggtagaattattttttcctccttggatttatgtttctagctttctatttgtcttggtgtacgtactaaaaaataatgcttgaattagggatcatttggcttcaaggacaggcgttgtagggattcagctgttttgggttgaagaagagtgactagaccttgtgtgaatgggagaaacgttaggaatctgagaagctagtctctcaagctctcgttctggtgataaatggtttcttgtctcagcatctccttccatgtctgcttcatctccctttctcacttctcccttccagttctgtttgtattgccctggtttttcatagtctctgcttctctgactggtaagtggatttgatttgccatggtgttgacttgaactgttctttcaactagagtttacctgttgatggtgacagtgtgtttcttttagttcagttggcaagagagaaatctgaatgcattgcatgaccaccatgacttaaatgtctatccttatcccgtgaccttggtgggaggtagcgtggaaagcaccttttatatgaggcttaagcttttagatgctttttatgaggagggttctcttgttggtgttgaacaaggcactcagttaaacatgtcaagtctagcagtgcgtgatgaggtactttgtgggatacaaagataggttggatttaatccttttctgcaaggatcagtttgctggaaatagcaaaagactcctataatttaagatttgctttttattctagtcacctcaggcaaaccagaaagatgacaaagtaggactataagaactagctaggattaaggaag

SEQ ID NO: 129272 - DNA, 1031 bp, Homo sapiens
tattatatgctttgttctgtggaagtctcaaatatctgtttataattgggagtgtttctttcctgatatttgcctgcctcatattaaacactgtgtccatcctctctgattgcttatgtcagtagatcgtgacatgggctatattttgcgtaaatatgattatttttctagatgttgtacttaacagtattatgccctaaacatctagtttttatggttatggcatcagctcattttcttaaactctgtatttttgtatatgaactcttaagaagacagtctttttttattcccaccttttgtcattaagttctcctttattctaattttctggatctggtaagcgagttttttttgtttgttttttaaccttatatactttggaatatcagccatctcttgaacctttgcactcatgaattaatttctcaccttttaaggtctgtcattctttttggagtcttaattactcttagaatattgagctggttgtgaacatgaactttggagccatattgtctaggtgcaaatctgatctccactacttaaccctgtaattttgtgtaaacctctatgtgtctcatctgtaaactgggcatagataaataatactatttattcatatacataataggattcttgtgagtatatgattcaacatttgcaaagtgcttagagtagtggttgttacaccttatcttattattagttgtcctgttctttttcctaggtaatactcccctccttaatctttagaattctctatttgttgcaaataatccctttctggctaatttattttttctttgtgtatttattttcttctgagttttccttttttagctcttagctgcatttgatgtaatatttccccttaaaattttttctatacaagtgtttcttccatcattcttttctctcttgttaaaattacctctggtcttgaagttcctagatttgaaggctttaaatctccctttagtacttttctttttgtacttttctccctcctcctctcacctaatttgtca

SEQ ID NO: 129273 - DNA, 1052 bp, Homo sapiens
tatggaaattcagaatacctataataagccaatttaaaaaaaagtagaggaattacacaacttaagactgtgtgatgttagcataggatagatcagttgaacagaatagagactggaaagacttttgtttatggctcattaatttttggcgaatatgctaaggtaattcattgagcaaatgttggtggaagaaccggatatccatttgagggtaagggggagcatttcttgactcttatttcatactatatacagaaattaagttgagtagattatagtcctaaacctaagaggtggaaggataaagcttctagaagaaatacagaagaaaatgtaactttgctaaggccaagtttcttagagagaaaccaaaaaacatgaacaataagagaatattgataaattccattttatcaaattataaacttctaaagacatgatggaagagtagtaaggttgcattataaaaggacatgcaccataagatgggtataattcgcggctttattttgcaatgcattactccagtatagtatagaaaagagtgtactgagcttaggaacctctaatgtgtaatcttgactctgacacttgtcagagatactatttagtaaattagtgttttgttattttctctgagtgttggctttctttttttgtaaaatggtaatactgatgcctactctctagaattacattgagggtcaaataaaaaaatagaaaagaatatatatataaagtgctcttgctattcttatttaatgtatcatcatcaccattgttattatacatagttggtccttaatagttcctccccttgaaaaatgctaagtatgaaaagatgtctctttttcacaatactaactgtaattatctcctaagggaagcgtaaaattttttaatgtttcagtagatgtataaactccagtttattttaaccctctgattcttgactgtaggaatcaaacatgggtgtaatcacattttttttctcagaagaactgctcacactgttacactctgtagttttatgccagaccagtccctttcac

SEQ ID NO: 129274 - DNA, 1033 bp, Homo sapiens
ctatccaaaggtaatgcagattcatatggaaattgtgtatatgataaaggcagcatttcacatcggaggagaagacagatattcagtaaaaacatacgacatctagctgtccatttgggatgaaataaagccccaattttttatacttgttaagtcaataaaaattctagatggagcaaggattttaaatgtagaaaactattactaggacccctaggttcatcagtaattagaatagttttatctaaatggctttaaatgagacttaaaggagtagaatagcctgtgtgccaaatcatatgtttccagttaagtcctgcaatgtattgtaaaggagaatgatgtgtgcttttggagtcaataagatctaggcttaaatctttttcctactgtttactcagattttttgtgaagtacaaaactacactgagctttagtttcctcaacaatcaatccatcaacataaaatgaaatgaataaagaacatctaccatggggagttgctgtgagaattggatgagattatgttatgtgaaattcgtacccagttcctgcctagaagtgactgttaataaagttttcatgtagaaggacaaagaaacagtgagaccttcaatagctataggacactggcccagagcagatgtttgtttgagaaagatgaagaaatttcttgacatctgtttccatctgcaaacacttattgagagcctactgcatgccatgcattatatttggcactagaacaataaatatcaaaatagaagagattacaactttaaaaaatcttgaatggaaaactcaggtcttataagaaaggaattcaaggccgagcatggtggctcacacctgtaatcccagcactttgggaggccgaggcgggcgaatcacctgaggtcaggagtttgagatcagcctggccaacatgttgaaaccccatctctactaaaaatataaaagtagccaggcttggtggcaggtgcctgtaatcccagctactcaggaggttgaggcaggagaatcgcttgcaccc

SEQ ID NO: 129275 - DNA, 1013 bp, Homo sapiens
tcctgagctcaggtgatccacccgcttcggcctcccaaagtgctgcgattacaggcatgagccactgtgcccagcctatcttctactttgtgtagagatgaggtttcaccatgttgctcaggctggtcttgatctcctgggattacaggtgtgagccaccgcacccggctatcatctcctgttttcgcaagcaagaactgaaaatacatttacacatttattatctattgtaccacgtggacctttcttttgctgccatatctatgggatttggtattgttacaaacttctttcaccattttcagcctcaccctaacttgttcttcctcctcttcatttctactccaaaagcttgcattcatcttcctttgatcagatatcttctgatgattctccattgtctaaaaaatgaaatttcttttaatctgactccagccttttcgtttgttgccatcctctattcagtatgcccccagctgaatttcactatttgccattcccagaattctgcccagttggatgctcccagagttttggttgtgccaaagatacctttcacctcctcatctcagccttatgaatttctgtttatcaagattatctctgttgttaccctcattttaacttcttgaccaatttagtccttgcagacctctctttttttctgaaattaattacacttagttcatcaccctgaggtgtagtactcattttaattatgcattttagagcaatgttcttcaggagtgacctttccttacacaaagagtctagcattgtgcaggtactctgaactttccatgtttacctagctaccttgtagtgtaagaggagaacaggtgatgctgacacaagctatacatgtgaaaatttgtccagtgtgactttcttcagtggtgtgccctctccaaaaataataattcatttgctcaacaaatgctgtgtgaatttttgcccttaaggagcttgcatttttcctttatctacttcagttgtttatatcaggcctgggg

SEQ ID NO: 129276 - DNA, 1024 bp, Homo sapiens
ataggaaataaggggtgggagtggaggaagggcttttattttatctgcgtgcatttatgaattatttgaatttttgtagacaatgcatatatgtgctttaacttaaatttaaacataattctgcttgcactgtggaaggcgaattatagagatgatagcagttctgaagtacaaaattgcttgaagaaggaaatttcattttttcaattgtgaaatgatcttctaattaaaaaggagcttatgagaattttgtactttgtggatcttaaatggtttgttatttttcttatagttactgcaattgtccaggcaaaagagactgagattccaaacttctggaatgaggattggaaaggacatgaaaataattttaggaagagaaagtgattgtatttagtaaatatgtaagagtgtggggggaaagtagagtgaacagtaaaattgagatggagaacacaggaaggagaacagatttaaggatgatagtgaattaagttgactgtgttgaggacctgtgggaaaatctcatggacgctatctagcagatggtttgaaagaatggtctggtaccctggaggtcattggcatttagatgacattttaaatcaatgttgttggtaattgagatgaccaaaggaattctgagggttactaacatgtaagaagctagcaaagcagccctgaagtcgactgaaaagatgtggtgttggaattgtatccagcattccaaggaggaagatgatgggagtggtcagtggtttcactcctcaggaagtggaaggaaaattaaacataaatttgtggtattggagactctgacaagaaaggattatggtggagagccctctagtggaagggagcgtggtgtttgaggaacaggtagcctgatgcagctgctcagaaaataatgtgaatgaggctggaaaggctttttcttcctttgaataccatgtgataactttcttattggaaataaattaatcaggggttagttttagtctctcaatgtgtgaaggttatatgt

SEQ ID NO: 129277 - DNA, 1092 bp, Homo sapiens
cagttcaagctatttgagaaaagagtaatctgaattagtaaaatgtctcaattatagatatttttcattgaaattttattatgttcaggaggtaacagaatctagtatagcatcaacaggtagacctatggagacctgatttagttagtagacaaaaagcatatcaaatatcatcttattttctttcatgctgtatttcactctttaaaaaagaaaagagtttacaagaattagggttattttaagtttgtctcctacctgcataaattccttaagcttataacttatttgaatggttagtaaaagattctgaacatctgaggtatattgttcaaaaagagtataactatcaagcaggaatttcaaaagaaatttttcagagaaagatacattgattaagttgtcactaagccaaagaccatacttccctagtcccataggaagtagatgttatattgttttaaataaactgcaagatatttgctaaaagtgtcttgtttatttcaggcgctacactaagtatgagaccagcccccattccaatagaggaccctgaatggagacaaacgcctcccccagtctctgccacatctggtactttccgactgcgacgagggagtcgatttacctggagaaaggagtgcctggctgttatggaaaggtatgtgtctcctttttctacgaatgatctcccaaacttagggaagacatcaactctggatagactgggacagttttcatttcaaacaagtaacttggtatcttggttctatctctaaaagtactttagaatatcataaatgctgtattatagaaataaggtcatcttagcattgagaattcataaagctggagttagcatctgtcaatttattttacttataatagtgtccccagtaatttaagaaatgttggaataaatattttttgaattcagatctttgtattatattttggaaaaactctttgaagtcttcttttcatcaaaaataatgaataattgtataggagactactgagatttaactttcctttaataaggagtatggtctaagtaagctttgtcccaaaggttaaaaatacttatttttg

SEQ ID NO: 129278 - DNA, 1021 bp, Homo sapiens
tttaaattcatgaccgctaacctcaagtgggtctttaattctgccaagcagaattaatactatacctttctggtttattttttcccactctcctgtaagattatttcacactttcttctctctgtgcaaactccccatcctcattctcttatgatgaccttgctcatcatgaacggaaatgaggaaaatcaagcaatcagaggagactgtccacaaactacctacttgctaccatgtacacacacacacacacacacacacacacacacacacacagttttcctgcctcttaacatacccagagcacttcaatgatatgtatatttcctagcgtgtgtcttggtgcatcattcatatatatgtgcattttctccttctctgacctcattccactgtgtattccacatatttgacttctaaaatatccaattccaaaaacatttattgtcacaaaggacaatattgtgtgattccatttatatgaagtatctggagtaggcaaacctatagagacagaaagtagataaatgtgttacctagggctaggggaggataggggtgttgggtgggggatgtgatggctaaggggtatgtgtttctttttggggtgatgaagatttgtaaaatcagttgtggaggtgcttgtacaactttgtgaatatgctgaaaactattaaattgtatgccttaaataagtgaagtttttgatatatgaattatatcaagctgctttaaaaaaaggcatttattcagtgcactgttagaagcttcacatatacttaccctccatatttaatcctcactgcaggcctggtttttcctttttctaatgaggcagtcaaggctcaaagaggttgaataactaacttcctaagaccacagagctaacaagtgtcccagtcacatgtggatgtttagccagtgctattcacagatttgagttcttattaactaagaagaatgttattttaatttgggtatatactgatggtttttaatttgtggacttgggcttcgttaa

SEQ ID NO: 129279 - DNA, 1038 bp, Homo sapiens
atagcatgtgtttatttcagaaattcaacagagaagcatataaggcagaatgtcattttttttaaaattttttcttatttctccaagaaaaagtgaaaatcattcttaattgccaccagtattttcctgtttttgcccccatccccaacactcttgcttcttggagatagtcattgctaaccccttagtacgtatccttcaagatccgttttgcaatacctctttgccttctcttgttagcagttcatttactgtgagatccatttcttttggaggcccccacactgggttggtggtgcctttgtctatcattattggctcgtcaacactatcattagtggggagcgcgtgtgaggatgattcagacttgtaccctggcatcaggtggttttcagtgtagtagaagacagatgtatacagtgataactataatacaagatgaaagatatgtaagagaggaacagatgaagtgcggtgggattcatagggcaaaaaaaatacctttgattggccaagaggtgatatttgagctgtaccctgaaagatggataagatttgcactgcggggtgggggaggcaaaaagctgatatacttgcaagagaaaggcacagagatgcaaggagtttacagagttattccattttcctgggtggtagcatgcatatatgggagtagcagataaagatgtagaggttgtttgcggggggactttgaacacctctataataaacctttgagaatttctgaacaggatagtgactagagatgtgctttaggaatattaatcaggcattggagggggtacagtgtcatcacaggctttgcagtcacttggaagaaaagttgtcacaatgaggtgcactggccaaagagctatggcttaaaaggaacccgtaggtcttagcaactactgtatcccatcaaatctaagaaggccttgattgtaagacacaccttagttgacgtaccagtaagggagacaaaacaccaccaattataaaatgcatcctgacttcggagatcacaataatgaagaa

SEQ ID NO: 129280 - DNA, 1029 bp, Homo sapiens
taactcagatggcactcctcagtgacgcctttccaggctcctgccaacaacactgaacacgccttcatccatgctgcctcagtgctctgtccatacatcctatggcatttcaccacaggatattgacttacatgtctctctgtagtagactgtgaacacttcagagtcagaaactatatcatctttctttacccacagtgacaagcacatattaggtacttagtatctgcttttcgtttttgtatattttgtgtaaatgaactcatccagtacatctcagaagttacgacctgtgcatttaggtcacctggaaatcttgttaaaattcagattctgatttagtaagtctgaggtggggtctgagattctgccattctaactggctcctaggtgacagccatgctgttagttctcagagttaatccaaagcatctcagcctaagtaaataggcatagggcagagacaaaagccattagaaatgtgaaagtgaagcaattatgagggtagtgacttggaaaaatcctccgtatgaacactggagtcccagaaatgataggagaaaatcatgcaggaagagatgctcaaataaagcagaagaccatggtggagggtggtagttgacaagactgggaggatatagctctatgacttaagttttacagaagaaaaaggtggttaggtgggggcagctgctgtgagtcaggactgcatcagatgaggttaaataaataaataactggcagtgaagccatgccctccaaggaggagtgggcagtgagaggagggagtagtgttaggagctgggtttgcaggtgatcctcaggaagggctggggcctccagtgctattcacaataggatggcatttccaccaatgcagacaggagtgctgaaggcataagaaaggctggattacagggaaagggaaacccctgaataaatggtaggtgctagaatttgacaggggcccatttcctgattggaagtttccaagttgaaaccatgaaagttctccttttctttttttaa

SEQ ID NO: 129281 - DNA, 2154 bp, Homo sapiens
tagttagcaagtatttatgaagcacctaacatgcacagcagcagagaccccagaatggcaaatgtgtgcctcccctgacctacatgcagttgaatttcatccatcttacagtctaaaagaaacaaatgtagagaaatacaggttcttgtttaattacattctaattaatttccttagcacaaaaattcattcagtgtttcagccattgtgataaggtaacagataatttagggatctatttgcttttttcgaagaagcagcaatcctggagagtcatgggatagatgtgcagagtccaggaggccactcaaacagtgatgatgtcgacgggaatgactactctgagcaggtgagcccctgcgcagctgggcgaggttcttggtgcctgagcagggggtatagtgggacagcttagttccttgggtgtggctgatggggtgggggaggggaaacagtcactgtccctccactctgctcctgtgtctagttagatttcatgtaatttgaaaggaatgtggtaagattcagttgtcctgttgaatttgtgagagatcgttattcacccacatggatttattgtcatacaacaggatacttggcaagtacgcaatggggaggaggaggagggaagaagttcagagggaggcagagaagcagagaaggtagaagaagagaggaggatctgatccaaacaagcaagttacaccattcacgacacacactcagtgtttgagaaatactaggggcagctggaccccatgcctaaacacgtaccgacgcagggcacgatggaaggccccactcactctggccccactgcagtgggaaccctcctgcccaaaggagtggttcttccagagtctctggcacactgacacatgcatcctctcataagtgcaatacctgcatgactcttcacctcgccctgatttattctgcattgcttttggggaaaatgtatttaattgtagccactgcgtggagtaattcagtaactaagactgtgggagtccctcctcgacccccacatagatgttgacagatttcattaaaattttgataggatttaaatttccatttggaatatgcagagaacgcatggtaccttcccctagaccacagcaagaaaacttctgctcatttttctggggtctgtgcttttttcttgctcctcagccagctcatatagtccaatgtgttctttaatagcctctgtttaccacacacctagaatgcatgcaagtgtgtgctgatccctttgtaaattctaaaaactaatctgtgaacatcagaaggaaacaatgatgtccacacttctgaagaactaccattttttcccatttaggactctagttaatagccccaagagaatattctgtaagtctttctgttcggaaacattcctcttttcagtctacccacatagatggatcatttccatctttttttacagatgccctaagggcagcacattccatgttttgtttgtttttttccttaagggacttaccctttccaaagctctttgatacggagttcccctgaagatgacaggtgagaaacataccccttatttgtaacaccatcttcagtgcctgacgtacatcctgcaatgccagcttccttcacagctttattgtttaacacattgagctgcgcggggaggacagcttcacactagttctaggtaagacgcctgccgctccccttgcacagctgcctgcagcaggagagctcgacaccttcctcccctttctcccgtagccgtttctggcagtgacatgtgtcctgttgtaatggagaattctttttttctttttttacaaaaatgcattttttatctgtaagatgtaattgtaagttctgtctagttttctcagttcagagagggaccatgaattctaataatctatttgtaagagcagcaatctggaatttaatagctcactagtatggccttcagtgattagtgctatatttgttacaaacagaaagatccaaattgttggttttatatcaatcactgcaggtttgatcatcatcaccagcaatcttattaatagaatgaatagaattctcagtgatgaaaaacattttttgtgctttttacttgttgaatcataagattatcaactgaaaatctttggacctata

SEQ ID NO: 129282 - DNA, 1049 bp, Homo sapiens
agtattttatctactaagtcacacagcttgtgagaggaaaggatgtctgtgtcaggcatgttaacttcaaacaaaatctgagatcggctttttccattgacattcttagcacagcacccaaagaagtataatctagccacagtgtggctataatgaggcacggcttattgcagctggaaatcaattatcctcacgctgaggtggggattctagtgttcctttgactctgtggatactccccaaatggtgtctgtcattcctgtgccacgacctcagcttgcatcctatcagtcttggggaaggaaaagggagtacagactagtgttacaagaatctaaaggtacccaagattttacacgtagtctaatatttgagaactgagggctatctaaatacctggaagcactttcttggaatgctaagacggagcagcaagattttctagcctcgggggctgggagagggaagtttggttggttggttggttattatttactgggagttaatactgagagagtatatgcaaaggctgagggcaccatgccatcttcacagaacaagaccctaacagctacctgacatacaagaaactgcaagttatactgtaagaacacatgttaaggaccgaggaaagtctgctaaggtgctacgtctaaactaagttaacttgtcatgtttaacctccctgatcagtcatcatccagggcctctgtcttgatttcgttggctccttgtcgggccaatgccaagatagtgtggttgactgctgccatttccacagctaatgagatggggtcttggtggtcactatggctcgtactgtcatcctagatgtgcagaaataagaaatgttattagtggattggaagaattctttagtcacagagagacatgctggggcaaggggaggcagaacattcgtgggaggaaactgggggaggggctcatgataaaatagaggtaaattgtatttaagtagacactgaatggatataggtccaaagattttcagttgataatcttatgattcaacaagtaaaaagcacaaa

SEQ ID NO: 129283 - DNA, 1171 bp, Homo sapiens
gcttgagagcattggaaaaaaaaaatatgagctgaatgtctaatggatgctaagtccagttttcagaaccactgtacattccacggcacagttagcagtgcctgcctggaaaagttttggaggtcatcgtggaagttgctttgcctcctgtcagtgtcccctttccctgctaccaaaaaagtctttcaaggatggagctaaggtcaaaaatgagtgaaaaaacttgcagtgtttgtatccattaaacggaagccccctcactctgagaggtcactagaggacttcatagtggggttgtgctgcttatcacagatgcagacacttgcccagataggagcagagaaaagcaggggacgtttcctactcacattgtggctgtatgagaacacgatgggactgctttgctgttctctttactctgtccttggagaggtgtgaaaagctgtattgctacaggcaatttatttaataattggaagccatattgataatggatgtggtaatatttgtaaagtttaatctactttaagcggcagtaactaatggaatttttttccttgatcacatatgtagcacttttgttactttttaaagatatttatatttgataaatctttttttcattttgagaactcaaaataccaaacagtgaacttgcattctaaagtcaccctgtgatcaccttgtcatctagtagcaaaatgatgaactattcatgcatcaaagaaaattacatctgctggccttgtatgaaaatgatctcttggcatcccgattaaatgacacactgtcactgtgggtaagaggaaagagccttcaatgtagcagcacagggtgcgcctgaaagaggcacaactgctgtggattttctgcctcgctccatctctcctatgtataatgaagccttgtttaaaggggcatgtggggctggatgttaagcacggcttctttttgtccgttacctgaaaacaatttctaagataaaaggaaggtgccatttccttacctcttcacccatcctcctccaccaaatgtattcaacttaaaactgtgagagagagagactgaatgaccttcctcagttttccctttctcattcaggagatactgaatatccgccagtttgtagttggtttccttccacttaaggcacacgctgactgcatcattt

SEQ ID NO: 129284 - DNA, 1205 bp, Homo sapiens
gatacatgaggggtgggagggaagatatgccggctgccctttcttatctcagtgacgtagatgcctcgggattataggcacgcggatcactgaacctcttttttgtcattcttcctatgacatttgtggcagaactttttagttgattctgttcacatgaaatgtgacaagcatttttacaccatgagacagtttactacccacatgccacacccattgtctgtctcatcagccagccccgtaactgcacccagaggggtgcagctgcaggggagctgtgcctttctcctctcctgacactcctttcacgtggcaggtttgcaggttggttggccctggtctggacagctgtgtccgtgcctgctcggctgccctccagttggtcggtgtggctggcgtgggcatgtaccccccgactcgcacttgagaagtcttgggatgccggctccctcgactccattttcattttaagtaagagtggctctgtatagccataattaactctcaaattcacattggtgtgctgtgatcaaatgaaggttggactgaatcttttcaaactgtaaccatggtaattgaggggggtggcatagaatgaatatataaaaatataatggcaattgttctgaatgactgagtgtcctcctgacatgtaattagctgttttagcaggatgtagattggcatggtcataattaaaagaatttctgtcttttatgtgattggaaatggcagcgctcccatcccctgttccctcttagcactaatgctcccaagaacatttggaacagcagctccataaactaaaataatgacatggtgctcgtgttctcccctaagtgaaacagcagaatttggagttgtttcagcttcaaaatggaagcctttgattattgttccccatttgacttctaagttctttgaaacttcactcaacatccagttccaacttgctccacctctggcagaaaccacagtcaggaccccagaagaagcccctctgaccggcccccactgcattccagcccatggtctggccagctccgggcccttgcttgcctaactcgaggatgttgctgcttgctgggctctctgggatcttcagatttcccttggttgcttgatatttccattgccgtcactatcagaaagcatttcccaaacagaagtttacagaaaattgaatcgaggtttcctcattgaat

SEQ ID NO: 129285 - DNA, 1043 bp, Homo sapiens
ggacgacgaactgccaagggtccggtttggtttacatgctacagaaaagcctcattctcatgatcaccacagcactgttctcccattcgatcaccttcgtcagcctgccttcccttctctgtcaggtcacaattccattccactggcaagtttgcccatgtgtcaaatatgaatacccagtgtttgggttattacattgtctgaacaaaaatgctggattattaatgaaaataaagtgcctgggtatggattgttccatgatgcaaaaccttttaatgcaccaacaaatcatctcagcgctgcttagtgatgtgatttgaacagactgcagtcacaaaataatctgtcgtacacccatcacagaataaaggccccgtatttaggtcagacttaaattattttttaaaaaagaaacaaatactctcacactcatttccaaagacacacttgggatctgaacgcctgattgctggctttcccaagccctcccgagcagacaccctgatccctctagtctaggcagagagggctcggaaaggcagctggggctccggtggctcacgctggcaggtgagtcagcaggctcatgagctaggatgattcgacgcttcgccctcttggatgtggacacatttccaactcctaccaaagccagagctggaatgctgctctgaggctgtcttgctctcctgtcttcttagtggctactgagatttccctaagcagactcttaaattctctatgaaccaagaccaaaccacataaacagaaacggccctaaagaaagaaacgctggaaaacagtgacgaagccagcctgatatggctgtgaagcgatctctcccgctagcttgtccttgccttgttctgcctgcagaacgccagggacactggagaggggcagccgccctgtgcccaccctcaagggccagtgcagggtggggagggatggggacagggcataggccgactctctggcaggttccagaggtctgtatcttgcttaggcacttaaaaaacataaacaaaaatttatccttgaaa

SEQ ID NO: 129286 - DNA, 1431 bp, Homo sapiens
tgcctcggctgctgtgtgtgttagtcttcatgtttccccttggcgtctcctctggtccctgtccatcttgtgcaccatgtgtccctgagggcgagtcacacctgtgtcttgagtctgctgtaaggtgttcagtctacctcaaggggtcatcatggtaagctctatcccacggcatcctccgtccatcaccacacacactggaatgtatcccccccgccctgccccttcgataacctcctgaccttgtctttcctataatcaccacaaactcctagtgcaaattggatgctgctttaaatgtgaaaacaattgttcaaaagctataaaacctgaatgaaagctgaagctgaatttataagccttgttgcatatgagccaaaagtgcaaaaagctctatataatgaactaacctgccactcgtataaatataaatatatataaatatattaaaatcagactgttctacaaaattgtgtatttgtatttttgtgtacgtacaattttctgctaagcagaaggaggatgtagtataggatgctgtgagaagagatttggtttaatcctatttctttgttacttatttttgttaacatcagatgcctgtctttgtcttatatgtgtatgacactgtttggaaagctgcagtatctctcttcctgaggtccagaggccattaaagaataaacatggggcttagaggtgtcttggccaccaaacacaggtaagccaacagagttcggctcccgtacgtggtgtggtgggacctggggcctggagccacttgtactcctggggtgggactgagggagggaaagggctcccccacttcaggctggtcactgtatgttgacttccctctgggaagcaaaattccacttgtaaaaatcagcttccaagacaaaagatgatccgatgtcacttctgggtcaccaggaagggacacaggatctctctgaactttggaacagaccctcatattctggggccagaagtttgcccagaaagcagcaggtggctctgcctggctgtagagcccagctcattggctgtccctgggcttcgtctccctcttccgagtagttgctgcctttcttcagatcaggttaccacaatgcctccccgctgctgacgcttcatcccccacacctccagccccagttacctggagcttctcagaacccactttgccggtgctaaaacacaagagggggtgaaagtggctgccagtaatggccagaaaccaaccaccagaggccaggctgaaagacaagctccgggtgtccaggggctgacgggccaaccatgtggcaggtcccaggccccacccactgcgccatccgcctctgagctccacagtggtcccactaatgggaacctcctctagggagagtgatactgcaccttcacccgtaggactcatatttataacaa

SEQ ID NO: 129287 - DNA, 1274 bp, Homo sapiens
tcatgtgtgagtgtctgcggatgacacagcgaagccggtgggcgctgctccctgcagttgcaggagaattcgatcatgcatgagcagagacttagaaatgaatcggtattcactagatggaacacgattccacgggggcggagtggcgtgaggaaggttctggaaaagccatccattgagggaattctgaatggaaaagccgtccattgagggaattctgagtggcctagtagagcaagcaaagcaaggtgtgtccccttggagattgtatatgtcatgtcaaggggttaattttattcttcttggcagaggggtctccaaaacagcttttattccaagttttaaaattctgacctcatctcccatgtgttcatgtagaatgtgaaagccagagttaaaacacagggcaatatgatgagagcagtgactggcaccttttccctggaatatttctaagccgttctgttgcctgtaagctactcatctgttcagtttcagcaacgctcagtagacagggtgattgcaggttcagccagcacttgagaacttagtccttttccatctctgtcactcacttacagggcaatgtgaatacatttaaccattaggtaaacgctctctgagcctcggtttctgtagtgtgaaatgtagataattatactcatattcacttgcctcatgggacttctccttaatatttatagctgcaaaatacttcacagtcatttttattaatagttaccagatgtgttgtaaggattaatgaacttatgatctgaaatgttttgagcccctgaaataggaggtgactgcctgcacaggggagatgtagaagagcataaaggtgcaaacagacacacttgaaaacttcagctattacgtgtgaaggatgagcacacggttatgatttcagtattcttggtggatgtatttggcatccttaaaaaggttgctgaactcatacccaaggcctgtgccaaaagcccccttcatgtggcgttcacacccgttctatttatgaccctttcctcctctgaatcctctctctttttttttttttttgagatggagttttgctattgttggccaggctggagtgatgcaatggcactatcttggctcactgcaacctccacctcccaggttcaagcaattctcctgcctcagcctcccgagtagctgggattacaggcatctgccaccatgccctgctaattttttttttttttttttggattttagtagagacacggtttcaccatgttggccaggct

SEQ ID NO: 129288 - DNA, 1018 bp, Homo sapiens
tctgcatttagaattcataaaatttatggttgaaaaagcagacccacatgccgaggctgttctaaacatacttaaaagcatttcagtgtttaaggttatgctttattaattaaaataaaaaatggactttctgagtcacattagcctcattctcagtgctgggtcaccaccagtggctggtggctgccatgtcagggctgctgccctgttggggaaatggggagggtgcacacctgtctcaggttacagagcctcaggagtggcagaactgagctttccgttgagaaagcacggttaaatgctcacgtgtgactgtaagagatttcactgacagtgattaagagtaaccaagtcattgtatttgtggaatgaatcaatcagtagagcgtttgcaggagggacggatcgagccgcagaaatacaccatgcaggacctgccagcgtttccctgtctgctgcagtgggaaaccctggcagctgcaaggtggcgagcgacatgggacatggtcacttttgtttttcggaaagctccctccagctgtagtttggaaagtggatttgaagagaatggagttagaagacgctattcgagtgcgggtagaatcctcagcagggattatcatgtgggtcagaaacccatggttgccttctggtgttgagtccttcgaggcactgcttggaggggcatgtggcaggcaggggcacagtggctcgggcgggggtcggcagccaccagtccgcttccctggtgacaccgcttagagaactcatgtagatgggatcatccccttgcagataggtgtggaagcccagaggtgatcaggtttttacacaaaagttagaatgccaagccatgcatttaaaataactatacctgccagatggacaaaagtgctggtgccgttatggctcacatattctatccacatcaccctgtcagggtctggagcctccaggcgcacagggtggtcactgaaggcctcacatgccggaggctggttcacaggcttcaggccag

SEQ ID NO: 129289 - DNA, 1056 bp, Homo sapiens
acacaagttgtgtagtgaaggaatgattattatcaaaaaatacttttcattagagtgtccttcacattttcagacaagaatgttcagttccctccctcatgcaaagatacacagacccataactgcagagaagctttaatgaaaacctggatgcttattaacctgttctttggaatcagcaggttctcaggtgaagatgttattattttcttgttactttttcttaatattgtttatcaaatggaaacggaaaggttcctggatctttttttgtaagacaaaagtcaatagtttattcagaaagtttaaaaacaaagatattcgtataatttacaagatcttttggtttgaacatattcataaggacttatgtttctcatttttatggagatttgtttttgtttgtagtcaatttctgtctgagttccagaaatgcaaaaatactgcactgaaagaggtggcagctgacaaaattgctgtctttgaccttctgatgcaagtttagtaactaatctggaaaataatgaactgcaattaatgaaatctgtactcatattcaagtgtgtttctcagacagcacataaaataattgaaggaacttcctgctctctaattagttagattgaattaatttggcataatagctttttttcatgtatctagaagtttgtgttcagatgaagctatttatgtacttcaaagttaggaactgtaaatggcgtctttgatgaatctggagaattaaagggttaatggtcagatttaatttccactatcaaaagcacagtcacaatgccggcctgtcttgatttatgtgtctgtcccttttggttagggctgccttatcaacagcagggatatttttctcctatttcaacatagcctcacgtgtggtaggtagataaaggcttgtgtagaaagagcacccctctgcccatctctgatgctaattgaaaaggtgtctgtataattatccatcttccattactgtgattcttccttatataaaacagggagaaacaagcacaaatactaattcttgccttgtacacaagg

SEQ ID NO: 129290 - DNA, 1043 bp, Homo sapiens
agacatgcaggatgttggagacagatcagagatttatctttttcgatttcaggtggaggggtgtagattactggaggagaagtaaaacagggatatcatactctttcacgtttagacctgagctattgagagagccagaggtttcctgcgaagtcctttttagtccatggtcctgagttcatctccctgtgaagtacattgaactgggttgcttcatttttctttttttttttttcttttttaatctaccccaacattttagtaaagggaggataactctaggacagctaagcatatacaacatattgggaagatagtcattgcgttgtccctggggaacagtgtgtgtagccggaccctgaaccacacttttcacctctgtcaagaggatggaggttgtagtgcaggagaaaaatcgagtgagtaattccagtggagtgtttccgcagagattcgtaggcgtcagctggaggagggaagcgcgtggtacccagtttagcatctgcattggttgctccctctgaagcagagcctgttccatcccagcgcgatttgaggtccctgtctcaggacagtgggatcagaataggtggggttgcggggggagcatgtgaggttcctcaaggttaagatgactgttcaggtagagggcagagtgagccgtgtctctgtttgtcacgctctgcagggctggcaggatctacgcattgtgtatctttcagtgttctcactttcagtatttgagtaaatgagatggagttactgctctgttctgattgggtagtgcctgctgggaagaactgcccctgaagccatcggggcctgggtgtgccttggggaagaggtggcacctccataatttgtcgttggcccaattctacgtcaagcagcccaggtgccgactccagatcagcggcttagttttcctgagggacagaccgcagccatatcagctaccaaacaaagaaaatctaaaatatgaaacaatactctcaaattaagtaagttgtcttcagaacagccatgtgtgagctcgccactgt

SEQ ID NO: 129291 - DNA, 1025 bp, Homo sapiens
tgaagttgaggtgcaggatgaatttcggcgtgtcgttggtctttccaccctggagtcagctgtgcattgaggtcttttgcaatgtgacaaatgctgtcaagacaaaatcattttttttgttattgttgttttacttgttttttttttttttttttgagacagagtctcactctttcgcccaggccggactgcagtggcgctatctcggctcactgcaagctccgcctcctgggttcaagccgttctcctgcctcagcctcccgagtagctgggactacaggcgcccgccaccgtgcctggctaattttttgtatttttagtagagacggggtttcatcatgttagccaggatggtctcgatctcctgacctcgtgatctgcctgccttggcttcccaaagtgctgggattacgggcgtgagccaccgcacctggccgacaaaatcatttttatttccaaagttattttaggagaaattttatttttaagaagtcaataaggttgtatgtttgtcatcttttgattggagtttttgaggaaattaagattagtcaatagcatgaacaaatacccagttagcagaattgaattttgtgttggctccatcgccttcctgaaagccgtgatggtttcacgcagccctgggaggagatgccaagcatgagtcactcctcttccagctgcagtgaaagctgccattggacccgaaatgtcactggcacttctcgttatttacctttttgtcactttcctgatcaaaaccagactcattcccagaaaacccaaagaatccgtatctggcagaggagcaggagtgggaaaaactgcatgggtccctggggaccaagtcaggccctccccggagcctccggcgttcttactttgtccactttgcccctgagcatggtgctgcctaccagtgacttcagtatcgactaggattttatctctttgagtctgccggtgaggacaaatgtgccctaatggcagtaaagctgggtaaggatccaaaacaaagccagctt

SEQ ID NO: 129292 - DNA, 1138 bp, Homo sapiens
cctcagcctcccaaatagctgggattacaggtgcatgccaccacacccagctaatttttatgtttttactagagacagggtttcaccgtgttggccaggctggtctcaaactccagaccgcaggtaatccacctgcctcagcctcccaaagtgctgggattacaggcgtgagccactgcacctggcccaaatcagatttttgtagagaagtactgatgtataatgattgaaaaatgtaggaggaataagaaaattatatctaaaagttaacattatttgtgagaagaaagaaaaacaagggaacggaaattttattcgctggaatttatttatgtgtaatagagccttccctgtttagcagagttttaagcatggagaactcattctttttcaaaaaggttagcactccttgaaactgtcttacttgggcaccacacatcgtagtttgtgcctgtcacttttgaggggtctggttagatgttggtactgccatctgtgtgcagcatgccccatgttgatttgcagcccttgaggaggtcagtagtggctgtggtcttatgagatggtctgatgtgagggagtcgttttcaaatctacgaggcagcgtgacagagacagaagattggctgcttcatgataattcttaaagctgagtggagttcattgtgctattccaattgttaattattctacactgtgcttttgtgtatgtttgacatttcccttataaaaacttaagaacaatgaagattaagttgatgcattaattagactttttttttttttttttttttttttttgagacagagtttcgctcttgttgcccaggctggagtgcagtggcagcatctcagctcactgcaacttctgcctcccaggttcaagtgattctcctgcctcagcctccccagtagcggggattgcaggcactcgccaccacgccctactaacttttgtatttttagtagagacggggtttcaccatgttggccagcctggtctcgaactcctgacctcaagtgatctgtccgccttggcctcccaaagtgctgggattacaggcataagccactgctgctggctgtagactcttttaagatctagattattagtagtttgcctacactatgatacatgt

SEQ ID NO: 129293 - DNA, 1001 bp, Homo sapiens
tgcagtggtgtgatcttggctcactgcaacctccgactcccgggttcaagtgattctcctgcctcagcctccctagtagctgggattacaggcacgtgccaccacgcccagctaatttttgtattttaagtagagacgggatttcaccacgttggccaggatgctctcagtctcctgacctcgtgatccgcccgtgctgggattacaggcgtgagccactatgcctggccggagatcagcttttggaaaagaaaaatattacatggtacttaggctttcttttagatatcttgtgttgcaaaatgcttttgcctctcaagtcatgttggatagtaactagttctttcctggatctttgaagtgttagacttgcatagtaaatattaaccatctaattatttaatttggagtttgcagaacatttaaaaattaagcctgtttgcagagttagtcgttgcacggtcttgggcctgtaatagattgctctgtgtgcttcattcactcttgtttgtaagatttaaaacaagtatacatctatgtctagctagagacttactgtttactctgtgtatctaaacattttctatattttccagttgtttcagatcttgtctctgtaaatcgcttgaatgcagttgagaaacggtgatggctgtaggaaactgctttcatttcttccttttctctctccatttcccctcccttttccttctctcccacttagtttcttatgccttttaaaaaaagtgcttttattctccaggcgatagggttttaaaaggaaagaaatataggggggatcagcttgaagataaacataacctcatgtgaatttgctgttagttagctaaacatccaagctggcaaacattgtttccacattatcaaatcctgatgataaaggcaaaatgaaacataaagctgattgtgtaaagactagatctaaaaacaaaataaaaagatcccttaataggcaagtttcatcatgaaaaagccccaaa

SEQ ID NO: 129294 - DNA, 1837 bp, Homo sapiens
taacttttcttatccaaagggctcgagtcctctgactctggaccagtcactcctgtgcggtccctctgtaggcctcccaggaactgaagatggcctctctgcaggagcccatctgacctctctagctgtgggttagtttttatcactggggagcacttgtgagctaataattgaaatataggcaaatccagtctttactcaggacaaaaagataaatggcaagtgaagttttgtcattgaatcctcattctcgatgttctagataaaacagaggatgatgctgaccgtgaagcgcagcttctggagatgcggttgaccctaactgaggagaggaacgcggtgatggtcccctctgctggcagtggtattccaggggccccagcagaatggtatgaaccctgtggtgcgtcttgtgaggtctgaacgctcaccaagccacttgcttttagcttgaattttgcgtgtgctacggttaatggaagagtcaatagcatggggggaaatgttgtttaaattaaaggaactgttaaattattttcatgagttgaataactatggcctaaaactgttttattaaataatgttgttattggccaaagtcattaagatttctgagaacttaaatcaatatttaataccactgcacttagcattaagaaaatagttaatatgttaattacttgggtcattcccttagaagactgttcggtcataagaaaattgcatctccacgcgattttggttttggtgctggcttaaactgtactgtcagcaaatgttctgtgctacgttatagaaattaaaaatagtaaatttagccagaggaagcccttaagtatatcattttataagaaagtaggtttaaacaagagaacttcactacaaacaggtagtgtcttataaggctaagttcaaatgtcagggtatgaagcagcagctacagtggaggctttgtggcctctctgattctggattagagtaaaatcagggccagggttattactgctttgccctgtaacagccctgaatgccattaaggctgtgttcctacgtgcatgccactgagaaagtaacctgaggcagatgccatttgttcttcccgttttaggaccccagtacctgggatggagacacacattcctgttatattcctggacttaaatggtaagttaggaggtgttttctgaaggcttacctctgaaaatttagtgcctacataacatgtagattccaaccaagtgcatcgtgaggcaattctgtccccctaaggctagagccagtttgacgtgtgtccatgtctcctggttgcagacggactgattggtgtgtcatagtctcatgtttatgacaataataggcgtgcttcaccatactcctcacctctcatccctgcagctcacggtgccatgtggatgctctgttctcctggtgttaggatggtagcagtgtttttctgcactaaaaatattttctaatttatttatttatttatttattttttgagacagagtcttgatctgtcacccaggctggagtgcagtggtgtgatctcggctcactgcaacctccacctccccggttcaagcggttctcctgcctcagcttcctgagtagctgggattacaggcttgtgccaccacgcccggctaattttttgtatttttagtagagacggggtttcaccatgttagccaggatggtctcgatctcctgacctcgtgatccgccctccttggcctcccaaagtgctgggattacaggcgtgagccactgcgcccggcttcttctttaactcttggggaaagacttctctctggaaaggacaaataactagcga

SEQ ID NO: 129295 - DNA, 2004 bp, Homo sapiens
atcaaacagctttagaacatttaggaagacaaggagaagctatgtgacatgccagaaataataagcattcagattgtaaaatgcttgggctcaattctggctctctagtgtcctggctgtctatccctgagcaagttcaataacctcttgccttcgcctgttatgtagacatgatgataacaccaccttcatgagattagtgtgaggattaagagagatgcatgtttaaagcacagggcctgacatgccaggtgttaagtacacacagctgggtagatacacatgccagaatccacagagcagagaagaatatgggagtggccacttaaccccacatgcatccgcagagtctgtgctgccaactaacagtgagagggaaatttttaatttaatttgtatacaggatttggaattttttttttttgctatactttaatgcattgtttaggagactgccatattctatgagtttccatactttaaaacagcagtaaaatactagaatcgctctagaaaacgagcgtagaaagcattcaaagcaaaatagagaaaattaaaggaaagagaacatttgcttacatgtttaagtttctgaatgttttaagaggaggatgatgataaacacttgttctctgaccccagcaaataaattttagcaaagtgaaagattagtttaaattaaagcatgtgttgtacacataaaatagaattcttaagggtgtgaagaacatctttttctgggcgtctgttaaaaaatatatgtatcttcttcgaagtcttagaaattcatctactggaaggcaagactggataattttctatgatttagtgtaaattggatatttaagtatttgtcatacttctgacaccctttactaaaagtgttcaaagaaatgttggtttatcaggaaagggctttttgaaggatatgcctctttaccttcatattgaaaaaatcatgcaagttctgaaaggatttttcttatatgatggcaaaaaccgcaattttcaccaacttaatggcaagaataaagacacagaggccataaattaggtccatttggatagaaagtcatgtggagaaagagctggaaaacaggaagagaacaggttgcagaagcttctggaggctggtttcggagggccttgaatgctaggctcatttgagtctaatatgtttgaaaattggcttgtattgttcttgaacgggaacgtggcagaggacaactgattagctttaaccatgtgaaaagtgctgtttttgtagaaataaatggtcaaatatcagtagtgacaggaagttctgtctaatagtttaagtgtacttttaaacgtttttctgtggaacagtaaaccattgccagatcctttctctccttttcttccctctccttaggaatcttcccttcaagtgcgcacttcacccttcacacttaggcacagattcacaatagatcacttcggaaagtgcttaggcaaactaagcaaataaaaggtagctaattgaaatgacaaaactgtttaggctattaaaatattttctttaggacttttcccacaaaatatctgaggcttagtccttggtgatattaaatcagaaaacatctgtatcccagccactcaaatggagtttgataggatcagtggttgcctgagctgattttcctgatcatgcagagctcttgggaactaaaatctgatggaagagggcaagagtaattgacttgcaattgaacatttaaattctgtttttcaaatgctattttacatttctaaaatttataaaccaagtttgaagtcagtaatttgggaatactgtgaattctcttttaaaatattacttcattgtaaatatataccaagtctcacataataaacagtctaaacaatcatatttactgattattttttataattatatatttatatttatattaatgatatatactgctatatcagtaaattatattttatgtattatatacaagttatttacataatata

SEQ ID NO: 129296 - DNA, 1002 bp, Homo sapiens
agtgagaaggaggtgaggtgaagcgaagaaggcctaaacctgactcttaattcatagctcatcctagaaccagtcctctttcccagtaaacatctctagaattgaagctgatgttgaagggagtaagttacgtgtcagccacaaggtagcgggaagctggagctgttggagttgggctgctttctgtaagacttcgcgtatattgagagggcttctggtgtttcagttacttcactaggaagggggaggaatcttaattcactgaagggttcatttttattatattgtacttgatttcagagcagctcctttgagtcatgtgatgatcggagatggagacatagggttgatgaccccacaatggcccattttaaaggtgatggactagtaaatgcaactctcaaatatcaccttctactattaaagtaaaataacatacaagggcacttctcacttgggaaatttatccttattactgaaaaaaagtagtacattctaagtcatatgggcttcctaaaatgaggttaaaataccatgttttttaatggaagatctcaaatatacataaataaaagtagtgagaaatgtgttacgaatccccattcaccttcgctccacaattaccacctgtggtcaacctcgtttcattcatacactcagccacttctgtgctgcccccctcccttagcaccccaggcacgccccagcatcatatcttatctgtaaatagttcagtgtgtgtctccaaaagatgagtccttaaaccaatataaccataattgccaaaattagtaatttgtcaaaaattaataatttcttaatattaaaatcgtcagttttcttaattgtcttggttggtatgtctcttggtctgtttcagtctttaggccctggtatgctcgtgctctctcactcgctcgctttctctttttgcctctcttaccacacctgcaattcatttattgtagaaactgggttgttgacctgcagtttcccatagtc

SEQ ID NO: 129297 - DNA, 2348 bp, Homo sapiens
ttgtaaaaagttaacatcctggtctcttgttattgtcactggtcggtgtgctccagatgtcatactgacttttctgtagctaacagagatcctttgccatgggccagtgatattttggttactgagaaaagggtagatgggcacaaagagcatggagcatttttttccttcctaaattaaatgacgtgtaaactgctttgttttgtgttcaaaaccctcatcgtttggattaagctgatctttccagctttagctctagtgtgctatacaaattttgaatatcccgttgttttacccatttctccagggaatatgaacatttccattttcacatcttttcccacactgttccctctgtcctgctttctccttatccgtgaagactcagttcaaatgatttcctcctgtcgcaccttcctttatcaccttgctctgaaaacgtcctcagctttcctttcactctgagcttgtcacaggcgtgtggcctagtgtcatactttctgttgtaagtttttgctggcacatgagtgtcttatttctacgacaagattatcaacttcctgagtacagtaattgccttgtacttacatggtatccacttggcttctaacagataccagtacttaatgaatgacatgaataagtgcctatcttaacttcagaaaataatactctttttcccaccaagactcaatttgcctaaaaagaaaaagaaagcagaacgagaggatgaggaccaggatccctccatgaagaacgagaatagttctgagcagctggatgtagacggagactcctccagcgaggtgtccagtgaagttaactttaattacgaatacgcacagatggaggtcaccatgaaggccctgggcagcaatggtgagcaagtcgggcgtgcacttgagaatcagttccagttggtagaggctgaggtggggagatcgcttgagcccaggagttccaggctgcagtgagctgagactgtgcccgtgaataaccactgctctttagcctgggcaacatagcaagacgttctctctttaaaaaaaaaaaaacggtagagtgttaaaaatgtttatgattggggactttcaaatgttaacaaaaaggaaaatctttatgttgctattctctgtattttgtgtctttggctttaatttatatttatcaaaatgttctgccttaatatgcagtcagatcactttgatctgatggatagaatctctcttgtttattttattttaattttttgtgagagagtctcgctctgtcgcccaggctagggtgcagtggcacgatctcggctccctgcaacctctgcctcctgggttcaagtgattcgattctcctgcctcagcctcctgagtagctgggatgacaggcgtgcacaccaccatgcctggctcacttttgtattttcaatagagacaaggtttcgccatgtcggccaggctggtctcaaactcctgacctcaggtgatccgcccacctcggcctcccaaaatgctgggattacaggtgtgagccactgtgcccggtcaaatttctctgctttagaaacttgcctgtcattggcttatgattgtatttctggaggattcgccatgtcttaggttatgtgtagaacatataatagacctgctttttctgcagggaagatggttgaggatatgtctgagaatatataacaacatgagtgattgaaagtcaggaaagctaagtttatgccaaattgtctttaaagtattaggtggtatagttaagatgacagacaacattaccatatagaacaacatttgaagtttattatgttgtaactctcgatcatgtatcttttttaaaaatgtgtttagatccgatgcagtccatattaaacagcttagaacaacagcatgaagaagaaaaacgatctgcactggagcgccagaggcttatgtatgagcacgaattggagcagctccggagaaggctgtctcctgagaagcagaactgccggagcatggacaggttttctttccactcgcccagcgctcagcaacgcttaagacagtgggctgaggagaggtaggcggcacagaggggcctgttaactttatagctcaggcttgccacctctaacacacctagggaaagtgtcaaatgggaacattaagatggtgcttacaaaagaattatgttaaaagataagtgttaacagccaagaaccactttgcatttgtttttaaaaggggaattgcccatttatattgcattatttaaaactgttggtgttaggtgttgctccattttcagttggtatggcttttggatttggatatagaagtacacttgatcattgtattatgctt

SEQ ID NO: 129298 - DNA, 1221 bp, Homo sapiens
ccagctgggcttggattacagagtaagagtaggaggatgagaggaatgggaacctttctccaggttgtaggactgatagaagcctggatttggaggaagagttgatcatgtgtagtgtacagaaaataagccttttctttttttttttttggcaggagttaagaggccttccttgtgggaggaagagcctttaatgtaaagttaaaaaaattgtacttgatatcctgtatcttaataaacgagtccttcagcaggagaggggcatgatgacactggtgtcccaggaatatcagtgttaccatgctgtgcatactcttaattatttcccgcccttccaaattcttcccttagtggtattctacccaccacttctgttgaatgccattttcatgataagcagcacagtggaactggtaaattttccttatattgataggatgtgatcattttccttgctatgggaagttaccgaagactttaatataggtctcatttctcattactgatatcaggagatgtttgtagagtctggttgtttggttattttcattcacgtagattggacatatttgtttttgttgtatattgctaccatcttttcattattggctgtaatggttccctctttactccttaatatactgtggaacaaatttagaacttttaaaaatggaggttatttattgatctctaatacttcataccataagcatcttaagtaactacatagcacttggaactttgaaaaatgggggataataatctattatacaggcatacgttggagactttgcaggttcggacttccacaatgaagcaaatatcatagtaaagcaagtcacacaaatttttgattccccagtgcatatataagttaggtttatactatagtctactaattgtgcaataacattatatcttaatatatattccttaacttaaaaatactttgcggctaggtgcggtggctcacgcctgtaatcccagcactttgagaggctgaggtgggcggattacttgaggtcaggagttcatgactagcctgaccaacatggcaagaccctgtctctactagccaataatcccagctactcgagaggttgaggcaggagcatcgcctgaacctgggaggcagaggtttcagtgaaccgagattacaccactacaccccagcctgggtgacagagagcaagactgtgtctcaaaaaaaattttttttta

SEQ ID NO: 129299 - DNA, 1034 bp, Homo sapiens
atcctgatggggaggtcactgaagatgtcaagcaggagagtttattgatcctcctttgcttttaagaaggatcccggttgaggaaagtgcacacacttttgcttttatatatacagagttaaatgagatgaattcaagacatcagatattttcaagaatgaaaactgagaatcactagtacaattagttactatatgtaatagactttatttttcaaaataaaattagaattaacaaaaaaatcatatagtttggaaagagaaaaatgcaataaatctataatgccatagcctaagagaatgtatttgaattacaacactattgaataattgtaacattgtaatgtaaacgcttggatatctcactgcctcaatagctgtgaaattaatacttctctgataacatttacaggaacgacagaaacagcttgagagtcttggaatatctcttcagtcttcgggaatcaaagttggggatgataaatgcttccttgtgaatctgaatgctgacccagctctgaatgagcttctggtgtactatttaaaggtgaagtaatgtgctttgctactagattcttgttacaaaataggacaatatttcacagtactttagtaaacttggggaaccatgcttactcagaaaacagcaaaaagttatagaaccatcttgggtttctggactcagttttcttttttagtctttgatgccattcaacctgacaatataaaaaaatgatactctgatattatttccaacaagtcaaataccttacctaccattatttaacgtgatttgtatcagggaattaagtagataactttaaaaatggatgactttgaagactaaatgattcatttagtaagtatacgaaagcttttatggtttatgtgaagcacattcttttgtgagcagtgtgttagctcacaagaaaaaaatgtataaataaagttcttaggaccagttggtatgaaatttatgtttccagtaactcttaggaaaaattaaaaatttgggttatcaatctattaaaagag

SEQ ID NO: 129300 - DNA, 1047 bp, Homo sapiens
ccttcatgtgggctcattttaggttttgttgaggtgcttgatggggctgaagagcacagcctcagtcaggtcagggtttctcagcagtggccctattgctgttttgggtcaggtaattcttttcatgggaggggtgatcctgtgctacgaataatacgaagtaatattttgtttatcagttccttcatatggacttcacattttctccctcaagccaaattgttagctcattatgggtaggaagtttttctgtccttggctcccagaaggacacataggagtcataaagaaaccaaatggagatgataaaacactgtcacccagatgctatcctattattgaatctcatatatacaatttttgctttgtactatggtttaattattgtgtttctggcttcctttcttaaagatacatggttttggtgttatattgacctgaagatttatagctcacatttttatgtactacaaaatattaggctaagcatttttattgcttatagtagtattgggggaaaataactattttgagttgtgtgcttttgaactgagcggcaaaatgctgacagggtgctgctcacatgcaggtacaagggcatcttagtgttcaatctttgtgctaaaatgtgacatttgatatatttcatttttgtaattattttggtttgttgcaccatgcaggtccctcacaaccctcggtctggttatctcagctcttgcagatcagagtgctggcaaaaacaagaataaatttgttccatatcgtgactcagttctcacttggctgctcaaagtaagtttgttttttttcccttcctggcatacttttggtggttggcaagaaggaagaaaaaagagtagactgttaatcccttccaggtatcatttcctctatcggtgtgcaaatgtataattattaggctcttatggtaatgacatttttgatggaataaacgtaggttttttcctagcaattcacatcctagcttactagaacctggatgcagtggggttgctggacgcacacggaatcacacgattgctt

SEQ ID NO: 129301 - DNA, 1172 bp, Homo sapiens
ttcagcatctagtatatagtaatgtaattatgttgttttactcaggagataatagaggatacattaagaaaaaggaaatatgaaaggaaaaaagtcaataatagactatatcctgggcgagaagtaaatcaaatattctatatctactttatccagttacatggtaataagtgacatttttaatggttgatcctagggtactatagattttagatttaagagtcatttccttatcccctgattttactgtttatatgaagggttattctagaactatcctcttcttgctgtctttattatgggtgttagtgattgaatgtggttcagcttctgtgctagtcattcattatatgtgttctacatttcttcccttcctctcctgccttcttagttactagcactcgctctccaaatgacggaagctaacacatttggagtcctcactgtcatcttaatctctctaatcttcactttgttagtgaagtctgttcattcacttagtgattcttatgtgccaggacttgtgctaggaactgcagactcccaaaataattagacattattcttgctgttctagagcccaaagtttattataatacaaatggataaaagtaaattaattcatgcctaaggtgaggataaggagaagctgactaagaggtggtcaagagcagattataaaggagcatgcgtagcaagctgaggagtgtgcacctctcttcataggcgtcaaagaaccacccaaaaacttgacgcattggttgggcacggtggctcatacctctaatcccagcactttgggaggctgaggcgggcagatcacttggggtcaggagttcgagaccagcctggccaacatggcaaaaccctgtgtctactaaaaatacaaaaatgagctgggtgtggtgatgcacacctgtaatcccagctattcgggaggatgaggcaggagaactgcttgaacctgggaagcggaggttacagtgagctgagatcctgggtgatagagcaagactccattggaaaaaaaaaaaaaaaaaaacaaactttaaggattataatttattacttattttaaaaaagattttgtgtagttcaaaagtggacacacattcgtgatttaaaataaggataaacaaaaatataaaatgaaaatcagtaaccttatcatt

SEQ ID NO: 129302 - DNA, 1257 bp, Homo sapiens
acatttagttttgctggatgaggaagatgatcaaggaaaagaggatcttagaggcagtgagtcatagtgactctcagtcaagagcaaacagaaccctcagctcctctctgttgtcagttttccttgaccaagatgataatctttaggattctaacagggagattgaattgatgctcagtgcttctgtacaaactttacttaacaaacatttattgagtgatcattatatgccaggcactatgcaagaactcacagtgtggacagaatgagagttttgtaaacaaataattaaaatacaacgctatctgcttttagcttgtgaaggaggctcctacaaattagagagcaaagggacaatgactgatcttgcccctaggagaagggaagattccagagtgtacttgcttgataacatttgtgcggagtgggaagttggtccactgggaagttgggtgagaactactcaggtgtagggaacaacctctcccacaccttgaaggtgtaaattaatcacctttggagaatgatccagcagttcagtgtggtcggagagtaggatgcacagaagtcaacatggaacaaaaggaggccaagatgggaggatcgcttgagcccaggagtttgaggcttcagtgagccaagattgtaccactgcaccccagcctgggtgacaggatgagagattcatcctgtctcaaaagaaattaaaaataaaaaatgttccaaaacaaagaggctagagagtaccttacggtccaggtacccacatcctacttaatattatatccctgtatatttttttctttgttctgccttgaacactttttcttggactttgacctcgcaaagatcatcacttttctgagatccagcccagacctactctttccagaaattcttagctgactgacttcatacctgttcattcttctgcttaatccagagtgcttgtatggcatctttttaacttatctgcacatgtacagtctttagtaatttctcctatgtttgtcttgggtataggttagtaattaacagcttacttacggtaattacttacagtaattaacagtgaattctgaagagcttcggatttgcatagctcaggatctaggtcctctacttgttacctattgaacaagtttcttaagctttccaggcctaacttgtcagcctagagggaacttgaagagggaaatgataggatacaattatctcagagggctgttgtgaagatagactgggatgatacacctg

SEQ ID NO: 129303 - DNA, 1180 bp, Homo sapiens
gttttaggtattttcttaaagtatgaggatgattaaataagtttatttttctttttttttttttttttggagatggagtgttgctctgtagcccaggctagagtgcagtggcgcaatctcggctcactgcaacctccgcctcccgggttcaagcaattctcctgcctcagcctcccgagtagctgggactacaagcacgtgccgtcacgcatggctaatttttcttttttttttgtattttagtagagacggggtttcaccttgttgcccaggctgatctcgaactcctgagctcaggcaatctgcccacctcagcctcccaaagtgctgggaattacaggcgtgagccaccgcacccagcctatttttctttctaaaggacatttgcttttcactttcacatgtgcagtaaaaaagcttctgtacttattattctcattatatttgggtgtatttctcactgcattttggcgttttgccaagtgtttattatgagcaacggaaagagggttatgtatttaacgtctcaaagagacaatagtaactctgatttccatttttttaggctctggaaaatcttataccatgatgggcacagctgaccaacctggattaatcccaagactttgcagtggactctttgaacgaactcagaaagaggaaaatgaagaacagagttttaaagtagaagtgtcctacatggaaatttataatgaaaaagttcgagaccttcttgatcccaaagggtaaaggactttgagactttagtgtttcagcattgtgaactgaaacagacttaaattggcttaagtgcaaatctttttaattttttcagagggtctcgctctgtcacataggcttcagtgcagtggcacaatcatagcttacttcagccttgaactcctgggctcaagagtttgtttgtttgtttgtttgtttttaaacccaagaaatttcaggtggaattcagctctttgtgggctgtgaggtgagggagaggcataatcagagagatgaaacctagtctttaggacagtgagtttttaaagattctcaggaacaaaaacaagtgcccatgatttcatggcacagacttgtaaagagaattggattggaagtcttaggaggccttcacaaacgctggtttgactctacagctgtaactgagtgaggaaagtgc

SEQ ID NO: 129304 - DNA, 1067 bp, Homo sapiens
aaaagaactatgtgatattctagaaagtggtgataaggtgaaagatcaaaacagatcatctgtaagatcccaccaagtagcattttaatacagattgttcctgctttttatgcatatagttttttggtacaaatatggaatcatactctagacttttataactttttcattaacataaactttttttaaattagtaagtcttctataccctcaaatctatacttgcacatgggcatgtcataatttatgtaaacattctgctattttaagctattttggacatgctatagtgagcatctttaaatgttatttaaaaaatatctttttctttgactacaaaaataaaaatattgaaaaaatataaaaacatgaaacagatcactaatttcgctgcaaaaaaataaactatagatgtaattctgtgtgtgtgactgtaggtgcatgtgtgtgtgcaatagccattttattacacattttgtgaatagttttccatgtaaaatatagagtcatatcacctatagcatgtttagttctcattgtaagcctctacatacataattaattcccattgtatgacagtaagttgttttatttcactattatgaacagttctatcagttatggtttataagtaatgttgaggttttcttaacacacacttatgttcattttcaacaggtgtttgcttatgatcattgtttctggtctatggatgaatctgtcaaagaaaagtatgcaggtaatagaatccagcatcctgtcaactactgatggtgtagaagaggggttcagtattttttcccttacacgattgcttggcaaaccccccaaactgtgtgtttcctctgctgtcacaccacaataacagtcatcaacacagaagatgacttaatgtgaccaaatgttgggggagttttccctgcaccccaagcggcagacactggctgggtgtcctctaactcagttccgatgctctctacctggggacagcgtcagatccacagactgagggctcagtcccacaagaccgctccctccttcccaccagcgcaggtccaggcctctag

SEQ ID NO: 129305 - DNA, 1023 bp, Homo sapiens
ttgagatcaagagttcaagaccagcctggccaacatggtgaaaccccatctctactaaaaatacaaaaaattagccgggcgtggtggtgtgcccctgtaatcccagctactcaggaggttgagcctggagaatcgcttgaacccaggaggcggaggttgcagtgagccaagatcacgccactgtactccagcctgggccacaagagtgaaaactctgtctcaaaaaaaaacaaaaaacaaaaaacaaaacatgcatactattttccatagaggttgtactaatttatatttctgccagcagtgtataagtgtttcagaagtctttttgtcaggaaattcttctacatctcttattccagagaaattattttcttttatgtattagccatgttggatattactccaaaatctcttaaacaggtatcactcatttgctagactttctgtggtgttttaatgttcttgtcagaaatcacttgatacaaataagtattaaatttcttttagaagaaaatctcaggagacaaagcaacaaagagatggtcgaagacaattggaagcaaacattttcatgtacagtttcctttcaggtttcaggccctgaaagttgagttttgatcctctgagaagggccaattattattgttcctattttattccagtttcaaaagtactttcctttattcttaaattgtttgatttcagtattgccctgttattatgtaagtgaacatcatcgtttttaggaagtttagaaaagcttgtccaaccggacttagtttgttgtgttgttgttctgttttgttttaggctttaagcagcctgaagccatggtctttagtttctatctctagtgataagcagaaaagaaggatgaggaaggggctttactggcccagccagaaacagaaaccgtgaacccatgactgttttctgtgttttggacacccggattgttaaagaggcatgtttgcaacttaccctcaaatggttcaggaaaaaaaaacatatatgtgtatgtgt

SEQ ID NO: 129306 - DNA, 1035 bp, Homo sapiens
agtatgacgatgagaaacagagtgtttacatagtttaaaagtttatcccccacatgattcttatttgttacgaaggtaaaaatagtaattttactgtgggaaacctcatagatccagccttgaccaagtgatcagaattaacatgatcagtaatggcacatgcacctcatatgactcttggtagaatgcaccaaggagggcgcaatgtgacttcagtggtgggcttgccaaaatgcacaatctggatttagtcaggaggaagcattaggcaaacccagattgagggacattctacaaaataaatggccagtcctcttcaagtgtcaaggtcatgacagacaaagtgccccaggttggaggagacatgacaagtatatgtaacacaaggtcttggaccaaaaaaaggacattagtgggggtaattggcaaaatttggaggaggttgtctataggttatttaataaactgtgttgatggttaatttcttggttttggtcattgtagctgtggtgatataagaaatatttggtggttaacatttgaggaagcttggagaagggtgtacaggatttttttgtactatttttggagctttttgtaagcctgaaagtatttcaaaataaagttaagcaacaacaacaacaaaaataattcaactcagctgagaaattacagctttagtgcttgtacttgagacatttctctggattggtcagcagctgcttttgcttcctgaatctccacagtgatctggatagttgaggtttctaattaagggatcttgggatgagtgagacatggctgtattgaattgcagctacactttgacaaggtgttgtttaattaattaatttatttatttttgtacagggttgtaattacatctttgggtgtcccatgcctttgcaggttatttgagctttactgtcatagccatcagaatccctagctgcaaacttagctctgtaattaatttactggtttgtttctgtttttattatgatgatgtgaattcaggttagtcccatggattct

SEQ ID NO: 129307 - DNA, 1087 bp, Homo sapiens
acactcccacagaagccttggtctttgctttctgaggaatccacactaagacgtcctctcgcatgcccttgtctgtgtcctcagggattctcttgctgtgtgttgagctggctgtccgttgacctggcctttttgggcctgtctggtccctttgccccccagaacttggtatggatagtaaggaactgaacttaaatattaggaagaggataggccaatttatagattgggttaatttttaaattgatcaaccccgtaagcagtagcaaagctgcagaacagaggtgctgcgagggagtttaatgattaccactgtgtctggggatgggaaaggcaagagttggttgaagagaagcatgactcagacttgggtgtgagtgctgggcctactgtttaccagctgtgtaaatctggaagtttatatcacctccctgagcctctgtttccttttctatgaagtggaggtgataacactgtgatatggatcatgcaagattaccgtgggcatgagtgagttatttatgtaaaatgtctggtacatggtacctacttagtaggtggtagctgctattttgccttgatttatttattcttgtcaactctcttaaacaaattttatttattaaaacatcatattttaagtaatattcttttcaaataacactggcatatatggtaggtactcaataaatattaactgggttagacatgtagtcaattataataccaggtttctaataacaaatgatgcccttttgcttttaattgacaataatcatagctgtttaagctgtagatctaagtgtagtttcttgatgccccagatagcaactgtaagatgtttatttaagggattgtgggtttcctctgaagagcatcaatttgcataatattgctcagagttggtttcttgaactatcattatcataagaaaaggaactccgtggtcaaggtctttgaatgcttagaaggtgtcagtaatgcagacacagccagcacagcattcttggaaatacaagaagtgaatagagactttagtttgtggatcttctcattgatgacaaccagcatttatttataggcatta

SEQ ID NO: 129308 - DNA, 1084 bp, Homo sapiens
ttgattgattgcagtggttctgttagtgctcgttctcaaaggcctcctgctctgatgttaccctcaaatagtagtttgaagggtgatttgcaagtctggagttggaatttctgaagggtacttctcaagacaacagaacctgatgagctatcttcttccaccccactctgtggagttcagtattctagcaatggctgtccttgtccactagatagatagattatcttgcttggacggtgcagatggacgacatttgcattactgtaacctttctagactcccaaagcaccacagcctttgttttgcttttgtcactttgacgacaatcttttgtgtcaatgctgtttcattggttgtattttatttttattttttaagccattatagagctaggttatattttaagtttgatgtttctttgtgatctaatattaggattatacggtagaataaatttccattgggaagaatttcctgaagattaaacaattctgtttataatgtgtagattagagattgcatactcaggcaccatagtccatattttacccagagatatgttttgtttggcctgaagttggaacatttaaaaatcaggttttgtataaagattcagattcattgtgtttcttaaataatctgaatctggcaacactgggttttctgccctcttccggctcccagctgttccattccgtcatttttatgatttgccaggcccctgtaggccttttccttttcaaccttggtgtagattcttactggcttcagtcacaaaagatgtcctttcctgaccttggccctgggttttgaagctcacattactttttctttcctctagttttttttttttttttcctttggtggtaaaatgctcacaagaaaattaatcatttaaccatttttatgtgtatacagttcagtggtgttaaatacattcataatgttgtgtaaccatagcactattcatcttcagaactcttcttaaaaactggaactctgtgctcattacatacgagatccccattcctcccacccctaggcctgggcaaccaccattttactgtatatatgattttgacta

SEQ ID NO: 129309 - DNA, 1049 bp, Homo sapiens
gtgtgccaagtatcaagctgagagttaggttaatctttaccaatccttagttccattaaatttatggtgttattaatttttttacatgatgtatctataagcatactagtaaaaaaaagcaaaacaaaaaactggaaagcagaaaaagttattctgttgtgcatcttgttagattttgcacactcaaatttgaaatgatttgattgtttaattttgagaattgtacattttcttgtgagaaagttttcttttacaaagaaaagcgtttagaactctggagtcctcaaacttcttccacagagttcttttaaaaagcacaggtattttatagatggtaaatttcacctttgctttacttctatcaaacgtaatttatatatacttttaattaagtaaaaacttatataggatgggtcataattattaagagtagtgactatctttatgttttgacctgtatatacaagtcagtaatccttttgttccacttttaggaaaattgaaatagaatttatgtaaagatcatcgaatatgtaaaagttttatttgcaatttaatttttaaaaacttttgttatggagaatttaaaagatatgccaatttaggcagaatagtataatagtataatgaacctccatgctcttgtcactcacccctgaaaaccattaatttgtggctgatactgtcctagctacatcttcatccctgtcttcttccccatattattttgaaggagatctgattttacccacagatgttttaatgtatcttttattatttgtaaacataacctcaataccatttatcatatctaaacaatttaaaataggtgtgaggaggaggaaaaaaatatagtgaggtggtggcatcaaattttcagtgtttaaatgcccaattatctcatcaagtctttttttccccgaagtttgttttgaataggattgagatgtggtctgcactttgaggttgggtggtatggtttttaatttattggctcctcagttgttgaagaagccggatcatttgttctgtcctgtggatgaattaat

SEQ ID NO: 129310 - DNA, 1032 bp, Homo sapiens
ccccatgtgtcatgtttaacctaatgaacaatagacagcgtaaaggttacagctgccagtctaatgggaagactgagatgttgatcacatcatcttttttagtaaggccattaaaaatctttttgttccttctgatagttttactagacatcaatttagtcagtatcattaggtaattaatgagtacctaatatgaacaaaacacacccaacccttctttggagcttcagtgtactctgaccctggtggatgtacagattggagcccttaaagtatgtgcagaattgagtgagtttgacccatgtccatacacttctcttgcaaattatattgcataatgctactgaggggagggccttatggcatacatgaagtcattttcagactaattccttgttagtggaaggcatcattaggtcatattagataatgactttttagatttctctactgctatatggatgctaatttaaatagcgattttaattgaaggaagtcatgcaaaatgtaattatggtacccacaatagacctgtttgttctctctgctgtgaaatgacttgagtggggctaatatttctcctcaaatagagtctgctcctctggagaacagtacgtggtatgttttaatttcataatggggctcttcctcagggagcccgtcctgctaattttattagagtacagtggggagagcgtggttctgtgtactcagaagttgtatatgattcctcagcctctccctttaaaaagaatactgtgatcatttactacttttgaatatacttgtgaagatgaatcagggagactcttaaaagctaaaaagataagaaaatatgtgtggttgaatgcatatcattgcataattaatggaagcaggtagtcaaattgcagcaaatacaaattttgcaaagttttaccagcagagtctagctggttgccaaaataaactggtagccaatagactgctactatagaatttgatattttagcattatcattgaatataaatattattttgctcatgctttta

SEQ ID NO: 129311 - DNA, 1458 bp, Homo sapiens
tgaaggtatgcctgcagcccgcagtgatgtctttcctctaaatacctgtcagttataatctgtcctacctaatttaatgattatagattgttttggattgtaacttccagctgtacagtggattttaatgtctttgggggaaagagactcgagggctgaggatgaatatttgagtatcatttctagatatgtatggtagtatgaacaaaaggaaagggaagaacatgaatttggggcaggaaaagattattttgggttttcttagtaaatggaggactgtaaataagctgggataagattacagaagacctggaaagcagatgaggaagtttggcctgtatttttgtcaggaagattttgtttttggcagtttttgagtattatgattgaggatcaaggtggattaggaaaagttgttgattggcaatgtagagaatgggtcagagtggggataggctgaccttttctggagatcagctgtatcagagatgtttttgtattggccctgaaagtggagaggtgaaagacatttggcatgaggctttgtgcaaagtaggattcataaatccttctagaaccagcgctgtatttggcactctgcagatattcttttgagttgagtttaattgagttgaaaagagcactgggctgggcgcagtggctgacgcctgtaatcccagcactttgggaggccaaggtgggcagatcatgaggtcaggagatcgagaccatcctggctaacacagtgaaaccccgtctctactaaaaatacaaaaaattagccgggcgtgatggcgggcgcctgtagtcccagctacttgggaggctgaggcaggagaatggcgtgaacctgggaggcagaggttgcagtgagccgagatcacaccactgcactccagcctgggcgacagagcgagactccgtctcaaaaaaaaagaaaagaaaagagccctggatttggagaaaatctgaaatcgaatccttcattatgttatcatagtgagttatttttaatttttttgaacctgtcttacgtgtctcacaaaagttttttcccacaaagatcaaataaattagtgacttttaaaagatcttgcaaagtgttctgtacatgggcaggtttattgttattaacatagagacacatacagcaaaatgtatagcttgatgaattttcatagtgaatacattccttataatataagtggcacccagataagaaacagaacgttgctagcatggcaagagactacatcaggagaagtagtttttcttttttttcttttctttcttttttttttttgaggcagagtctcactctgtcgcccaggctgaagtgcaggggtgccatctcggctcactccagcctccgcttcctgggctcaagcaattctcatgcctcagcctcccaagtagctgggattacaggtgtgcaccaccatgcctggctaatttttg

SEQ ID NO: 129312 - DNA, 1097 bp, Homo sapiens
agctcagcaaacaaggccggacgtcaatccaggcagaggaaataacttgagccagggatcaaacactaagattggcaggaaatgagcaggaagaggtagcggggtccctgacgccatctattcaattgtttttcagaagaggtatcagctcttgaaggcttacttctcaatactggctgcgagagcaagaatggtgtgtaatttacaaaagccgtcattgctgtaggtaagttgtagcaaacgactcgcgcccgagcattcccgcccccgccttcgctgcggccccgcccacgacgaccctggggaactacaagtcccgccatacagcggggagcgcccggagctcgcgccggccccgcccccagcccggtccccacccccggctccgcccccggccccctcccgccgggtcaaccccgaagagtcgccggtggccgcggcagacggaagccgaacgagttcctcggcggctgcaggatgggggactccaaagtgaaagtggcggtgcggatacgacccatgaaccggcgaggtgagagccgagccctcctgggccgccggggcggaggcggcaggtgcctggcgcgcccttccctcggccgccgtggggggtccggcggccccgcccctatagtcagcggcggggcgcgaggaggggcccggggaccctgaaacccgctcccgcgctgagacgcccggctccctcttctcccctcccttcccccctggccagccccgtccctggcgccgtcgggcccctcgtgccggccccgctgccccttccgcctgcgcccgccccgcccctgcgcccttttgccctctcgtctcccccggaggttcccgagggcgccctcggccctcgcgcccagcctcgtcctggcccctcagcctcgctccttccccgccagctgtcatcgtcgcccccgcgcgcgggtcgccagcccctgcagcccgcctcgggaccgcccgggaccccccgggaccccgcgtctcgcccgggtcgcccaagcctgcaccgccttggcccgcggcgggaagaagggcagggggccaggcgggtgccccgcggcgagttccttccacctgggcgtcctgag

SEQ ID NO: 129313 - DNA, 1170 bp, Homo sapiens
gagacaacacagttggacatttccactttttccttgattcctggaagtccagtgggttctgcagctgaaaaagccctgggtcccagcagcagagagacaggacagaggggatgcttgggcggggagggacggtaacctgcagaacagattccatttttatagaacgagtacacgtttgctaaaacagtcctgctttcccagactggattcccaccacagggacagtcggaactcaggactagctccagcgacatctttcctccgaattcaagccttctatcacaatgtcaaaacagctatttataaagccattttcattgtacttgataacagcacgagtcccaaaacttttagaaataaaataggacattggcttgattgaaaagagggactttttaaaaattgttctttcgtcagaagccttttggatgacttacaatagctctgatgaagataccaccccagcgtcagtccaataggtcagtgagtttcaacaggcatccatccctcccatgaagggattctggtgatgggaagtttctgtaatgacaggaaagcattgaccctcattgattgtcaactttggtattagccatgaaagacaggatgctcattgggtgttctgtagagtgaggaatgctgcctattccctcccagaacgtctgacccaggggtgtgtgttgaggagccctgggggaaatggaccaagttttcccacagagcagtattaggctgaagagcaggtgactggtaggccccagctcccatcattccctcccaaagccattttgttcagttgctcatccacgctggattccagagagttttccaatttgggaagccatgagaaaggtttttaaatcttgggaagatggagagagggacataggatagttgactccaacatgacaggaagaggctggagattgggaattggccatcaaccaagcctgtagtagtaaagccatggtcccgcattggaattacttggggaacttatacagttctgatacccaggctctcctagaccagttcaaccaattctaggtgggggactcaggcatcagtgtgtttcgtagctccccgggtgttttccctgtgcagccgagcttgggaaactgccatgctttttggatgtcaaggcgctgttggaggctgggtgtgacagca

SEQ ID NO: 129314 - DNA, 1464 bp, Homo sapiens
gggcagcggagaatgatcaccttttgttcagcccggattttcgactatctgatggcggcgcgtgccggattttagcgagccctggcgaaactctcggcggcgagactgtcttgtcacatttggtagtcggaaatcctggaaaaatcgcgtgctgtccgagtccctggagggacctggcgcccgccacacctgcagggcagggtgggtccgcggccctcgggctagggagcgggcagggcgcgtggggtccgggcgccccccgccgcgctgcgcctccgcctcccgccgccgcattccgcgcattcttccgcgcgggtagggtctgcgcttccgagcccggtaggcagttcagacccccccacacccatcaaagagccgctcctcccccccgcaggcgccttcgccgcctccctcccttcctttcctttccgctcctcttccgacctgtccacccgggaggaagggagctggaaagggggcggaaacctctcccctccaaaaagcacaacaaaactgttcagtgcggaggagccgggttcgcccctgccggacagcggggggctttgttccccgcagttgtttcctgcccatttgacctgtcagctgctggggaaacgctgctgttgacctttggttgaactgctaaggcgattttgctgatttttctttctttttccgcgagggctgtcttttgctcctccaaatgagcccagtccccctcccttctccccaaagcgctccaagagaaagtgccaggaaggggcttgtcccggaaggcctggcggctgagcggggccaggtcctggttaggccaccagggtgggcgtccgcgccattgtttgagcttgtcggcgctggtgggagagatgagggcaattcctctgggacgcaagtcccctcgaatggccggggctggccgggatgttccccgcacggcgctgccctcgagtccccccgatggagagcgcgggcgcgccttccttcgctggcgtccaaacccgggaccagctagaacacagcagggctgggactgggttccagccccacgtggagtctggatttgttttgttgtgttttgctttccttcctggaagaaatcccgaggggaccgccctagagcggcagctccaggacctcggcccttgggcttccgggggtgcagccacttaggccccgctcccggggagagagggattattttttaagatttatccccagggcgcgcggcatttccctgtccctcgtgaatcccgttgagagtcctccctccccaacctcctccatttccccagccagaccgattcgagagccctggagattctgggcgaggctagtgactgggtagtacaggcctctaggtaaaatgacagccctctggtgggtggcgaggtgcctggccaacataagagaagtactttaagggctgtttcctcctggagcctgcactgcctctcgtagtcggcc

SEQ ID NO: 129315 - DNA, 1078 bp, Homo sapiens
tatagtgagatccggtctcttcaaaaaacaaacaaaaaattacccaggcttgatggtgtgtgcctgtagccccaggtactctggaggcgaaggtgggaagattccttgagcccagtagttcaaggctgcagtgagctaagattgcaccactgaactccagccttggtgacagagcaagagcctgtcttttaaaaaaggaaaaaaaaaaaaagagaagtctatttatttggttcatagtctgttgacccctaaaggaagcatcagaagccactgcataaaagctgtgacatgaagctcaggaagattttttctaagatatttgccagctacaaggcattgtccaaatatgggccttatttccagaaaaaaaaaggggagggaggaatgccatggagtaagttattctcgggagtccttgcttattcttaaggattgtactaggcccagccagtctcatttgctacttggaaatgagggcatgtgccttaatgtgtgggatttctattaagcgtgaaatttgaccccataagtactacttaatctcatgagtaccttccatgtaagattgggtcttacctaatagactttgaatatttcagtatcagttgaaaagtcctctctgtaatgagaaaggtgagctggctctcagagcttgattcccttaaacatgggattctccctaattcccttcatttggattccatattgaaaaagcagctgtttggctgggcatggtggctcatacctgtaatcccagcactttgggaggctgaggcgggcggatcatgaggtcaggagatcgagaccatcctggctaacacggtgaaaccccgtctctactaaaaatacaaaaaattagccgggcatggtggtgggcgcctgtagtgccagccacctgggagggtgaagcaggagaatggcatgaacccgggaggcagagcttgcagtgagcggagattgggccactgcactccagcctgggcgacagagcgagactccgtctcgaaaaaaaaaagaaaaagaaaaagcagctgttttagttttctgggaatgttataacaaagtaccacaaactggg

SEQ ID NO: 129316 - DNA, 1033 bp, Homo sapiens
atatctttttcctctgggcaacttccttttctggtttaggaacaatccgttccttttcagtaaggatcatctcaatgtggcagggagagctcatgtatggattaatccgaccatgagctctgtaggtccaacggtgcatcttaggtgctttgttcactaggatatgctcaatgaccagagaatctacatctaaacccttaagttcagcattactctctgcatttttaagaatgtgcagcaaaaattcagcacttttttgggccaccgaccttgtgtccagccccactgcttggcctaggcacatctgccagctccaccattgtaacgtcgaaatggtacacactgcttctgtaaagtgacatttttcagatactttgtggcttttcgtatatgcatacccttgatggcctgggcagtttcacgagtgttcttaaagagaacacgaagatttgaacctcttgatttgcatgattttgtgcggttgtcagggtcaagtgaatagtgaaccattttcacagattgcctcaggctgcttagggaaacagctaattatgccatctttagccttgcatcttcagagagagagaatccaacttggatgcaaaacctgggtacgtccttcagtctcctgagctctcaaacataagtgatgataatatctgccttgcaagactgtggtaaggatgagaaatcaagtaagaaaactgcaccaggtacgcactactgctttctgcaactttaatcaacaaatccccaaacaacagtcagtcttcttctgagttgttcaaagaagcactggatgggtcagggcacaggacaggcccattagtggtgaccgcccctgagccagttatcaactcatcaaatttaataactgaactgccgtcaaatataagctacgcagaagcagagatcttagtctgttttgtttactgaaatctcacatacatagaccagtgcttggcacatagtaagtactcaacaaagatttgttaagttaatgagtgtgattctgtgagtggctctgtcctca

SEQ ID NO: 129317 - DNA, 1016 bp, Homo sapiens
aaactggcaggagaaatttccaaaatatttagtcatgtacctccttctggaagcctccctctgctcctcagtgactgttggaattccacttggcctctcttgccaagaccaagtgatgaacagaggcgtctggttgggagtttatgggcaaagctgggatagtcagatgcacaagcatggtgattgagagcttctttgagcatttcaaaaggctgttgggtaatttgagccccagcacacagctgtgtgggccctgagctggggctggccccccgaccaggctagccactttgcttgcaggtcagaccaaggcagtgagcaggcacagggatctggaggccaggtgtccagccctcccgtcagtctcctgaacagggcctcctggaagtccccacctccctgcatctcaccacagggatgggcaccaattcaccccatgactaggtgactctcgtgaaccaacaacattttagaaactagtgaaagagagatggctgaagacacaatggatttgggtgttgactatagtgcctttgggggcaaaagaaagcacagataagttcaaatgcatccccaagtatttttttgtttgtttgtttttgagatggactcttgctgtcacccaggctggagtgcagtgacacgatctcggctcactgcaacctccaccttgtcggttcaagcgattctcctgcctcagcctctcaagtagctgggactacaagcatgtgctaccatgcctggctaatttttgtatttttagtagagatggagtttcatcatgttggccaggctggtcttaaactctgacctcaggtaatccacctgcttcggcctcccaaagtgctgggattacaggcatgagccactgcgcctgaccatttacagggggaaaaagcatctcaagcaaagcatctcaagccctaggaaaagcagcagttaaggactgacaggtgcagcagtgacccaggggtgggttgtcaccattgagctgcaggacggccggagagtctggc

SEQ ID NO: 129318 - DNA, 1460 bp, Homo sapiens
gtgtgagtgtagtaggcttgatgattgggaaggttgctgtgggaggcgatgcactgtcctgcttagcccagttccacctagtggcacactctttcctttcctcctatctcattcatttgctgacaataaacatgtatgacttgtaattttataagcaattctaatgcatttttaaaaactaatgtaaattttacccctctcattctaggatatggtggtaccaggagacgataaagtagaaagttggagtcaaacactggatgcagaaattttggatttttcatcactttctctttagaaaaaaagtactacctgttaacaattgggaaaaggggatattcaaaagttctgtggtgttatgtccagtgtagctttttgtattctattatttgaggctaaaagttgatgtgtgacaaaatacttatgtgttgtatgtcagtgtaacatgcagatgtatattgcagtttttgaaagtgatcattactgtggaatgctaaaaatacattaatttctaaaacctgtgatgccctaagaagcattaagaatgaaggtgttgtactaatagaaactaagtacagaaaatttcagttttaggtggttgtagctgatgagttattacctcatagagactataatattctatttggtattatattatttgatgtttgctgttcttcaaacatttaaatcaagctttggactaattatgctaatttgtgagttctgatcacttttgagctctgaagctttgaatcattcagtggtggagatggccttctggtaactgaatattaccttctgtaggaaaaggtagaaaataagcatctagaaggttgttgtgaatgactctgtgctggcaaaaatgcttgaaacctctatatttctttcgttcataagaggtaaaggtcaaatttttcaacaaaagtcttttaataacaaaagcatgcagttctctgtgaaatctcaaatattgttgtaatagtctgtttcaatcttaaaaagaatcaataaaaacaaacaaggggtttagtctcattctttctattagcctaggcgcaaataaatgttactttttgtttttttaaaccctttttcccaaaggggaaagttcatgcagaagttctgtctccctaaacagtaattttatgtggtagtcgtaccttagtcttttggtaaatgttttcaaaaagtaatttacaaatggtgtggaagcctctgccaaaaaatagcgtttgaaaaaaataattaaatctccaagcctcccaacccatcagagattgcatggttacacttagttaagcttcataacctcaaagccccagttttatatcttatgtgtttaatgatttttgccatttaaaactgcagttacttttcaccaaccaataagaaccaatttaaaacaaacccttattaagactattgcataataaaactatcctcttttcatcagtaaaaca

SEQ ID NO: 129319 - DNA, 1030 bp, Homo sapiens
agcccctcattttccttcccttagacatgaatacttaccattgtgaattttgcggatcattcccttgcttcattttgcaattttatgacggatatatagcccaagtaacatttttttttttcttgagacggagtcttgctctgttgctcaggctagagtgcaatcacgatctcagctcactgcaacctccacctcccaggttcaagtgattctcctgcctcagcctccttagtagctgggattataggcgcctgccactgcgcctggctaatttttgtatttttaataaagatggggtttcaccatcttggccaggcgggtcttgaactcctgaccgcgtgatccacccgccttggcctccgaaagtgctgagattacaggtgtgagccactgcgcccggcccccaagtaacatatattaaatgaaaaaaatgtttgtttctaatagtctgtttctatttttcttcacagtgggaatgtaagacggacttagatattgcatacaaatttggaaaaactgtggtgagctgtgaaggctatgagtcctctgaagaccagtatgtactaagaggttcttgtggcttggagtataatttagattatacagaacttggcctgcagaaactgaaggagtctggaaagcagcacggctttgcctctttctctgattattattataagtggtcctcggcggattcctgtaacatgagtggattgattaccattgtggtactccttgggatcgcgtttgtagtctataagctgttcctgagtgacgggcagtattctcctccaccgtactctgagtatcctccattttcccaccgttaccagagattcaccaactcagcaggacctcctcccccaggctttaagtctgagttcacaggtatgtttccctcgcagtggccataaatagagcgggtgtgaggttagtgcatcctgtgcttggttctgaaatagaaaatcgttgcattgggaaaccaaaggaggtttgtcttctcattttgttttttactttcaacttcttt

SEQ ID NO: 129320 - DNA, 1469 bp, Homo sapiens
ccttcaaaagaatgtacatgggtgtgtttccatctgtgatatgctaaaatttaatctactctagatagatttttatattaaggaagagtaagcacattcctttataaacagaaacttgtagaattttatgctgcttcttcatagcccagaagtcaagcttgtttttgaatggtcatttcatgactttctttttaaaggaaccaaaggtaaatgaaaatactagtataaaagtaccacttttatactataaatatatttatactgtatatatttatatatatttatactatatatttttttactatatatatttatactatatatatttataagtatgtgttcagcactgtgacaattattgttacaaggcatgcttcttttagatcataattgggatacaactagagccttgatttttttttttattttcctttcgtttttcatgcctgttgactgagtgtatcttatttccatagattgagtggggagcttgtgcacttgttctcacaggaaacacagtcatctttgcaactatactaggctttttcttggtctttggaagcaatgacgacttcagctggcagcagtggtgaaaagaaattactgaactattgtcaaatggacttcctgtcatttgttggccattcacgcacacaggagatggggcagttaatgctgaatggtatagcaagcctcttgggggtattttaggtgctcccttctcacttttattgtaagcatactattttcacagagacttgctgaaggattaaaaggattttctcttttggaaaagcttgactgatttcacacttatctatagtatgctttttgtggtgtcctgctgaatttaaatatttatgtgtttttcctgttaggttgattttttttggaatcaatatgcaatgttaaacacttttttaatgtaatcatttgcattggttaggaattcagaattccgccggctctattactggtcaagtacatcttttctcttaaaattatttagcctccattattacaaaaaattataaaaataagttttcagtcagtcaggatgacatcactcccaatgttatgcagacatacagacggttggcatacgttatagactgtatactcagtgcaaatatagctgcatttatacctcagaggggccaagtgttaatgcccatgccctccgttaagggttgttggttttactggtagacagatgttttgtggattgaaaattattttatggaattgctacagaggagtgcttttcttctcaattgttagaagaatttatgttaaactttaaggtaagggtgtaaaaacatttttgagataaggtttttatttatgtttattattgttagagtgagttgcaatgtgggaagaaatgacattgaaattccagtttttgaatcctgtttctatttataagtgaaatttgtgatctcctatcaacctttcatgttttaccc

SEQ ID NO: 129321 - DNA, 1030 bp, Homo sapiens
aattagtcagagacagaagatgatcatcgctttactaattatggtaatgaaaaatcaaaatgatcttaaggccaggtgtggtggctcaggcctgtaatcccagtgctttgggaggtggaggcaggaggatcacttgaggccaagagtttcagaccagcctggacaaaatagtgagaccctgtttcttttttttttttttaattgtctgtgaggcattttgtttgtaaatatatgctgcattacatccctagaaaaagaatcccaggattttccctcctgtgtgttttcatcttgcttcttcatggtccatgatgccagctgaggttgtcagtacaatgaaaccaaactgaagggatggaaacagattttctgccatttttccagatctttgagttgcacatcaaatctggggctgatcactccacacttgtttagcctgtctgtgaggttcacaacaattttcccagctctgtgatcatcaatgatttcaaattcgccaatgtaaccatgcttcatcatcacagtgagaaaccagacgatgactttggagcacggcctaataagcacctggctggcgtttgcctctcttttcggcattgttgatgctcttgagagcatcagccaggacattcatgcgcaccattgtggcggcgcagaaagatggcaggaggagcagtgagaccctgtttctataaaaaatttttaaaatctgaaagttagcagaagattgattaaatcaactgtgactgtattaggtggttatttaaaattacattgtagaaaaatgcttatagacataaagtttaaaaagcaggctataaaatagaaattagtatgaatctactgtttgggaaaaaaatctgtatatatattttttgatttgtttttttttttttttttttttttgagacagagtctcgctctgtcttccaggctgcagagcagtggcagaatcttggctcactgcaacctctgcctcctgggttcaagggattctcctgcctcacattcctaagtagctgggattaca

SEQ ID NO: 129322 - DNA, 1101 bp, Homo sapiens
atcactctttcttctctcatgctcttgacccagagggtcacgtccctctctctggacatttgtgaggggaaagtgaaggcagcatctggaggcttcaggagcaggagctctttgtctgagcatgtgtgtaaggcactgccctatttcagctacttgctctttttccctgctctcctgggaggctctctgtgctccttccagcgatttcaggctcgtgttcaagggtccagtgctttgcatcccagacactctttctgggctctgagctggaggggtctgcagattcttggactagaatgcctaaacgtggcagtgagcagggtggtggatgcaggagcgggactgactgattgccagcaattcgagtgcatctatgtcgtgtggaccacagctgggcttttcaagctcacctactactcccactggatcctggacgactccctcctccacgcagcgggctttgggcctgagcttggtcagagccctggagaggagggatatgtccccgatgcagacatctggaccctggaaagaacccacaggatatctgtgttctcaagaaagtggaaccaaagcacagctcgatggctccgacggcttgtattccagcacagcagggcttggccgttgttgcagacatttgccttctctgcctggtggcatggactccatccaggacaggtgtttggtttcgtttgctgggccgtgatggtggaagctgactacctgattcactcctttgccaatgagtttatcagatcctggccgatgaggctgttctatagaaccctcacctgggcccacacccagttgatcattgcctacatcatgctggctgtggaggtcaggagtctctcctctctctggttgctctgtaattcgtacaacagtgtctttcccatggtgtactgtattctgcttttgctattggcgaagagaaagcacaaatgtaactgacatctttccctggctttcaccttaaacacccaggaaacattttagaaagtgccagatgacgcatcgataatgcatacatttgaacttttccataataaaattttttctaaagttttggatggatatacccagtgacttgcagta

SEQ ID NO: 129323 - DNA, 1049 bp, Homo sapiens
gtgatctggagatctcatgttcctggctctctctggtgatcacaattggcttcagggtcacttggagcacagaggctgtgatgctccaggcggtcacctatctgattctagcctgcggttggttcacttgctttgccatcctcctgactatacctagaatttttttttttaattttcctgtaaagactattttcagccaggcacagtggctcactcctgtaatcccaacactttgggaggctgaggcaggcagatcacttgaggccaggagttcaagaccagcctggccaacatggcaaaaccccgtctctgctaaaaatacaaaaattagctgggcatagtggcggacgcctggaatcccagctactcgggaggctgagacaggagatcgcatcactgcactccagcctgggtgacagagggagacactgtctcaaaaaaaaaaaaaaaagttcggggggagagactattttcaccaaaggcttcaggttggctgctctaaggaaaaggcaagatggcaggtgggtggggcgtaggaagtaccaaatgggatggagtgaatcaggatttcagtagggagctggggcctgatggggctgggagagcaagttgaacaggatctggctggatgcgaggcaggctggagcagacctggaatggggggctctgctagtcgggcagggctgctgccatcacacagtgccacagactgggtggctcaaacaacagaaattcatttcctcacagttctggaggctggaagtcactgatgatgacgtcagcagggctgggttcttctgaggccattctcgtggcttgcgggtggcagtgtccctgtatgtccgcgtgatggtcactcctctgtctgtgcatgtgtctgtgtcctaattgtctgttctcataaggactctgtgcatattggattagcgcccatcctaatgacctcatttaaccttaatcacatctttaaagaccctaactccatatacagtcacattctgaggtactggggttagaccataagcacaggaattttgggggcacattca

SEQ ID NO: 129324 - DNA, 1038 bp, Homo sapiens
ggtattgttgacttgttacttttacagatctgaggttaagtcttgccctcccatctgccggctcacctctctgctcccaccactccgagatacaaggggtccttgcagagatatcgggaccacgttttagttggcctagtggcctgccccactgagaagtgtgctgattgtgacgcaagcattacctgggatctctcccttgggcgtaaaactgaaggcagggggcatttgtgagtctctcctactctcagttgcccaggacaagttcaatgttagataatgctcttttcataatgagaaggaagctgaggaaatggaaaattgcaatgagaaataaggtctaaaacaagagacattttatagaggctaatgtatttgaccagggcttaataaaattgcatattttaacaaaaaaaacccactttaaatgaaaagtatcagagaaatgacatttacagctggtgatacattcaaggacagtgtcgctcatttatcatggaaaaacatctggagtgacaggatgtttccagaaaactttcaactagaagacagatgactgatttcaggacagtgatgccccaggaatgaactctgctccaagaaatttctagtctctgaatttcagttttttcttctataatatgagagggttagaccaggtgattttcttctaatcttactaaaatctttcttcttcaatacagcaggagggctacatattttctgttatttcagtagattgactttttttttttttttttttgtgagacagagtcgctcaggctggagtgcagtgaaagctttgcaccatgcctggttcctttttttttttttttttttttgagacggagtctcactctgttgcctaggctggagtgcagtggcacaatctctgctcactgcaacctttgcctcctgggttcaagcgatcatcctgcctcagtctccagagtagctgggactacaggcacccaccaccacacctggctaatttttgtatttttagtagagatggggtttcaccatgttggccaggct

SEQ ID NO: 129325 - DNA, 1104 bp, Homo sapiens
tttagagctagagaagcattaagggtctttttcaacataagtaaatgagcaaaccaaataccatatgagggaaaagacttgtccaagatgagagagctgagtagctgcctagaatctttgacgctcggtctggtgatcttccccttacatgtggctatctcacccattccttaagcaaacatttcccgaacacttcaagcctccaagtgctgtgcccaccaccctgcagagttttttttttttttgattttttggttgtagctgaaatgttattactcatgcctaaacacgtgaatttaactcaaatatattttttcacatgttttgcacaggtgacacccagaattatagttgaaaaatgtggagtcttagaggcaatttttaaactgtaaagattaaaaataataaaatactagaacatgtgcatgatctgagtgaactagactgtaatacgtatgaatttttcataaacataagttctttctagataaaattttgggaaggaattcaagcttatacctaatttatagcaaccatgtatggaatttgtaagaaagaccttgggaaaatatttaactgtcagaaaaagactgatttaatgcttacttaggatttaaaatacatttggcaccttcagtgtaagtcaattaacagcaactatattctgcagtaactcaactgtcagagataaagcaccatttaaaaatggcgtccacctcttagaacacaaacattttatcttccaaatatttcaactagctaactaatagcaataattattttatgtgaatatctgtttatgtttcacaatcccaaatgattattaagggtggaaaattttcaagttaggcatgattttggttctaattaacagcctaaaaagatagctagcatcttctttcctttgtcctggagaagacccactggactttgaatttaaaaaataaagtaggctgggcgtggtgcctcatgcctgtaatcccagcactttgggaggccgaggcgggcagatcacgaggtcaggagttcaagaccagcctgaccaatatggtgaaaccccgtctctactgaaaatacaaaaaaaaattagccgggcgtggtggc

SEQ ID NO: 129326 - DNA, 1750 bp, Homo sapiens
aggtttcaccatgttggccaggctggtctcaaaatcctggcctcaaatgatccacccacctctgcctcccaaagtcctgggattacaggtgtgagccactgcatgcagcctagtacaccttcttgacaaatttcattactcttcaggtaagcaaggagattgtatttaagtttatttgaattttagttaactattccagaaggttaaaaatgtgccttccctcgctaatgtttccaggtatcacctggtgactattatcaggacctcgacatacaagagaatccaaaatggtgaaataactgacttaccagttttcagctttctgtgttatgacatgtcaattattaactaggaaactaatcattaaaggcattaacaaaattggtctcgttgggtcacattgctccttacacaatggggctggttaacatttggactttcgtcgcttccctagcgaccttgtctctctcttctgtgtatttttaagggagtccactcttttattcccatttactttcatggatgtgctagtgactgctagagacatcaaaacttgcccgggtacagtggctcatgcctgtaattctagcactttgggaggctgaggtggtagagttgtttgaagccaagagtttgagaccagcctgggtaacaaagcaagaccctgtctctacaaaaaataaaaaaaattatctgggtgtggtggcacgtgcctgtagtcctagcttctcagaaggctgaagcaggagcatcattgagcccagtgctgctgtaagccgtgatcataccactatactccatcctgggcaacacgaggctctgtctcaaaaaataaaaaacaggccaggcatggtggctcacacctgtaatcccagcactttggaaggtcgaggcaggcagattacctgaggtcgggagttcgagatcagcctggccaacataataaaaccccatctctactaaaaatataaaaattagctggatgtggtggcatgtgcctgtagtcccagctacttgggaggctgagacaggaggatcacttgaacctgggagccggaagttgcagtgagccgagatcgtgccactgcactcaagcctgggtgacagagcaagactctgtctcaaaataaataaataaataaaaataaataaaaataaaaaacaaacaaacaaaacctaaagcttcatcttcacctcaactcttccaagaagattttcaaaccttagtgcttctatattgattcatttcttcctcttcattcatttatttttttccccacccatgcatttatttactcattccataagcattggtttgatgtttaagatgtgccagatacagtgctaggcatcttgggtacaagatgaacacaaggctccgctttacaggggctcattcttctcagtagctcctcaataaacagaaagcgacccctccctgagaggccgtgctaggaatccgtgttggagaaacagaagctctgagtgaaaaatgaacacaagtctggatggtaacaacacaggaaggaaccgagggctatctgcctctgcatcctggccacatcgctctgctcctttttctcccgccttgctctcactggtccctccactgcacttagtcacatattgattcaaagttcgatgcttccaatgtttgtgctgaaaaagtccttctctgaattctactacaccagtgtctccttgcttcaaggccgtgcttttcggaggatcctactgcagtcacagagca

SEQ ID NO: 129327 - DNA, 1009 bp, Homo sapiens
aatctgggcttaggacccaggtcaggccatgcaactccatctcagagataaaaatcctctcatgaaaaggaagcaagttgcatttctgggtatttttagagaggtttactgagggtgctggttttctccacccattgagataactggagctaacagtagaagactcagaaagggtcacttagaagggatctgatgccacacacaggcccagcttttccagttaaactacaacttctgcaggcctgcattgtcttatttggtgctctcaaaaagtatccatcccctcgaaatcagtctggcaatatatgaaaagagctataaaattgttcctatcctttgacccaatcatcttgcttttggaatataccccaaggaaacatgcagaagagaaaagaaagcaaacggcacaaagctgtttatggtaacaccgttcataacagtggaaacatgggacatgacccaatgcccaaaattgggaaaaggttatgcaaacgatggtactttaagacaatggaatgttatgttgctattaaaaggaattaagtttacagattctgtggatggatcaaagtgcatgcaaaagatgttaagagaaaagaatgcaaaaaaaagtatgcttgggctacaaatataaatcagtcggcatgctcattgataaggatcagaaatgaacacggtgctgcaaatagctggtactctagatttatagcattgttttttcttctaaagttcacagtaccatgaaagtactaacttttggtgtggagcaagatagtggaaaaaagatccatcatctccttttgctcatggtgagtggtgaggggatttcctcatctgaaaggtcagcgtgcatctgcagtgtaatgtgtctgcaagaacagcccactcagtgttcatctacgtaacagaaacacagcacttgggaggccaaggtgggaggatggcttgagcccaggaatttgaggctgcagtgagctatgattgcgccattgcactccagcctggacaa

SEQ ID NO: 129328 - DNA, 1015 bp, Homo sapiens
tgtatttttagtagagatggggtttcgccatgttggccaggttggtctcaaactcctgacctcatgtgatctgctcccctcggcctcccaaggtgctgggattacaggtataagctactgcccccagcctcctcttacttttgtgtcatccacaagagttcctaggaagccgtaactaaggagaggagcttgtacgtgcacaatgaatagggtatcaattgcccaacaataagaaagctattctcagagccacttgtctgttcacttcacgtgtattgagcatctacaatgagtaaagctctgctctagactctgtagggagcatttcaaatagacacgatgagctccaaaggcatctgaaagatgagtttaagtttcccctctggtttagaggagttttggtgtcatgcgttgtgtctggcaatgtactgtttctctctttcccatcttctgggtggcagtctcttctctgtcttcagcttttaggataaataacacttccttgagaggcctgccctgagaaccttatttaaagaagtcacctccttcctcccttccccctcgatcacatcagcttgcttatttacttcatagcacggatcacaatttgcaattagatatttgtttccttgcgtgtgtattttctgtctcatacacttgtttattatctccacaagttcagatcctctcttcatttttcatcgtggctggcgtcatgtaagtttcttgaaggctgggatcatggcttagattttggatttctcagagggcatagcataactactggaaaatacaaatagctgattgatggttgtttgctttattaataaagtcaaagatcacagatgttgctcaatgccacacagttaaattttcattaaaaaacaaaaatcaacagattgtacctctagttgtctgtagttcaccaccacatcactctgtaaacacttctgaccagtcctgggaaaacagctgaaaatggaattcccatgcacagtgggtcaatagaactaac

SEQ ID NO: 129329 - DNA, 1060 bp, Homo sapiens
aaagtatgctatctcagtcaatatgaatatttaaaaatttggttccacttatattttattaattcggaagccaggaaaaaaaaaggacattaaaatcataaacagaaaaaatagagaaagatgtctttctaatggaaccaggaatagtagagacacttctaatataaaaatgttgtcacttcacagtactatagaaatgtaattttagtcattttcagtaattgtttatgaacttaaaccaggtagaaaccaaatgtgccaaaattcgagggatgaattcttgcatatttagtatcatttgtcatatatatatttgtcaaatatatgacagtagtccttctttgagacgaatttgtggcactaggttatacatcatcacaatacttttgactaacagagagaaaggagtcatttaaattataaaatttgaattacagaacacttcattattaagagataattaggtttatcatttaataagtatacagtagctcatactgatgactattacagtgatgtcaaatatagggcttctatatgataagcacagaccatattaattgtgtgcttcttatcaactcaacatggcttaaggtatcattttatggagcaaactgtgcctggttacaacattcagccattagccctattccatataccacatcattagcactctattttcagattgtctgtcttttttaaaacaaacaaacaaataaacaaacaaaaccctctctatgctaaatttgtagcccattaaaaaattccctgagttgtttttctgaaatcaaagttgatattaggttaattctcccctaggctacctttgcatactttatttatttttaattaatttatttatttttttgagacagagtctccctctgtcacccaggctggagtgcaatgatgcgatctttgctcactgcaacctccgcctcctgggatcaagcgattctcctgcctcagcctcccgagtagctgggattacaggcacgtgccaccacacctggctactttttgtatttttagtagagacggggtttcgccatgttggcca

SEQ ID NO: 129330 - DNA, 1046 bp, Homo sapiens
ctggttctttttctttcttttctttctttccttccttcctatttctttgtctctctctctctctctctctctctttctctctttgcttcttctgtcttgttttgttgcccaggcttgagtgcagtgccacaatcgtagctcactgcagccacaaacttctgggctcaagggatcctcctgcctcagcctcccaagtagctgggactacaggtgtgtgccaccacacctggctaatgtctgacttagttcattaatgtcttcacggttcatccatgttgtagcatgtatcaggatttcattcctttttgaggctgactaatattctattgtatgtatataatacattttaaaaatccattcaactgttgatagacacctgggttgcttctgcctttgcctattgtgaaaaacgctgctgtaaacattggtgtacaagaatctgtttgagtccctgctttcaattacttggagtatataccaaagaatgtgctacagaattgaatgcttgtgtcctctcaaaacccatatgcttgtatcccaccccataatgtgatggggtgggatttcagcgtatggattttgcaaggaggtggggtctttggcaggtaatcaggataattaggtaattagatgtgctcatgacagtggaggctttatgaatgggattagactttcaggctccggaactgtgagaaataaatgtctgtggccgagcgtggtggcttatgtctgtaatcccagcgctttgggagcctgaggtgggtggatcacttgaggtcaggagttgaagaccagcctggccaacctggtgaaaccccatatctactaaatatacaaaaaaaattagccaggtgtggtggctaatatagtcccagttactataggcaggcgcctatagctgaggcaggagaattgcttgaacctgagaggtggatgttgcagtgagctgagatggtgtcactgcactccaacctgaatgacagagaccctgtctcaagaaagaataaacaaacaaaaaaataaatgtttgtcgattatgccaccta

SEQ ID NO: 129331 - DNA, 1038 bp, Homo sapiens
atgaagccattattgcagttaatgagtttcatcattatttacaatacaataaacaatgtgttgatttaaactgggtgtacattaacataaatgcgcagaacatttttttaaattcctctccatgctatttatggcacacagcaaagtttaatggtagatgcgaagaaagaaaaaaaaaagtgagaaatgagacccttgggtagccagaaggatcaagataggaccaacctgttttcattagggggcagctttgtgggaagggctcgggtgagcacccacagattgcaccgaggtgctatactctgaggctgtgataaacagacttcccagcccccacagatctttcctgtagatttatcgcagtgcctggggttctgccattaagaattttccctatagtcttgaaggctaatcatgtttacagttctgctttgaagattgcaaagcacctctaggaacacttcttagctaatcccttggggcaggggctctaaccggttgatcaagcttgactggtgcatcttttcgggaagaggcagtagcagtgttaagagctcaggcgttagatattaaatccctgcctctgctgagagtgacctggggcaagttatcttccctaagcctcagtttctttatctataaagtaaggatagtaatatttaccttgaagagcagtcgtaaaggaaacaaaaaaatacatggaaaacgcttaaccacaacagatggtccccatataaggacaaccaggtgggttgaaaggcagctgttagcccctcaccgagcatgtgcgcctccctcagctcagatgcatcccagcagctgggctggggagagtatttccaactgctgggcaccctacttctctgccaactgtgagctgcagggaagggatgcctaggtggaccaggtcagcacctcctctaacatccgacttcacccccatgaaatcaacaccctcacaatcttggtatcctgggagactggagaggggtcctaaatgggagggttcccagaagactttaccagctagagaattct

SEQ ID NO: 129332 - DNA, 3649 bp, Homo sapiens
gccgccgtcgcagactcgccgcgggagccccagcccaacccgagcccgacagccactgccccggctccagctccagccccacagcccgcggcgcccgcccgagggagccccggcgcccggggaaggctccagtgggctagcgcgccctcgcccagccccgcgccccagccctgcccggcccggcgaggaaggaccgggaagatgaacaacggcggcaaagccgagaaggagaacaccccgagcgaggccaaccttcaggaggaggaggtactgggcggctcggtgtggtggcgggggcgacgcgggacccagtgcgggcggccggcggggcgcgggcccggggcgcggcggtggaagaaggttcaggcatggcccgtgccccggacgcagccccacagtgtggcccggggagggtggatctcgggagcgtgtgtttttgtgtccacgcgcgtctgcgggccccaaattgcgtaactccaaggacttttcggagacttttgtaagtataatgctcagctttgtttgcccgggatttataagtggaaccgagagctgactcctgggtgacctcagataatcgggactcggagggtcaggacttagggccggggctggaaattgtgtatggattcagggtcggggggggagcagtttaaggaagaaactcgggggaaagttctcgttaaaagatacctctattccctgccccctccctttccgtgttaaaagttcttggtgaaatatctttctagccgaggttttttggattaatagataactcatcagccacattcttctctgctgagtcaaagaccccgagcctgggcggtgaacgcttgtgattttaggggccgtgcagctgaggggagcagagtaagagggttaaaaacgcagcaattcaccaaatgctcatcgagggtattttcataggactttgacttctgagcatgcattttaggtggtgcgtccgtaatcatgatgaaagttttgtgactgcggagcgttccttcggtggaaacaaaattgagtagatgtggtcagaaggggagtcggactcaggaacaaacgtttcagaattcagtaggatatttgtggtatcctaccaaatgactctttttgcaggtacgttatctggagtccaagaaattatttctggcgtacttcttaacatcccacacagttgagttcttaaacattctagaggaacttgagagtgtgtgtagatgcaggaaagtgcacgtctaaatatgacccgaaaagattcacacaggtattggatcctgatataggtgaacacagaaggtaaacggattctaaagcgttagaatgttgagatcattgttgagacactatgttgtgtgcaaacttcaattctgatagtgaaaccaaaattgcagaggaattcattaatacatacaacttctctgcacattgtccacttggaaaatggtaactatttagatggagaaggtagaggagcgagactatgccaaacaatgcaaaataaataggagattttactcgtcacccagttgtatggtagtgaaaacctaaatgaattgcagtcagccaaaaattgctttttcacccgaggacattttctattttattataaaagactatttgaagagttgtttacttgcatgttttctaattacaattgtaggaatgctactggcatttcttttttcaaagcgatggagagttgaatggtgtgttctgattttttttcttgaactttactggctgctttgctatttattttccctaccacttaaaaaaatttaaaaataatgacaagtgtgcttttttaggaattaccatatttaactaattcacttaccatatcaagataatcatcgcttcagaaatctttctgtttcagctagatgtgcaatctgtttgcttctcagggttagaatattatatgaaaccatctttctttattcacccagttgagaaaacttttttttttccttttggtaggtagcaaaagaggttcaatgtcctaaaaatcatacccacattaaaattaagtatagaaaagtcacatttttctgcttgacccctcttaacagctgccaggaccaagggattgcctgccctgttcctggacgctcctccgtccttgtgaggttgtgtataataatcgctgtataatcgcgggccattgcagtacagttgctgcctcttacttgtcctgttatctgacagcgttccttttcaggtaggaatggcatgtggctctagaaagtatcggtctttttagcaaaacacttgttatgtaaaaagtaaggggacacgtaggaagatttcagaacccaagttgtccaagagagatgtcgtgtacaaaacagttaagaccgtgaagagaggggggtttataatgtcagaaattgaggaaaagaaactaaggtggcctgaatgatccaggtaattttgccttaatttcctatttttggtttatattttgttcttgaaaaactcttaacctcttttttgtttttttctttctaaccctgaaagccacaggtaaaataaatagagtattaggtgagtgccattaatgtgcccggcattacacaaaaccactgcactgaccctttccctgcccacccattgtatcagcaacttgctcttaagcacatttaaaaaccttggcggtggactccagtaaacagaacacacacatacaacatagatatatacacgtaatgacgagaggaaaaatgtgtttcgttgtaatttctggtagccattgaactgacatggaaaaatgagtccaatcatcattaagggaaaatagtttatttcacagatcatgagggtggtttgggctttctccacattgtagaacccaagtttgtttttttctgtgtttctagtttcgaaacgaattccttctatcaatcagtgtattttagcttcttttgagagtttctaatgcttaccctgaaataattgtgctgaaatgcctctttggttctaattgtgtagaatgaacagttcaggatctaggagtatttttgcagctttttagggttggaagtttttgagaactttggcagaacatgtattaatacttctactttggatagcattgaaaactttgaggaaaaataatttaggatttggctagccagttgtgtaagagagatgatacatttaactttccgatttttaatgtattattacattaaatacatgtgtaatacacgtacaatgtattatacatgtgtgttccctaagcaagttgtcctgtaaagactaaccagttgtcaaaatctcactgagatttttaaggtttgtttatatatgtttagagtatcatgtcatttcttatattttacaattgataaaatgattcctagaatttctctaattgtgcaatcaaactttataaaaattgatatataatagatccataattatttgtcttacctaatcagttataattgatgagtttaaagtattttcaaatatatcaagaccttttctgtcttatagcttataacttatagctatagctataagctaacttataacttatagctatagctataagctaacttataacttatagctatagctataagctaacttataacttatagctatagctataagctaacttataacttatagctat

SEQ ID NO: 129333 - DNA, 3315 bp, Homo sapiens
ttcattgagcattaaagtcaatctacattgtgacttcaggaaagtacagaatggttttatacaatttaaccaagattggggatctctgttattccaagttcaatccaatgcaataaacatatatttcagttgtagaataggatttggtgacaactgatgctccatgacccctgtcaatatggcatgcacttttgagttatttttccagtagcggtttaaacatttccctgataaacccttgtgtgcatctgcagtcttcttcattcccagtggcattagttttcagatgggtagtttggaaggggtggaagttctcttctggagatggtttcacatgattttcgtaggttcatgttaatttttgctttaaggataaaagtgttcagtgctggtgacaaggcaataaagtgggtacttttgtgcagagcagtggtgatgtaaattagtgtagcttttcagaaaggagtgacactatcaaaatgtgttcaggccctttgatttagtacctttatttttagaaatttaccctaagaaaacggtatcataaagatttatatataggaatgatttttgcagtgacttatgacagtgacaattcagaggcactctatctaacatgggaaactgctaactaaatcattgtataattctggaaggggaatattgtgcaaccactaaaggctccgtttttaaagagaaaaatacatggattataaaatatgtattatatataaattcatatttattatgtattatacatatgtggttatatactattctctgtgttctggaggttagaaacctgaagtcaaggtgttggcagggccaccgtgctctctaaaggctggagaggagaacctgtccttacctctttgagcttcagtggctccagacattctgaagactatatttttattctcatgttgtaatattaaatgaaaagaactgattttaaagttttatgctatgtgatgccagttctcaaataaatgtatattcattcataaaaccaaacattaattgtatctaattggtggattacagatcattgctatttactttctgatgcctttcggtgtttaagttttcgaaaatgaccatgtgaacaaaaagaattaaatgtctttttgctttgagggtttccttgaatcgtgatattcacaaaaccgaggttggtcacatttagttttgctcacaagcctagcggtgagaatcaggtctgccttgttcctcagacatagtctttcttagtactattagtatttctcttactcattcccttatcttgattgtgttagtgatcttcagctgctctcctgttctgatgctcttctggagtccatccttacaccatactgctgggccctccaatgccccgaatccttcagtgctacttggtactccacaaagtcaagtgcgcacatggcgttcgggattgccctcacctacctgtatactgtgatccctttgctaagaggaagcctaggtcttcctcttctgttctcttgatctagtctgagctgcttttaagccaggattcaagtttttcagcctacatttttgcaagatccccctcacctgaatgtcccatcccatagagatgatttttcattagaatttcagtaaaagttactttctgttatgtccatttaactcctggttattatttttttcagctatttattttgtatgggtctatgccattttacagtattcccaatgttcaacacctaccccagcaccaggtaaatctcctctgcacacatccacacttacatatatacacgtatataattctttgtaaatatatatgaaatagccttattggtgaggttggtgattatgagtttgtacaggtaataagaagcagccactcgtttaatattgaggatcccttctgtgctctgcactggggaattagaaaaggtgtggatggatcggctggaaaattacttccatccctttgtcattaggaacctccatttgcgagcacaggtgagcctgcctggtccatcaaatagccactgctggaaaattacttccatccctttgtcattaggaacctccatttgcgagcacaggtgagcctgcctggtccatcagatagccactgtcagtgtgggactgcttgtcccaaggtgcatttgggttttcaccattagaatttggtttctgctgtggaattccatttgaccttttggacgagggcttccagaagccttggttaggtggaagagcatggactccctgtgttcccaaacaagcctgctctgtgtgacagccactttggaatgtttgtgttcagtttcatttggcaccttagtgtctgcctgggggtaggggaaagggaatgcaaatgttcctcttgaacagtgcttgctttggtcaaagaaaaaaacttaggaaggaatgaggagaatgaaccttaaaagctggtgcagaagtggctgcatagctcagtgggcttgaggccatctgggaccaggtatttaaaatggatgctatgttggtatgaacaagtcagttccatgcccctggtggggatgagcttatttgtcatatggggataactcctcacactcacatccctaaagtgtaccaggagaatattgtaaacaattttattgcactatattttctatgtttggcggtggaggtgggaggtccttgatattatctgaaacatgaagctgagtaaaggggatatgtctgtggtatcagaagaaagctgcttggcttgtcagtgttgctgatagcaggaaaaaggaaatactgaaatctttagcctgcagaattgtcagaaatctttttatctattcattaaataattatctcctaacttttattgagtatttactatgtgccaagctgatgaagggattatgatgattgtgctgctttgatggggaagtggctgaagccctgaaaagctatggagccagggtcttcatgtgcagattctagagatgccaagatctgagagaggcagttcctgtcttaaagttgctcacagtttaatggtgatgcccctgtatgaacaaacaggtataaccacgcccgaggttaaagtagaggtagttgagttgagcacagccaaacctgcaaggaagggatggagctgtgtcacagaaagctttaaagaagtttaaagagtcagttctttaaagatgacgtatgagctaaatctcagttaagattttgactgatgagaaaagggttcagacagtggggaaaagatgggctaggcaaggaaatcgctctgtgaatgaacacacagaggcttcaaaagacccttttggggaagagcaagcaagg

SEQ ID NO: 129334 - DNA, 1654 bp, Homo sapiens
tatcttttttgacttttttggggaaaaggaagagtaggatgagcctttggccagcagcccaaagacatctaatctgtgggttatattttcattttcttttttttttttctttgagacggagtcttgcgctgtcactcagcctggagtgcagtggcgccatctcactgcaacctccactgcctgggttcaagcaattctgctgcctcagcctcccaagtagctgggactacaggcacacgccaccacacctggctaatttttgtatttttagtagagacaggggtttcaccatattggtcaggttggtctcaaactcttgacctcaggtgatccacccgcctcggcctgccaaagtgctgggattacaggcatgagccaccatgcctggccatattttcattttattcaatttatactttaaaagtttgctgcctttttcagcccagctaagtgtcagctcaaagtagtccaggaacttaaaaagaaaacaacttgcatttgtatttctcttaggttttaactctactgcacctattatggtgacggtgcatattgtgtaaatgctaaagagaaaaaggaaatggcagtgataaatgccagtcacaccgagaagatggattcacattccaggttgtaatacagtattgttacacaaatttaaaatgcaaagggaatgcttagccagttccattctgtcagcctttagggttttgcaaaggtaggagacatctgagaatctccaaaatgaggtctggctcaccaacctctgcaaataagttataggacaactttacttttaattaacttttatttctcatgagttgatttttttgtgacgttcctcttgattttcccagattctcatgtcaccagggtagataggctggcagtggccaatgttgttctaagagaaatcctaaagactacccaatttttttttttcttgaatccgcaggatcctgttttgtgaaaattcctcttacgcccacctataggatagacagtggaggccccccctgggagaaagtgtacacagaaagtgctatctaattacagaagtagcagaatttcctttgtgctcagaggggaagtgctacaaaagtgtaattactttacccagcatgtgtgatttacgggacttaaaatgtgtgagtttccaaagagtcatctgtttttaaatacagtatccctcccagccaggcaggatgtgtttggggaggtgggagtgaggacatgtacttccgtcctgtgcctgctgcaggatgcctggtgacaggggactgaaaccactggtacttgctgcccctcagggtcttgcttatctgagtagaaggaagaaaatcagcaaagggctggaatctagtcagctactcccagaccagatcatccactgctctcctcttaccttcccaagccaaattctttttctaggacctccaagacttttcccagtaataagcaaaagaattgttagagtgaaccctgagaccgtttttaaaatttatttatctttctttctttctttttctttttcttttttttttttttacctgtttttatttgagatggagtcttgtggtgttgcccaggctggtcttaaaactcctgggttcaagcgatcctcccgcctcggcctcccaaagtgctggaatta

SEQ ID NO: 129335 - DNA, 2423 bp, Homo sapiens
acttgccaaacttgttcctgcctcagggcctttgtgcaagccattctgtatgcccggaaagccctacactcagacattatcagcctcatccttgccattcatttagatctcaattcagatgtcaccccagagagacctttgacctccaagtttaaagtagccctatattcccaacccttttattttccaaatagtacttcttacctcctgacgttgccttgtatgcttattgtacttatttggtacccttggaatgtaactccctggcagcagactgcctgccttgtttaacactgtacaaacctcagatgcctaggacaatgcccagaactgtccaataagtttttttgtgaattgactagaatgtaaatctgctttacagacgccaaagcctgtctgatacactgtatcatcataaacctttttcagcagttttcaggttaaactttatatttctgccttgaagatgatcatttctggtcctcatccccactttattgcatacaaaaccgcagttgtcatctcacacacttttaagctggaaatgttcagatggtaagtgataagagcccttgtcggggtatgcagcagtttttcacacataaacgaatccttcccttttgtccacttaggatgggaaacctactaattccacagaacgaggagagggatgtgggcctggagtgtagggaatgcctaagtaccagtagggcaaggtgaatttgattcctgttttgcagatgtgactgttaggttgttagggttaatttaataacccaggtggaattgatttggagatagacttaccacttctgatcctttgattggatctagcctccagctcaatataccttcctcaatttgcctacaagaagaaaaagatctgaagctcagcataatgctggctttagccagaagaatccagcctttaagccatctatatgtgtagccatgaaggaccttctaatatgccttgtgagcccttatggggccacctcacagccacaatttatgcccacgtgtcagcctcacagactcaggagctgtttctattcattgtaaagcagaccagatgacatttcaggatgaaagaaatgtaagtcatcattacatacggcatcaggctaacaagtcacctgttagttgagcagactagttagttggtgaaaatgcatcgatgaaaatgcagaccattggattatcctcatttatagcatttatgtcacacttcaccttcaacaaacttggttaacttaaccatcgtccattacctgatagtcttagaaccaatagtatataaatccttatagaagttatttcttgaccaatcaattcatgagtattctttgttttctctcttattatctcattatctctttgtttctaagggacctaggacaagccactgaagctgcttgtctttgacaagtcattttaacctgtttccttaactaaaaggtagggattgtatagacagcacctgtggtgcattaaaagaaccataaatctcatttttccactttcattccactttccatttccccattgtgatgcagaaagctgccgtggcgtgccaagacacatccagggtgggctgtttggggggaatggttttaattttaagccttttaagtgaaaacccttagaccttgcctctgttttgttaaattacgattctaacaaaataagaaaaaattagtgaagcactagactttggaaactctttcctgtatatttgaaatgattttcttaagactgcttttcttacctgaaattgttttgttttttcctaagcaaatgagtgcctctccttgagaactgggtgggagtctctgggtgtgagagaacagcaggaaatgaccctttctaaacaaaaggactctttaaggcctatcctgagtctttgtgttttgaggaggggttatgcagaaaaccagagctaggaaatgaatctctgcattagccattctaatgggggaagggagaatggagaacattctctccttgcacgccctcccaagtatctaatgccagggaacacttactgtgagatccaaagaagtgcagaaaagaccctgggagcctaggtggtggttcttcaggagtgcgtggcttcaagtcccctaaaggaaagaaaaaaccaggttgggcagaacgacacccaatgtgatgttcacctttaacctgggcttccagaatttgcttgaaaaagctcatgatcaacagaatgcagaaataaatacaaaatgaggaaagtatgagagggattttgcaagatctatttgtcatatatatctttttgtttttgttttttttctcaagacggagtcttgctctgtcacccaggctggagtgcagtagtgtgatctcagctcactataacttctgcctcctgggttcaagtgattctcctgactcagcct

SEQ ID NO: 129336 - DNA, 1628 bp, Homo sapiens
gagaaaatgaactttgaggaatgcaagtccttttaaatgatcaggtccagagggactttaaaatgagaccacagtcaggtcctactcccctcttgagctatatattcacctctctgtattcactgcttgctgttgctagaagtagctataaattaactaataatgctgcactggacactgtaactcactctatagtttaacaatgtatatagccaatcactaatcagtataatttgtgtaaaccaatgagaattcctggcaaacaactttatatcagcccactcccttgtccctgctcctttttttttttttttttgcctttaaaaagccacttgtaactgctttttaattggaatgcataagcccctgggttgcagtcttcaagcttggccaaaataagctctacttatattaattttgcctcaccttttatgttgctatcaacttcttttctcaatctaagctgaagagggaattaataatcattgctgtgcgaggtagtgggtctgtaatgaagaaatgttgagccttgccctgcagtggaatgttccctcctctcctcacttcaaagtgaccattcattgtatcagtatttgtgcaaggagatcccaaatttaaaatgctagaaaaggggataggtcttatcaaaattattttgcctttataaattcttgctgtcttggagcaatgaacttctctgctcttccagggacactcctgtttttttttttttcaaggaatataaatctcactaataattagaaacacacgtcttgttgaaaatggttttgtggtttacttcgtttttagaacatttgaaaacgacaaacatcttttctaagaaaaagcattgtttgttacaccaccactgtttgtaggcttttcattgtaactatatttttagaaaggctggctcatgtgtttgatggggactctgtgttgagggtaaggggctggtttatttactccacagcaccagatgctttacagaattaaagataagattaaagctgccactcagatcccattatgaaagggttttgtttatatattaaaggcttggaagactctttatcttagatatgaagccagcaatgcagtattcaaaagagatgtgatcattgtaagttccagagttgatagggaaaaattattctcactgaaaatcccagtgtctgaagtgttggtaggttttcttttttttttctttttttttttttttgagacagtatcgctgtgttgcccaggctggagtgcagtggtgtgatctcggctcactgcagcctccgcctcccaggttgaagtgattgtcctgcctcagcctcccaagtagctgggactgcaggcgcctgccaccgcacccagctaatttttgtatttttagtagagacggggtttcactatgttggtcaggctggtcttgaactcctgacctcaggtgatccgcctgcctcagcctcccaaagtgctaggattacacatgtgagtcactgcacccagccggttttcttcatttcttttttcttttgagatgaagtcttgctctattgcccaggctggaatgcagtggtgcgatctcagctcactgcaacctccgcctccggggttcgagctgttctcctgcttca

SEQ ID NO: 129337 - DNA, 1084 bp, Homo sapiens
cttggcctcaggtgatcctcccgcctcaacctcccaaagtgttaggattacaggcgtgagtcactgcatctggccaattggatacattcctgcagccaaattttaaattcttcctattgtgctatagtatggatgtgccttaatgtatttgacccaccccttattattgggcttattattgaacttatttccagcttaagtgatagaaacagtgctgtacatcctcctagctaaatctgtgtatacacccttagtgatttccttagcttcaactcttagaagtggaatttctgggtcaaagggcatgcattcttttaaagatatttgatgtttattgccaaatcttctctagaacactatttccactaagaaaatcagcaggcccattccttgcatcccctgcccctgccatttaaaaatgtccaaagattgttccctcactgtggagtttttcatatttgtgtcccatccgtgactcagaattaatattccagcctcatctgtataacacctggatgttatatagtgacttttttttaacctcatttgaagacatatcccagttgtgtttcttatacttcactggatacaaaaatgcttagcagataatttctgggggtgtcattcttgagtttatcggacaccgtgaagtgtgttgctttttgtgtgttaggtgcttgctatatttttctggctattaatgtctgacgatgaggccagtattttaggtgttgtgagtgcaagtacagaatttgagtcagctctaacatttgtcaggtaaagcaataacactgccaattaaaactttattgtaagatgcatcctgatttcatagatgttacagtgtggaaacatgtctcagaatcagtggatatgttattctctcatctacttttctggtcacatggttggtttgctcttgagatgagaacagagacacactggtcagtttgacataagttttggtggacagtgagccaagtatatccttggaaagaattttataattacagttgaatcaacaatgcttcaatgcctttttttttttctttttttttggaaatagggtctctgtctgtcaccc

SEQ ID NO: 129338 - DNA, 1366 bp, Homo sapiens
ggtgtatatcgccttgtgaaaatgattcttttcctccctcttcaaattgaggatgctgccttgaagctccagcatgttgcagccccttaagtatttctcaggatgaaggagagaccattcagggcaattgcatcttccctggaggggctgttttcactgtgatgcccgcaacataccaagagtggaatcctgtctgaggagtgcagctccggtctcaccatgtgggcagggcaatcaccattaaccccagcccacaggccttcttaattgttaacagacattctgagaagtgcatgccctccacaaagcctacacacatgtgttcgagtgtgactctaggaaatgagcagatgtaatggaaacctcagtattgactcatcccgattgttatatatgagtggaatttgcatctcatttagtgtttatttcagtagattccagttgaggtcatggagtgctaaatttatatgcatcatagcacctttctcaaaggaattgggagctcttttgcaaaacaaaagatgtcttcttttcccttagcccttggttttgtttggcagatggtgtaggtgaagagaacattagttgtggaagaggtatgtatgactcccttgggtacagtcattgatatttgttaaagacagcctgagagtctgttgtcttggcctttctgggggatgaagaagttgttactgagaagcagttttcctgccttcttggaaagacctcagtcaacacaggaaacaatgggagaataacatttgatcctacctaaatggacaacattgtgtaatatgggcggagagggcttagaaattcagaaagagatcagtgtggaccagaataaaaggctttgagaaagaaaggtggaccttgaggaactggtaatatttaaatagaaatgggtactggcttaggagagtttcaccatcataaaagtttggggcctggcatggtggcccatgtctgcaattccggcactttgggaggtggaggctgggaggccgaggtgggaggattgcttgagtctagaaattcgagaccagcctggggaacatgatgagacactgcctctataaaaagtaaaaaaaaaaaaaaaaaaaaagattagcaggcatggtggtgtgtgcctgtagtcccatctacttgggaggctgaggtgggaagattgcttgagcccaggaggtcgaggctgcagtgaactgtggtcttgtcattgcactccatcctggacaagagagtgaggccctatctcttttaaaaaaaaaaaaaaaaaaaagttttggaagtaagaatgaatgtagcacatttacaggagcagggaaaagctgtatctattactttttaatgaatgaattgtatgtat

SEQ ID NO: 129339 - DNA, 2997 bp, Homo sapiens
cactgtgagaattaatgagttaatatttgcagaggcctctggaaatgttaagtgcttggtgttcttatcttctctctgagcttggttgccttataaggctgtccactgaggctgagggacctttgtggggaacagggccagccctgagcccagatgactgtggcagtccatgactgttcccggaatgggctcaggtttcttattttaataggaatgacactacttttttttttttttgtaattattagtgtcagtctcgcacgtactttccccccaactttactacatctatttttagcacctcatctccatggttcttgccctctcaaaaccaattatagtaaaatccatttaaacagagatactccagtccaagttaagttcttacattttcttttcctggaaagataggctacttatcccaagaattatttgaagttggttcattcttttttaagtgctgtattgaggaggagagaaaaatagtagataaaacattccaatagtacttcattttttttaaaccaatgaattaaaatccacacatattcaatagagaggtctataaaagtttgttaacttctcatgaaacagacatttccaacaatagtatgtaaacatggacatttacatattcaaaagctactttccaagatttttccctcctacccaggttgtcagtataatgacatcgatttaggctatcataggccttttgagctggaaggtcacccaagaaccgtatttgtttaacaccctcacttaaaaagatggggccactgaagtccaaggtggtgtctggaacacattccagttttttaagcaggctggacttttctaattgacattgtttttgtttgtttgtttgttttgaggcagagccttgctctgttgcccaggctggagtgcagtggcaccatcttggctcactgcagcctctgccactcaggttcaagtgattctcctgcctcagcctcctgagtagctgggagtacaggcatgcaccactatgcccagctaatttttgtattttttaatagagataggtttttgccaggctggtctcaaactcctggcctcaagcaatcctcccaccttggcctcccaaagttctgggattacatgcatgagccaccatgcctggccagcattgttcgaattgatccctatttctctctctggaaggagagtgggcatctctttctggatcccttgaggtcaagtaaaataacccctatacttttcaaattttgtaagtagagagaatgatagctactctcagcctgctccaagaagagtgctatcacaggtgaatcctgtaagataaataccaatatttggtgcggtggggagcatcaagaaagtggcacaaggttagaatgttagaacattatttcttttttcttttttaagagtctcactctgttgcccaggctggagttcagtggcatgatctcggctcagtgcaacctccgcctccccaggttcaagcaattctcctgcctcagcctcctgagtagctgggactacaggcatgtgccaccacgcctggctaattttgtatttttagtagagactgggtttcatcatgttggccaggctggtgtcgatctcttgacctcatgatctgcctgcctcagcctctcaaagtgttgggattacaggcgtgagccgcatccagctaattttgtatttttagtagagacagggttttgccatgttgtccaggctggtcttgaactcctgacctcaggtgatccgcccacctcagcctcccaaagtgctgggattacaggtgtgagccaccgtgcccagccagagtgttatttcttaaatctttgttgaccttagaaatatttatttttgtcgtgccccctcctcccccaccccctcctctccttttgatgtcatcagaacaacaggcagtgggtcattgattgctgtctatgctggctcagtggctgtcgccatttttattaatgatacacttcttttcgccagggcagatagcttgtaagtaaacataaatcctatttagaaacaatgaacaaatatttttggtgagccttggacctcctgtatctgtggatgtttataggcaatctcttgtttataggaaatggtgcagagttgaggaactttggcctcagtagtggtgggaagtgggacaaagtaggccaggtctgttgctggttagctcacttgattagaacagtatgctaatgaacccaaggtcactgggccatctgtgtatgggtcagccagctctgctctgctgggatcccagaccttggccaggaggctgggcaatatgtatcactggtcatgaggccggagcagatagaaagatcagtactaatccgtcaccagacccagaaaacaaattcaaaacacatgccctatggatagtacactatctgtggctctttaatttatgagggtatcataacagatttttgtaattttcttaaacagatttttttttctgattaataataaactgcatgttattgaggatcctgggaaaataaagtatgaggaaggaaacaaaattcactatttttcccagcactgacagaggttacattttggatttttccatccttgatgttcccttcccttggcctccatgacaccacacttggttgactttcctcttcctccctgaccccacccctacattctccttttcccctttcctcctgaatttggcttgtaaatgatagtgttccttggcactccgtcctgcctcttcatttctcgtggtcctgcattcccatggatggtgtcctttgtcccagacttctgtcctgaaatccagattcaaagatccaagtgtctacaccacttctagctggatgctaatgtgtccagtaaatgatccccttatccccaccatctaacctgcacccctgtgttcctcctctctaggagtcacagccttcacctaggtgcccagcccttcccctcccctccctgactaatccatcaccagat

SEQ ID NO: 129340 - DNA, 1075 bp, Homo sapiens
tccgcctgcctcggcctcccaaagtgctgggattacaggtgtgagccactgcaccctgcctttttttctgtttttgagacagagtctccctcagtcgcctaggctggactacagtggtgcaatctcgactcactgcaagctctgcctcttgggttcaagtaagtctcctgtctcagcctcccaaatagctgggattacaggcatgcaccactatgcccagctaatttgtgtatttttagtagagacggggttttgccatgttggctaggtgggttttgaactcctgacctcaagtgatcctgcccgccttggccttccaaagtactgggattacaggtgtgaaccactgctcctggccttgttttgttttttgttgggggagtttgttcttctaagagacagatggaccttttttttatttttatttttttaagctagtttaagaatacagtaaaatcttctgattgtgtttgtgaacactggtaggtttgttacaatgttaaaatattttacttctgtagaaagaaaaccaaatatatcacgatgactggatatttaagcttttaccagaacatttggaattgtccaatgccctctgttttttcttagagccttcatggtgctgattcacagtgaaccttcactacttagtcccagataactgattatcagtggttgaaatcaacgtggagatgtctcagaaaacctgttttatagaaacttctagaaagttgcaaaccaaaaaaacatgaatgtcatcatgtcatctcatttttctgtttttgaaaaattatgaagttttcagtaattgtgactttttaaacatgtaaaagtatggaagtacatccagtaaacaatgccatgtacattccccctcaatttcccaaccccatccccatttgctgtccagaagtgtgaccacagttaacggtttaatgtgcatctttttatgtacttaacatgtctgtaaatatgtcttttatcttttttgctccctcttttaaattttaacttgacgttaaagtttagaacttccatgttagtatgtgcagctgtaacacattctttttttagt

SEQ ID NO: 129341 - DNA, 2018 bp, Homo sapiens
cagttactctggaggcttaggtgggaggatcacttgagcttgggaggttgaggctgcagtgggccgtgatcacaccactgcacttcattctgggtgatagagcaagaccctgcttcaaaaaaaaaaaaagaaagaaaataccaagtaaatggagatacagattgtatttctgtggatagatattgtaaagtctcttttctccaaattaaacattaaatgaaattctgataaaaattcccaagtactttaaacagaatttgacaagctaatctataagtcagctggacttataaacatacataaagccaagaaaatttggaaaagaactcggggggactttccacaccggatatcaaaacccattttgaaatattgtagttaaaagagacaaatcaccaaatgaaactgaagtccacagaggtaaagttactagtttaaggtcacagagctagatgggcatttttcatgcgggtcagttgaagtgtttctcagtggctggactgattgcatgtgattctaactttcagcaatgttgtagactttatcgggaggcttcttcatttcccaattagaaagatactatcttttgggaaaattacttatgcagggaatcaacctattagacatttgccgaacttgaataaaatgagaaaaggaaaatctgtcaagccttcgtgtttcatgttgtagtgttttccctgtaaatgcttcctctattgtagcagagtagttcagagttgaagggtcatcagggcagaagatgaagagagtccggggtctatctaggaacagtagttaggaatggtttagaaactttcagtcaattgacaggctagttagtattttagtgacattatcagttaaaagtttaaaatacttacctatttgaagtcatgaaaatggctaattttgatttattttcatcccatgctttaaatttatttgtgctgaattgtgaagatgatgagcttaaaagtacaggttagagatttagaatttgtatgtaattactcttgtgaaaatttgttttcttagggaggtgtgtgtgtgtgtgagagagagtgtgtgtgtgtgagtgtgcgcatgagctggtcagctgcagaaccttctggttagcaaacctgatagcatctagggtggagctaagggggaaacatgtttaatcacatactcaccagcttcctggcactaagaaattatcaccagacagcagccaccaggataatttaactttagttctggacaggcaaatgtgcagcaatcatttaaagtaaatttcttaaagaacatgtaggaattatgtcactactttgtggtgatgtttccataaatcctctatagtgtttttgttatgtttgtgtttcttattaaaaattccttaagtacaaacatcattttcaaatatcatatttagtattcctacatttgaaagccaaacatgacaaattattttttacaaattttctaggtacctactatgtgccaaggataatgtcatatcctcacatgttttatgggttaggtggaaagtattacacacaaggttaaaaaggctgttttactggccgggcatggtggctcatgcctgtaatcccagcactttgggaggctgaggcaggtggatcacaaggtcaagagatcgagaccatcctggccaacatggtgaaatcccgtctctactaaaaatacaaaaattagctgggtgtggtggcacgcacctatagtcctagctactcgggaggctgaggcaggggaattgcttgaacccgggaggcggaggttgcagtaagtcaagatcgcaacactgcactccagcctgggtgacatagcgagactctgtctcaaaaaagaaaaaagaaaaaaaaagctggttgctatgatagagataagaataaagtaataaccaggtaggtaattgagaaaaagttcttaaaagcagtagggggctgggatgggtaggataatctactgttgtttttctttttcttatttttttattttattttattttattttta

SEQ ID NO: 129342 - DNA, 2223 bp, Homo sapiens
catctttttcttgtgtagataaccacacccaagaaaatcataggaaaaatacataacaaatgcacttttaaaacaaaatatcccaagtttataattcatggtattggatggatgtattttactgacacaagagttgcattttcaataaatatttctttttatctacttcatgtgctggggaaatgggtgaaacagggaattctatgatcgcagcaagtccctttcttctacaggttcattttgtagccatcatgttcattgcagctatcccaagtggggttgagaaccaggacctggctccaggtctccgagcagttgaaatgtacctggcaaagtccatgccttaggcaggagagctgctcagcctcacttccagcctgtttactctgggttctgaatcgccgtgggctttgttatctggtttcccagcctcgcctaccagttctctgtctaccagtgttgtaccagggctctttttattctttcttcgactggagatccagactctcaaacatctgtaatacttgtccctatctctttgttcatgtgttccggcaccttgtggatatttgtaggtcaccagttctgcttttgcttgaagacctgtctggcagggcttggcacctctttcctctttgtgtatgcagggcctggttgcctagctacctcggaggggacagtgagggctgggctgcaaaggggaaggcctggcaaatcctgagttaggcctgtgcttgttctctagtatgggcggggcttccaggggctcaggggccatctattgtaggagtaacggccacttcccatccatttcttctttcgtctctcttttagttatttatttctgcttgtgtctcaggaccaaacaatctgcagggtgaattggtggggaggaagttgagggttgggggtggggaggggaggacctcccggaaatagtaaatcttagtttagtttttcagagataagtagtcacatgggtcccttgccaagagagaagatctctctcaggaagaaaggcaggatggtgcgggggtttaaactaggtttgtattacaaaaatctggatgggttttttgttttttttgttgttgttgttttgtttttttggagactgagtctcactctgccacccaggctggagtgccatggcacgatcttggctcactgcaacctctgcctcccgggttcaagccattctcttgcctcagccttctaagtagctgggacctcagacgtgcaccaccatgcccggctcatttttgtattttttgtagagacagaggttcaccatgttggccaggctggtctctaactcctgacctcaaggaatctgcccacctccgtcttccaaagtgctgggaacaggcatgagccaccatgctgggccttggatgggctttgatgtcttcatagtgcatgagttttgggtcagccagtgttaggtttgacatcctggtctcctaacctggctctgacacttattagctgtgctatcttgggcaagttactttctttgaagctagttcttcttgaataaattgggaataacaaaatccacaacatagagttgcatatggatggtagcgataattatagatcatgcctcaatagaatgtaaataggtgctcaacaggtggaaagttgctatcattgttataattatttgaaaggggatatcactgagacatgaaatgagggcaggttatagagcagtcggtcaataagcccagcttttgtgacattggaaatttaattataagttagttactaagggtgcatggttatactggattcataactaggttcatactctgctccgtttggctggctaggtgatctttaacctctctagatcttaatcttttcatctgtttgtaagaagagaatgaggataataatgcctacttcgtggagttgtgaggattaaaggagatatgatatgtaaaatgttacacagtgtctggtacagaatttgatctagaaagaaggcccttattattagacatagtaacctttaaagcacggtaaaagcggtgctcagtgatcagtgacaatttcttttttgtgctctagtcctttgaagcatggctgttgtatttccaagttttttgacactcttggattttattttcttgggtacacgcgcgcacacacacacaaattagcattagcccattattaaatattaactttttattccatgtatttatttatttattt

SEQ ID NO: 129343 - DNA, 1233 bp, Homo sapiens
cgtcccagatattgttctaaacatttttacagacattaacttcctaagttctcctaacaatcctaggaggaggtacagttctgagccccatttcatgggtaaaaaaacagcagagagggaaattaacttgcctgaggtcacacagctgtaatgtgatcaaggctggcctttgagaccaggcggctgctgactcttatcgatggtgttgttcttaaccaccactctatgctgcttcccaccgtgcccaaagagtgcctgcaggcttctctgtctctttcctgaaaagttacttacagtcccttgactgcactgctttaaagacgcagcacggagttcagcagtgaaatctggcagtgccggtgctgaaagatgtgaggattttgacagatgctggagatgctggctcaatgttcatgtcccaccaggggccaaattgcccatctgtaaataaggtttcttgtcttcagattccgtggtgattatttttttcctcagggaccagtcatccttttaatcttgtggtagaaaattaaaatgagtttcactgaagtgtggttggatttttaaagtttcttttaaatattactttagagaagttaattaagtacctgccctgtggatccagcttcctgcattttcctactgttttcactgtttagacgggaggcttttcttaggagaattagattacaaattgaagggtgaatgaataccttatcggcagatcatgaacatttggggtcctgaataggtagcaggcttgcgtaataggacctgaataaagttaggcaaacatgactatctctgatcttaaaggcattgaacaggctgaggttaaagtgtttgtcgtagtttctaaaagtcaagggagcgaggaagggagagtttactttctcactttgcttgcagtgattttcttttttttttttttttgcttactatgtcttggggtttctccaggtggtagaggttgctcggaggtctgactcccagctggcttgaaagcagtgattgttcatgttttgggggatcgttgatccctttgagagtctggtgaagcctgtgggcatcctccccagaaaacacacacagacatacacacaatgttttgttcatgggtctttaagggccacacacctaggctttagagtatatggcaattcaacatcagaacttgtttactgccccttccctttttcttttgttttttgagaaggggtctcgctttgtttc

SEQ ID NO: 129344 - DNA, 1944 bp, Homo sapiens
gcttgactagtccagccccttcttgctttacagatgaggaaactgaggtcccaaaatgtggagtgatgtcacattgtgctggggatgtggagaggggtgtttgtcatcacgtggatggccacgtggctggctggggggcctcagaggggaccttctattccctctttatacaggagcccctgtctgtcttaagcacatggcttgcttcttgaaagctttcctggactccccaggcagtatttcctttgtgcattttaaactaaattttgactaaattaaaagcaatgaaatccaggcctcctggaagggtatttagttttcctttttagcagaacagttaagctaatgacagtgttagaagcctcaaccaccccatccagtgattgatatacatgcccccaaatttttgtagtgaaatataaaaacagtctataatctgattttgtaatcaaggtctagccaattacagtacatctcaaaaagtccttagcaattgggttgttaagtcacccagcaaaatccctgtcattgacttccttggagccatttcctttcatgttttggcttcttggtgtctacatagtttctaagatagcagcccaataaattgtgctattatctccaggtttccacatcttacatatggtatacatttgctgttgtctccttttcaaaatgtagtccaatttgtgactgtttaatttttaaagtgaaagagggagaatgttttagaagaagttaaataatttaaaaattagatgcccaagccctagtaactttgatttgtggaaaaatacttttgattatagccatatagttacagaatctatacagaaacttggcaaatttgaaaatctgaaatctggcccggcgcaggggctcatgcctgtaatcacagccctttgggaagccgaggcgggcagattgcttgaacccaggagtttgagaccagcctgggcaatatggtgaaaccccatctctacaaaaatacagaaattagctaggcatgatggcgcccgcctgtagtcccagctactcgtgatcatgccactgcactccagcctgggttagagtgataccctgtcttaaatggatggatggatggatggatggatagataaataaattaaaaatctgaagtcttatatgtccccctgttgtcaatagagaagagaatcatactactttatacccatagtatctctggaggagtaacaagttgtacgtcttggttctattctgtaacatggaaccaaggtatttgcaagctgacagcgaagaagaggcttcattgtgcatattcctacactgtattttttggtacatttttcagagtttgtaaagaaaacatcttgtactgagtttttaataacttttcatccatttcccaatgtacagtacaagtatatcaaagaacaaaaatgcagtaatccagcattgtcaaaatcactgctatttaaatgctgtatgaagagagtagtgtttaagttcctagtagctatctcacttatttgttggctgtggtagagtaatcattgtggcaatcattttatacatgtttgagttacacatatagctttgagggacatctactaacaccatatttagtggtttctcctaaagactaaagttatagcctcatgttcatttacttagaaatggataaaagtactattaatttaaaaaatacctatgtcttatagttcatttattccaaaaagatatatcaaatgcctaccatgtagtaggcactatccaagttgctaaaatttaaagacgaataaaacaaggccttcttatttggtgaggttgatgaaaagtgaaagcagatgattaaaatgcagtagcataagtaattatttgtgagtgtatttttaatgtatgaagcggttttcagatgtattctttattagtctcaatcacttgcatttccttgaattgaat

SEQ ID NO: 129345 - DNA, 3090 bp, Homo sapiens
ttattcctgattatacaagtctgctatgtcaagtaagagtttaaaacattatttgggccaggcattgtggctcacacctataatcccagtactttgggaggccgaggtgggaggattgcttgagcccaagagttggagaccagtctgggcaacatagggagaccctgtctttacaaaaacattaaaaaaaaaatgttagccagacatgatggcatatatctgaggtcccagctacttgggaagctgaggtgggaggatcacttgagcccgagatcaaggctgcagtgagccatgatcacgccgctgcactccagcctggacaacagagtgagaccctgtctcaaaaaagaaccaaaaacaaattttattttgacatttcaaagactttttcttttgaaccaaccaatctcttacttattaacaaagtttgaagtgatccagtagttgtttaaataaactgactctcccggcagaaagtaactattttctatcccattgtctgatgagatgctctgagtctttggttagatggaagactgcagacaagttagccctgcatctcatttacataatattttttactcttaagcaagaaatcttcaccaggtcctcttgtgatctggtgctgacacagaaccatgaccatagaggtgcccatgacttctttctgtgtcccttgaggatgttggtgccaaaggctacttaaatcctccttggaaggaaacgatttcatcagtcaggaattattgttttaatttgtgtcatttacctgttttgccttcctatcgcaactacctccatgaaagtagttatattgaaaaaagatgcttatattaaaatcagataggctttattaataaagtgtagtgtgtaggcttctatgactaatacatagtttaaagtcagggtaatagctggtgtaatgaaaccaaataaagtttctggctcattcataactgtgcagtagtttcgatttattctttgttattgttgaccaccttgttcttgttagaacaaggcagggaataaataaataaataaaacgattccacattattttctgtttgcctaaattgcaacataaggaagcaacaaaagaaagatccttttcgcttaaacattctgttgatccaagaaaaatcacacagggtctggaagcaacttttatttggagaactagacttgagtacgttcaactgaaagccaatgcaagcttctgttcctctaaaatgatgtcttttgcctaagaatagacccctctttcagtctaaaaaccagataaactgtcctacagtgattcaaatagccagcggcctcactccccccaaacttgactaacaacacagcaatataattctaccgtttaaaacttggctgacccaaacgtgaactttcaaagaaaataagagtcattactaaaagagattccatttctttctggggcctaagttaagatgactttccagaactttgaaaaaacttactctttcaatggccacttaattgtgtaacaaagtaaacattcacaagggaggcaaaatataacattccctatgtttagatttttcaaatatctttaaggggtgcattttctttgttgggttgtcatatgtagtttggagtaatttaccaggttctacccaaaagttgtatcatgatcaaggatcgcttgaacccaggagtttgagaccagcttgggcaccatggcaaaaccctgtctctactaacattacaaaaaattaaccaggtgtggtggtgaatgcctgtggtcttagctactctgaaggctgaggtgcaaggatctcttgagccagtgaggcagaggttgcagtgagctgtattcatggccatagcacttcagcctgggtggcagagtgagatcttgtcttaaagacaaaaaaagaaaaagagggtgaattctacctacctggcaggatcattgggataattgcatgaacataggatctgattcaccacctggtacatagtaggaattcatgatattgtagctgttcttataattattaatttgacctggaacttccatgtcctgattcttagatcttgcatgattatacacgtgttatctaattgatgaatttcaaatatgatctatttcaacagttaaatggctgaacagtcattaatttcaggtggtcctaaacccaaatcagtaaattctttgaggtggataaacctacatttcatttgtagtttaaaaagaaaaagtgaaaaaagtatttaaagtcctgggtcatggaaggcggagcttgcagtgagccaagtttacaccactgcactccagcctgggtaacagagcgagactctgtctcaaaaaaaataaaaaataaaaaataaaataaaaataaagtcctgggtcgataagtgactttatccttctaaggtataaaatgaaggagctacactagatagtctctaagcaaccttcaaactctgaaattctgtggttgatattaggtccagtactggggatctgtgattttttaattgctacaacttctaggaaatgaggagtatcaaagattgttatgggagagtgggggtaggggagttactatcattggtcttttgtgaacaagaccaagaacaaaagaaataagaacaaaaaagaacagcaagccgggcacagtggctcacacctttaatcccagcactttgggaggctgaggcaggtggatcacttgaggtcagaagttcgagaccagcctggccaaagtggagaaaactcgtctccactcaaaatacaaaaattagctgggcatggtggcaggtgcctgtaaacccagctacccaggaggctgaggcaggacagtcacttgaaccgggatggcggccactgctgggagcggagatggcaccactgcactccagcctgggagacagagcgagactctgcctcgaaaaaaaaaaaaaaaggcaacaaaaagaagtcagtccagatttgcagaaataacaggagttattcccatataacacacacacacacacacacacacatttagttctcaagaatagttttctctggcagcaaggattttagggaattccgtttaatctgcatctaagggt

SEQ ID NO: 129346 - DNA, 1329 bp, Homo sapiens
cccagcacttcgggaggccgaggcaggtggatcacctgaggtcaggagtttaaaaccagcctggccaacatggcaaaaccctgtcgctactaaaaataaaaaaattagccgggcatgatattgcttgcctgtaatcccagctactttggaggctgaagcaggagaatcacttgaactcgggagatggaggttgcagtgagcccagatcacgccactgcactccagcctgggtgacagagcgagactccatctcaaaaaaaaaaaaaaaaaggtagccgagcgtggtgggcacatgcctgtaatcccagctactcaggagactgagacaggagaatcacttgaacctgggaggtggaggttgcaatggaccaagattgtgctactgcactccagcctgggtgacagagtgagactccgtctcaaaaaaagaaaaaaaaaaagttgttatttttacttaggaaatgatttatctattttgcaagttcatcttagagcacaattatagctatttattacttattattcattcctatcttcccctttcctctgataaataacctggtagtttttggtaaaataagctaatcagcagggttctctaaataatacagtctcatgcctgtaatcccaacactttgggaggccaggacatgaggatcacctatgtagccaggagtttgagaccagcccgagcaacagagtgagccaattgcttgtgttggccttttactttccatgttttaggttagtcattacttttatcaggtacagagtataaccaagtggatttttcccttctgtcctccctgtacaatgaaggagactgaccgtaagtggaaccaggaagtgttgacgtggtcattactgcaaggaaggaggaaaaatagcagccaaaaatgccatttacgtgaaacttgtgacttgattgaggaaacatttgctcaagcaaaagcttaactgactacctctaaactgaggaatgtaagaattaccatatttacttctgcactagaattaaattctttgtgtgatcactgtctttagctcttattctaacacactggggcataatgagagaggcatttgaatgcagatattatattattctaccttaataaatgtttttctttgtctttgcaataatgatattattagataggcttgatgtcccatgatttttgtcatcaagttcgcatcgtatctatatagagagataggaagatgcgatcttactttttttttatttattttttttgaaatagccttgctctgccagccccggctggagtgcagtggtgcaatctcagctcactgtagcctccacctccc

SEQ ID NO: 129347 - DNA, 1127 bp, Homo sapiens
acaaaataaaaaataggccgggcgcggtggctcatacctgtaatcccagcacttggggaggctgaggcgggcggatcacgaggtcaggagatcgagaccatcctggctaacatggtgaaaccccgtctctactaaaaataaaaaaattagctggacctggtggcacacgcctgtaatcccagctactcgggaggctgaggcaggagaatcgcttgaatccaggaggcggagattgcagtgagccgagactgtgccactgaactccagcgagactccgtctcaaaaaaagaaaaataaagttatttctgatatggtattaagagaatccacgaataaaaaatattgatggcagataaatcagaacattcctttacccctttttaattttttggagggtttatttttcagatcgaacgataaggaaacatatgttgatactacccagcgtctgtaacagaggaagttaggcagtatgagggaaaaaaaaaatcaatcacgggagagagcggaagagatctaccaccttatccatcttcttgactgtacagtctccagagcatttccattaatgggcaagaaacatcccagtgcattgtacacctgttatttgtaaactcttgtgacatgaataatgctttcctcacaatctgttctactgaactttacttttttctaatagttctgccaagtttgagatctgcaattttagctaccatgatgttccactgctttttctacctacacagtcccacacagactgtgctgaaaatcaagaagaaacaatgatacactgcaccagacccgctgtaagtttaaaaaccccaaaacagtgtttaggagcaagtgaaagaaaaaaattttaactctacctttgcagatcgcacacaaatctcacatttgtccaaccccaggtgctcaaagttatttcatcattacggttaatattaaaaatggacagttacggctactatcaaaactcaaaatagtccaggcagggtagctcactcctgtagttccagcactgtgaaaggctgaggcgggaagattgcttgaccagcctgggcatcatagcaagacactgtctctacaaaaaaattaaaagccaaacaaaaaaacaaactagctgg

SEQ ID NO: 129348 - DNA, 1520 bp, Homo sapiens
tctgccatcttcaacaggtagctgtcatcttatgatctaaggtgggtgctctacttcccacagtcatcttctaggcaacaagaaagcaggaaaaaagctcttattttatttttgattttgttgcataccaaaggaatgttctcttttcaaggcaccacctggaagttgcaggcatcacttctgtccacaccataggccagaatttactaatatggtttgagtatccaaaataatgctccagaatctgaagctttttgtctactgacatgatgcccaaagggaatgctcaatggaaagtgtaattgcaaatatcccccaatatggaaaaattcgaaaactgaacacttctgggcccaagcatttcagttaaagggtactcaacctgtacagtattaactagcaagggaatttaggaaatcatgtgcccaacagaaatttattactacataaaatagagaatatattagaggaagttagcggttagaatagtaaagtgtgtaatagtgcaatgttttgtgaattttggatactcatcattataaacatctgacaaaaagactgaactgcattatagagctgctgggttctataaatcaccagtcttgagcatccctgcaaagtatttccttccagcctgtcacccatgtagaaaaagatctcctaattcttaatttaggaaagactttgtaaggagacattattatattaagaagtgaaacatacgataaaaagaaaaatgaattccataacaaaggggagaaagtaaacgtctattcaactttcattgaaataaatattttcagaactttattgtgtctatacaaaattgtatctgcatctttttttttaacttagcaatgaatcttagactttatatcagtaatggagatctaactcattttaaaaatgatacgtagtaatttggggaattttaaaacagtgttaatacataactgtcacatatctcttttgtgattacatttttttgctagatgatggattatagatagctctctgatacaaacaggagatttctaaaagcctcttagtcctcttacctcagcaatctatagtccatcctttcagtgttcctaaatttcctctgtgagaatatatatgctgttaaaagttaaggggactctgacacggaaagcaaataaacaaaaattattagatggtttacaattgtagtgcccactgtttaattcagaatggaacacagaaaaataaattaggcttgttctaaatgtttgcctaattcttttagaatattagaatttaacttattagctgtatgttgggtaagcattgcaagagttaacttgtatttgacatttttcacatgcccttaacattaagcatgtgtgaggtcttcctgtgtgcatatttggatgtacagcctaactgaggtggaaaacaccaagatgtttgcagggcagatgcattccaagtatgtgttcttattgctcttcctgccattggcttcaagatgagctgtcctgcctgttttcagtactagt

SEQ ID NO: 129349 - DNA, 1549 bp, Homo sapiens
ttataggcacccgccaccatgcccagctaatttttgtatttttcatagatacaggctttcgccatgttggccaggcttgtctcaaactcctgacctcaggtcacctgcccacctcagcctcccaaagtgctgggattacaggcatgaaccaccgtgcccggcccacacctcctttttaaatggagacagaagcaagcactgtcacctgtacctcacacaaggagaaacttggcctcagggtgattcactggaggtgcattgctgctcctatgaggcttgaggccaggttttctgcttctctgatagcctcttaggcattttgcctttcacagagtacttttccattattttataaagacctccttcagggccagattctacagttttatagttagaatttggtttcaacagaaaatcttcaaaaattacaatttacttttagttacacttcaagtcaactaggatgtcctgtttagaagcagggctccaagcctttttaaagaacagtttatctttcttttaaacaaatgaaggtattaaacggctcacagatggaaggcaggttgccgcattaaaataagttagtgcatggtttccttttcccaaataactttcctcttaaagtgagggtatgggagaatggattaaaattatagattgctacatatagacactttaaaatcaacgagcatagtaactagttggcattttaatattcttttaaaagtaagttgcttaaaaaccctggaggtagactatttaatcatttgcatgctagtttctaagaattcataattaagcaattcagcatgagatggatttatagatggactatcttagatttggtgttctctagcaggcagacttagtttcagtctggtggaaacactggatggtttcagcccagtatctgtttgcttttactccctaaacccacaactggactttgaggaggaggtgggaaggatgtcatgggaggtcacttcaggtagagtcagttcctgtgatactgactggcagctcccaggtcatgagcaaatggcaaccttggtagtatgcctccactgctgtccaggccttcagttccacttcttgtcttggaattcatgacacttgaaagagaagaagtcatctcataaagtgctgcatagtatttccagagagctgcatggctgtgaaaacataattggagttctaaaagctggcacagtcttttataacaacaggtaaatgcagtgaccagtttatttgtggcttttggtttcccactgcctgaaagcaaaaaaaaaaaaaaaaaaaaaaagtgtgtttttgaaaattaaaggaaggactttcatttaaaaataaagaagcttcagaataaaattacttctcctttgccttttatggtactgactgatgaaaggcagatatatatctggtaaaaatcctacaatgtatattaaaatgagtaaaaaatatcaaaaaatatggtgactagccagtatcttaatatttttgaaaaaatagactccttgaaaagccctggaggtagaaaatgtaattactt

SEQ ID NO: 129350 - DNA, 1067 bp, Homo sapiens
ttgtcattagcccgaaaccatcatataatgattgtgtttcttttctatcatatttcagccacagtatcatttcaggtgtccctcagaaagacgtcacatccatagatggcaccttttagggaggaagcagcagtcaagggccattagtactagaacacaggccttttctgtcaagtgctttgtcctccatatcactctgccttcctttgcgagatgccttaacaaggctgcattcgtgtgtctgagagatcatcagtacaggttctaaggccaaacaggttgtaagaagaaggtgatgatcaagcatggcattttacatcatcagtccttagttaagaaaaatatgggcattcctgagggctgtcataagtggccagaaatcagggtctgtaaagtccaaggtacgggagaactggaagcaatgagtaactcatgtttgatgtacagagatgattgtacccagtgttaccatttacagagaaggcatccaaaccataataagcaaaatgctagactagatgtcactgggcagggctgggattggggggtgttggaggtagaatatcaccaggtggcagttagatactcattgctggcattttatccagacaccagaagaacatgatcattgtaagtatatttgttatctctcctacctccaccccctacaagaattcttaaaaatactgctagtgagtgcatagggaggatccgtatctcatttcttttgtgtggttcatgtaattctgtcatctttgacttctataatgatgcctaggtagggaagagtgccaaatggtccttagccctcaaattcctgccaattgctgagttgctgatagtattctctactgcaggggatataccaggacaattagctttagctcaaaaccatttatcagagaatgtgggagactgactcctggcacttgtttgtgtcatgtgagatatgctatttgtctaaaaactatccttttcacatttaatagttactgtttgctagtcagaacttccaaaatcttttccttggagatttccttctgaaaatgtcagtatctcctgacttt

SEQ ID NO: 129351 - DNA, 1466 bp, Homo sapiens
gaatgaggtcagaagagcaataattttgttgtgtgtgtgttttttaatgcatttcaaaaactagatgtgtgtctttctgtgtgtatgttatatatttatctgatatttgttgttttttagcgtttctagtttttgtcatctaagatgacactgcaaataaaatcgaaaatttctgatgagtggtatactctccagcaaagatgaagatatttgggcaaaaaaatgatgcttgtgctagccttaaaaggtcatcgaaggtctgtgagccagttgtctaagcgctgcttacactctgatggtgttgagggatgaggtgtaaggctaaggggtccatattcttattccctgggtccatagtacttttgacacagtttcagttagcaaaaaagtattgcatgtggtgtgtgacattaaccacactaaaaagatttttttttaaaatcatggttatattgtagtttaacatacatatacagtcttttaagatttctgatgagagtttgtattttattatatttagaatatttggaaattctttcactgggatcggaacaaattacctgtaattaacaatagcttagatgtggccttgcaagagtgattgagaacctttgggtcacgtgtggtgtatcatgaggtcaggagtttaagaccagcctggccaagatagtgaaaccccgtctctaccaaaatgtacaaaaattagctgggcatggtggcgtgcgcctgtagtcccagctacttgggaggctgaggcagagaattgcttgaaaccccggaggtggaggttgcagtgagccgagatcacgccactgtactccagcctggaagacagagcgagactccatctcacacacacaaagaaacaacagaactttcagaacctttggcacaacagaactgcatatctgggatgttggtcgtatctttatttggtcgtactaaaacacagactctctggcactgtgagaactgtttgcctgcacatatctttgcctgtgttctggccaatgctggcctgtcataccaggttccaaagatcactgacaggctgggtcatgtctgctctgaaacatccttcatatgcccccaggttctgacagttttgagagaatcctttctcagttttgagaacagttttggaaactgcccgagatgtttgaaattcacaaaatggaaaatattgagctggtttctgtaaaatatgctattttatttgtgctctttacagatatattacaaatctgtattctcattcacaggttaaactttgtaaattccaaggtcctgaaaggtggtggtcatggtggtagtagtataaataagcatttcagactggaaattcagtattaataatgaaatatttgtgtttaatttgtttagtgatatgcaatttgttcagtggtaatgttctgtttctttaatagcaattgaagcactgttttattatgggtaacttctcaaaa

SEQ ID NO: 129352 - DNA, 2866 bp, Homo sapiens
cagcagggttcagtcttgcaacttggtgtttcagctcatggttacaaagttaacaaataacttaatagattatttaaaaagagtaaaagaagttaaccagtgtgtaaaatttacaagctgggccctgatgccccgcttgtgcattaaaacaccctagctgtatgcgatttatgctgcatgggtatgtggaggccttaacttctcagtttctgaaacccaagtttatattacatggtctgtcagaagagggatggcactgccataggtatgggagtgatccctcagttcttatcttagtagagcagtcacaaagcaagaatacccctttgactgaaaccaggatgtttctgctcctggggcaaccttagtcactggttcccctttttggttagattattttttcagaagtaaagaaacactgacttttggtcagaattgaaatgtgaagcaagttacatgaatatatttttgccagatcaagcttgtccctgaggatcaaggacagggaggaaaatgagaaagaatatttctaaggacagtggacatgctgagtttgtattttcaaacgaaggaaatacatttgggcttggatttgttctcatttttaaagtagttgtttatgcttgtaatttaaatgccaaaatgtataaatacataaaatgaaggttatctataattctaccttcctctccactattaacatatagataatttggtatgtattcctttgataccttttttttttcccttgagcatgtactaacttataaaaaccctaagagaattaaagtgggaatatgggcagttcctgctgtttgctttttcccttaataattgtgaaccttgttctttgtcagtagatctggatatctacttactcagctttttaaatatacaggttaatgagtttgggcttttctttccccaaaaaacttcaagtatgaatttgcatttgttgaaattggacgtatgtatttgtaagtatgttttaattatcataaattaaaatgtggataattttcctggtaaccatatattgatcactattctggtctatatggtcctgaattttttttgcactttctctttttgggtctgtctccatttcagtctatctcttacatttttctccttgattcagattggtttttatcctacttccctttcctcccttctaaatttctttataatactaatctctcctgacaaacacatataggtgtttgtcagttgatgttgtgtaactctattgataaattgtgactgggaaatgccatcttattttgcttgccatgtcaccagctgaactgtttacaagcaaatatgtatatctccatggatacaggattatgtaaatccttggatttgcatatgtttctaagtcagtcgagatatttatagaacatacactctgtgcctaggactgtgttatacactacaaataacagccttcaaactctaaaatgcccatagaaaggtttcatctgtgaatccactgtgtgtttcaagaatggtttctccaaaacaatgattcaaacatacagcacatttaaaagctgctttgaggtcttcatttatatctataagaatatgggtagatagagagagagatgaatgtagccattaacaccatgggtttactcaagagtgtttcaaataagtaactatacagtcattcctgagtcattagaagatagttatccttcccagttccatgaatttaagaggaacctcaagagcccagctcagagcagctagatagatgaccttaaaacttttatgaaaaactagaacatgcagagaaaatgctcatagtctttggatactatgtgtttaccagatgtggctgctagttgaaaagtgtctgtgattattctctgttgtgtactgaagtcgagcatttttctattgctttttattttcatgcctagattaccaacaagattagatatgctctttattaaagagagggccatttcaaggcctgcttttggcctttctctccagggaagctcaagactgccacaaatggctttacttactgaatcggagtttattaaatgagaagacagtcaataaaatgtgtcttgcctttcctagtgggagctggcaatgccatttaagaacacgtggccagtttatccaaaatctaactgtagcctctgcaggaatgctggataatggctaagccaagaacactcttgctcttctgcccagcacaggatgatttttactagcatttattctttcagtcctgttggggtaaaaaggaagttgaaggtacatctacaaatctttttgagtctctttgggacaaagctgtcagcagtttcatctcttgaacttctatgaggcatgttgtgtacttgtctaagaaatatgtttccccatgtgttccataaagtaaacatctgcggatgctaaaggcatagtgccaggcacatctgtgtccatagacattgctggtaaactaagggctgctctggataatgctttgacctgctgcaaagttcagttggcgtagtaattcatttgttatttttggggaacagttttgttaatgagtatttcatcataaatttacatgctgcttatgcttgtatcttactcttggggtttttttagttactttgtgaatgagctaagctttctgttatcacaggcagccattacatattcagtttatttcactgacagtaagctccctgaaggcaaggatcatgtctatgaattcagtaggcttagcaaagccaaaactctgaagtgccctccctttagtggctcagatgaaaagtatgatggtaataagagtagagaaactaaaatgttttaaaatatttctgtgattctaggccgggcacggtgg

SEQ ID NO: 129353 - DNA, 2027 bp, Homo sapiens
tttttccccatgtatgacaattttctattgaaacactaagataagaatctcttcgctttccattatggaatatttacataagaaagaatttcctccataaactttataatataatattgatacaaatattgactttgtttctagtcccttaaagaaagggaggtaataaattgaggtaattctcaacctaataaaataaacttacagtatttaatgcatatttattttagaaagatggaaaatacaaataagctaataaacattaaaatcagttactataccattgaggctaaacgatagaaacatttgagtacacatactataagataaatttttttcctctaaatacttatatgttggctactttatagaacaaagtggaactatatatactttttccttgaacgtcatttttattggctgtgtaatatttcattgtatgatacagatgaaccttagtttatattaagtaaccttttgttcataatccccagatttcaagtaacctctgttggtaaattgacatttatgaagcccttttctctataacaatattataaataatagtttattttctaggttaactcctcaaattctaattcatatttatcacatggtaagatgcaccactagataaatggcaccatgacacttagaacgtaagttctgcttatcgtatcatttttgtggaaatctctgtaatccagttagaacctggcacagtgtcagagagaaaacaggcacttcccaaaatctgaataaatggaagatggtattctcgctctgcccaggttgtcctgaccagaacagccaagtggaatagatggtgttcactttctggactatgggaggagagttgcgggtgacagggagggcacactggattagcaggatttcctcactgtttgtatctttgacacttgtcagcaattctgcctcagcgaacttcataaagaccaccaggaacttgtttatctggtggcaaagttgggggtagtggaaatgaggatgcaaaagatacagaacacttgaacaacaaacttgatgtaattgatacttatagatcattccacccagccccagcagaatacacatttgttttaagtgcacacagaacatttaccatgttctgaaacataagacaaggaattgatgggcattaaaaaaagcatatacctttcatatataggcattccacttctaggtgtttatccaaaaagaaagaaagtatacatccatacaaagatttgtacatgaatgttcatagccattttatttgtaatagccaaaactagaataacctaaatgtcaacatgtgaatggataaactgtggtgtatccacactacagaatacttctcagtaataaaaaggaatagactgttgatacattcaacaacatagatgaatctcaaagtaaatttcacttcatgctaagggaaagaagccagatgaaaagggtacatactctgtggttccctctgtatatgtaagtgtttgagacatatatactaatataaagagatcagagcagtgattgcctggggatggagaatggtgggacagagtgggaggaaggattaaaggggcatgaataaacttttggtggtgatagattgtcttggttgtgatggtggtgatagattgtcttggttgtgatgtttcttaggttatacatatgtcaaaacatcacatatttcaagatgtgtagtttattatatatcaatcataacctcaataaagctgtttataaatatatcataaaataaggcattcagaattctggggctatttacatcattatagtgtttatcaaacatacttacatgcaaatggcatgacattttactgtgtactgtgctgggtcaataaaagggccttgcttggtgattcgcacttctgtgtaacaggaaacagtgaaaagtgttaggaatctagaaaaagccaggcgaggtggctcatgcctgtaatcccagcactgtgggaggccgagatgggaggatctcttgagctcaggagtttgagatc

SEQ ID NO: 129354 - DNA, 1045 bp, Homo sapiens
gaaacaaattgtttttatattatttttgaagcacattatataggcgatatatttagggcagaggagtggcagatttactgtgctcatgtcatttttttcttaagctaatatttaaattatatggaacctccccccatccttcacatttttagaagtgtgcaatggctagttgggaaaagttagcttgtaaatttaaatcaactagatgtaattcactctgaataattcacatagaaatattcaagtgttggcttaggggatgtaccttaagattacacagaaggctgcatctcccctaaaatttaaaaaggaaaaaaaagtgttggcttagtggcatcttaacagtgaagtattcgttgtatcatggaaagagcatgaatttagtatgagttgtggaatatttggaataatatgtttctgagatatcaggtgagagttaactctctggagtgtccacacccttgatcacttcctaaatttatttttccaggtccggaccctatttgtcagtggccttcctctggatatcaaacctcgggagctctatctgcttttcagaccatttaaggtacctttttttatctttcagaaattataaaatgagacaaaagtctgtatgctttctgggagctttttgaagcaagaaatgaaatatttgagaagaaaacagatgtttttaaaaggttaatgagtaaaggagatttaacaactgagttctaatgtacagtctcacttaggataattacatatttatatttcaaatgcagtaatgtaagtgaagatttatttctagtttcataccttattatttgaaatagtactgttgatactgttctttggaaatgtaaataggtttttatgaactgagttaagaacctaaccaccgttattttttccatggcaaaactttcaaacaaagtaaaacaaaattttaaaggatacctaggtgtaagttgatggtaatatttcctggtgtttattgaaatatttaatgcagttacctgtccttcctatggaaataagatcacttgatagatacttaatg

SEQ ID NO: 129355 - DNA, 1040 bp, Homo sapiens
gtgctcaagtttacacacataaaaattggcagagccaagattcaaaccaagcagtctgactctgccctctctgttctgaactattatgttatactgcttttctgtttgtgacttgagaacacagtatatccctaccagtggtgttttacttgagtgaaatatccagttgtcctttgccttcaagaccttcatggtgtttaaacctctagttttttcagaagagagcaccttgaagaaaggaagaggcagagctgtgaatcatgacctctctggccataagagctcaaggcctttgaggtgaaatgtttatagtagctaattggtaacatagttctctgctgggaagatgtaaggatgaatcaatctcaacatcctgcccagaaaccccgactagaaagtcagcaccctagtacattcctgacaaccctcttttaattaaagtccctggaggctgaccctagtctgcaaatctgtctctgcgctgatgtgtgtagtggtcaatcacgtcaagtggtgtgtttttcccctgtgtcgtccgttaatgcaagccaccagctattgattattttcagaaataaacacattttgttatccttatcttgaggagccgggaggggtgaagagagggagtgaaagagggagggagtgtttctgtcttccttgagcatgagctggaataaaaacctgaagggattatttttgcatgtccccatcagaagagcaacatgaaaactggttccttcagtaagttagcaaagtaactcaacaaaattcaacatcattgcctgcttaaccatttctggcagttttgaaaatgtggtcagggagttttaccaactatatttttttgagacggagtctggctgtgtctcccaggctggagtgtagtgacgccatcggctcactgcaagctctgcctcccgggttcataccattctcctgcctcagcctcccaagtagctgggactacaggcacccaccaccatgctcggctaatttttttgtatttttagtagagatggggtttcaccacttgtcga

SEQ ID NO: 129356 - DNA, 3569 bp, Homo sapiens
taagtactaatgatgtaattgtagggggtttccatatgaggtggtgggaagtaatggaatctctttggacgggaaatcaagtggaaagaatatgactgcacagtctaagagggagggattcatcaatttaattagcactctaaagagctttttccaagaattgtgatcagatatgcagattattaaatagcactctgctttttgattgctctgaatgaaatgctcaaaatatctgacatctgatgatgtgggtcttattttaatctagccccatcccatccaatggtggtgcgtagtgctgctttgttttttccagaggagatatttgaggcgttagcttgctcatcattatactctaaatgactatgctcagaatagattgaaatcctggctttttttatttcatgaggctttccttttagatatgcagcattaaaaaaaaaaaactggttatagcctttattctggttgattaaaaatttacatataaggctttcccaaaagacgtgtgttgtaatagaataaattacagtcatttgtaattgagtagatatatctgtatttggtttgtagttatgttgtttgccatgtgttttgagacttttaccagtattgttttggtgaatatttttcctccttagtatgttgaaaaactaaacaatttaagggaactaagttagagaaggtggaaggaagcagaatgtggtttcagatgctgaggatgaatcctcaggtgaggagtctcagcgaaggctggctccatcatgctctaggcagttggcctaagtggctgtgaacaagtgctgactgaagcactcagagtgtttagggtgcttcctacaaggcaagcggccacttgactggttgtaatacaggtaccattttggaggcgtctgggaacttgcgtctggcctttgtgttgctgtggtacctgcaggtacccctggcagctgctcctttgagtagaccatgcagagtgctgttggagagacctgatataggtgatgacttagaggtctaaggaaaagtctttatacttcatataatggtgtcattgatacacaaccttaaaaggtttttagactttggaacaaaaatgtgtacactctgagaagaaacaccttaattcttgttggtttttcatataaagcatataggaacatcttaggattccaggaattccagagtccagactttttctggatttggataaatgaccttcttgtcagaataactgcctactcactctgttcctctcctgtataacaaagtataaaccaattatttattgagcaccagtggtatacaccgaagcacggtgtataattgaatgttttgatataaaagttgttttatgatttttgcattgaatacgtaaaaaccagaattttctcagtataatgacactttaaacttaaaagtagaaccacaatttcaatttagcagtgttttattttaaccaggtgggaaccttctaaatgcagaaatattctgggtcctttaaagttatgttagatgaagttttcaccatgttcttttcattgttcttacaaaggaagtaacaagcagttgaagcttcacagacttggctctcattgctttactatacttctcctatgtgtataaagatgtcactgactcattttctgaacaataggcttttatagtgacctgtcatctgacaaggcaacattcccttaggtgtggtaggttgcatttttgttttttaaagataactgaagggttttgtttgtttgttaaagaataaagacatggtgttgctgtattgcccaggctggttggtctccagctcctggactcaagtgattctccctccttggccttccagagtgttgagattacaagcgtgagccaccacacccagcctgaagttttttgcttgtttgtttttgtttttgttttaatgtttaaatgataatagtcaaaaaaaactgtgtttcctcatcatactgagtacagcgaacataatttcaatttttcttggtgcccaaaggttatcattacaaatagcaggtaatgaacctagtgtaatataatgatagaggtgtttaaccctgtttgcccctgtgccagctggccgcagatcactgttgtctggtcttgaggtctggttttaggttattcttcttgcactaggctctccattctttttttttttcactggcagtacgcctttctttagcactgtcctctcctttaatcattaatagtttgctacttatgtgttaataacttgggaaggaccccaaataaaacaggtctaattctgtcctgttttgtgggcctgagggaaaattcgtatttacctatggaataatgagcctgggctttctgctgcccaaagctgacttacataagagtgtaggacatttactgagctcctggctgatctctttcttgacgttttgaacttttctatgtaaagtagtagaggtattagaaatctttccgatgttgtagttagggaaacagacgtggagaggatgggtgattaagtcagcatgtgtaagtttagagctccaactaggaggcaactaaaagtaaacttcttgcatctaagccttgtccattttatacaacatccttttgcttgctttgtacatgggatgttgctgcatttttccttgtggcagttacagagtatttaattcacaatgtccaggacaaattgccaccataaagtttggtatgtgaccatggagcagacccattcaaggtaatgtatttagtcatgaagctaataggtatattctttgtgatccaacatattaggctctttttagggtcatcttttctaattgatgagttaaaaacatatgatgcttgtagccattacagaattttctcctcccatgtcatctgtccagggttctcttaacattttcttacttacctttggagagagaattcaatattgtaatgttttgttttattccactattgagaaacatatgcctgaatccagtaaatttctctgtgtataatacttcagtgttatgaacgacttctccatgtttaatttctctttttgttgtttctgtcttgattgctatctggttcagttgttagtattagtgattagtcttttctcaaaatgactaatttttaaaatctattttctcatttttggactgggcttcagccattttgataattgtgtggaaaaacatgctcagattgaattaagttgtaacagtgaacttttatcagggaattaaaccttctaaagttaaatacagtacgttttgtttctatagcaaaaagtcccacgttaggcaaagaataacccaaacccagacttcttttcaggttatctttggtctcattaatccacatcattaaaaacccctcctttctttaacctgacagcaaaatatctgacctattctttgtctttaactcactttgtaatttctgtacctgttttgaatttccaagctaaaggaagggggcactgaaaatcttaagtatcaaattatttttaggacttgtttataattttggaaagtaaatcaaattcactaatataggcagttagctagatttag

SEQ ID NO: 129357 - DNA, 1035 bp, Homo sapiens
tccctgattttggatagttgttattaggctaggttttatcttagactgtattatgttacacgagaactagagaagtctgtacatcactacaaattgccttcccaaccaaaattgcttaggctagtgtagtaatttgctttactctcaaactatactcattaatctaagtgatctctaattatcagtgaacctccaagttcagtgttgtttttcttccagatagctcttgagatgtaatttgcatatgattcacccatttaaaattttcaattcaatggcttttggtatattacattattttttttaattacggtaaaatacatttaaaattttgctattttaatgacttttaaatgtactctttcttggcattaattacattcaccatgttatgcaatcattaccactatttccaaactttttcatcaacccaagcagaaactctgtagcccttaatgcagtaaatacctccccattctcccttttccccagcccctggtaatctctaatctgcttgctttctccgtgaatttgcctattctaaataatgaaatatttgtctttttgcttctggctcttctttcttagcataacatttttgagattcatccacgctgtggcatttaccagaatcaaattcctttttatagctaaataaaattgtattatatggatatgtacattttgtttatccattcatttgttggtggacacttagattgtttccatgttttggctattgcgaataaggctgcagtgaacactgatgtgtaagtatctgaatctgttaattcctttgggtatacctaggagtagaatttctgggtcatgtggtgatcatatgttagctttttgtttactttggtttgtaattttttccatagtggttgcaccattttgcattaaaaacttgttcctgtttgtaaaattataaccattctagtagatacgaagcaatcgtggattcttgctaaatgctgtttgactgattttaatagtagatttgatttctgtaggaatttcacatgacttaaa

SEQ ID NO: 129358 - DNA, 1319 bp, Homo sapiens
tttaatttgtaagaaaatatgctgagaaaagacttaatagtgtcagatgttgaaaaaacagctgatatgatcaggaaaacttagccctattttcatttccataaattcctggcattcaaataaacactacagttatttataaatatcacagtgattacagccttgtacataatttgttatactaaatagtttgagctttccaactaccaaggttctttacaattagatataattaattcattagttctataccaagtttctcatttgtgagatggaggtattatttacttcgaaatggtaaagggaaaacaagcaaaagcatttgcaaatgctctgtaagtaaacctatatcatgaatgtattttcttggccagaagtactggtacagaccgttaagtatggagggataccagggcagtcaagacctgcactgggtacatagaaacattttggcttggttagacagtctctgtttcctgtaccacaggttttcctgacagcctgtgcaagttaggacttttgatcttaatatttgtacagcttgtgagttaggtgaattatttccaccaaacaaaacattttacgaatataagcatccagatggcctatctcaactcccatggcccccaccagacactatatcaatatgtttcttatcagttttgaaattttctccttaagtttcatttagcatattgctgaaagtgggttaaagaggcccaattagtgagatcccagctgggacttttagatgggaaatatgcaggattgccagatgagatcatgggcctgatctagtgtttatctgttaaatctgtttataactgcttaactcttgacttgcagacttttaaggcagccatttgacgtcacagggttgggaacgaggcttgtgccagtataaagccgctgtgatgtggggccattgggcccttctgtttttctcaactatgtgcatgcactttggagcttgacaaacagccgtgtccagtgaactccccccaaagaaaattgaagttgactcaccgtgaaaggcataccaccaaaagtgactcctaacccatgtacaattcagaaagaaagcactagttaacaagtgcccagtgtgtgattatttagttctagaatctgtccagattttctttgttctggctctgttctcttcatggtggccctgcagtttttagatgttataaaacctccctacgattataatagcatgtaagttaaaagttgttgtgaaaaaacaaatgaagatgcatttataagtagtcttcagtctttgcctgaagaagagtaagttggttatttgaatttat

SEQ ID NO: 129359 - DNA, 2265 bp, Homo sapiens
cctcccgaatagctgggactacaggcacccgccaccacgcccggctaatttttttgtattttttagtagagacaggatttcactgtgttagtcaggatggtctcgatctcctgattttgtgatcctcccgcctcggccttccaaagtgctgggattacaggcgagagccaccacgcccagcctctgtatactggtttttaaaataattttggtggaacctcaaattccagtggattcagagtatttctaaacattgacttatagttaatggtaaaattattcatccttcctttcttggagctcatcagggaaacacagttgcaatgttatccttaatattctcaagcctataaaatattgtaacctgaacaaacacatcctcatctcccttttattttatcttaattgtgcacatctttctccatttcaaattctaattgaatctctgtttcgaagacccaacatccattgattataatgtttctttagcagccagtgagattcctgacttagaggggttttgtttgttattgttgtcttttttttttgagacggagtctcgctctgtcacccaggctggagtgcaatggtgcaatcttggctcactgcaacctctgcctccggggttcaagtgattctcctgcctcagcctcctgagtagctgggattacaggcgcgtgcctccacgcccggctaattttttgtatatttggtagagacagggtttcaccataccatgttggtcaggctggtcttgaactcctggacctcgtgatgcgcccacctcggcctcccaactgacttagagtttatagataagcctttttgcagaaggggagaaattcagcctcagtttggttagatcactagtaatctaattgcaaggattcattagagtagaggaagagcactgatttcagttgtgtagtggcgagataggttttgcctcactttgttttggctccctgtgcagcacaggaagtactttgcagtgaacttcctaagtttggacttgactgtttacattcttttcaactaacttgtgccttaagccccaagttcttggttggaaggaggttgcaagccatttgatggtgtgtgttagaggtgttttaaaaaatagggttaaggagcaaatttacccactttgcttatttctgtacttttatgaaattcatcagtgacatctccccccaaccctattgattaatttagtatatggtattagtaaatgatgttgaggaccagtaaataatgtattggtataaatggctcatttttatccttagtgaaataaaggatataaaaccattgacttataaaattatttgtattttttaaatgtactacagctttttctttctaaaaatttgttgtcaagttgtacagtttgaaaattagtagctagatcaagatagtgattatctttgggggagggggaagaaaacaagaaaatgcacgttttctacttgctcttggtatttcatttcattaacattacctaaacttggttgggcacacacagggtgggaggtttcactggatcctgttgggggctggggggctgattgctaaaatactggagagcagaaacaggattgtgaaaatatacttggaggcctattgcggtctatgtctgatctttaaatagaaatcttctcaaaatggttttggaaagtttaggcaactgttttttttcaattgtagagtttgtttatgtcagtactgttttctctcctcctcctacctctttttttcttctgcaccagccactaataaaagctcaaagtaaactttgcagaacgatccttaaaacatatacagaaagttaagataggtcctcaaatgacctaacaagcacttaaggtgaagctaaaagaagagctcgttaaatgcattctcttagcctgcctacctcacaagtaggacttattcttcatgtgcttttccatgtagacacagacacccccacccctcccccaatggagtttcgctcttgtcgcccaggctggagtgcaatggcacaatctcggctcactgcaatctccggcctccacgattcaggcaattcttctgcctcagcctcctgagtagctgggattacaggcgtgcagcaccacgtctggctaatttttgtatttttattagagatagggtttcaccatggttgtcaggctggtctcgaactcctgacctcaggtgatccacctgccccggcctcccaaagtgctgacattacaggtgtgagccactgcgcccagccga

SEQ ID NO: 129360 - DNA, 1374 bp, Homo sapiens
cctttaagctttcattttgagtgccttcatttagcaggtagcaggagaaaaagacattgatgcaaaggggaaagaatgtatgccaatgggtttattcattatccttacagtgagacaggagaggaaaaggcagtaaggactctgcaatgaaagggactactggcagcaccagccacgtttggtgtttgtgcattaaggattctaagggatgtttttatgcctaccagagcagttgacctgctgctttaccttctgttcaccttcagagttctcggtgtaaaaatgtgagcatcaggattcctgagtaagagagtaccatctgcactctggcctatgtttctttccatgtaatattatctatttcaaagtgtcactgtaaaatatttctttaatgggtaactgactgtgtttgggttagaaacagccctttcctatcattgtcagggcccaggtctttcaatcatccttttcagaatggtttgagaacatagtggcaaaagttcaaacaatcacgccctctcgaccctttggaaaataaactctgcttgtctctgattctcttgacatgttaaagattgcgtttatcgcttcttcaaaggccctgtcatgactttatagtcatcctatacaaagcagattctcctagggcatggttatatacataggggtggttggctaacacaaaaagtaagtgtgtgttgtagaaaagaaattaattgggctggggtggatggtcaagtcagatggagattccagataccttcgaagtatatctgcctggttcctcctacaaagggaatccagtctctgcaattaccagccaggcctctaagatctactcagactgtgtgaaccaacagacatggggcaggagaagcaggacacacgtcagctccctgtgggggaaacacaggaaataaaggaaactacacagcatcagactggacagcagctcaggtgtcctgctgctttctcccaattggggcagtctcagagcagagtatgaatctcatctttctctttctaagtaatagaagaacctctccaaaaaagccaaaggagaagaatccccattggttcatatttggaagaggagctccatagctgataagcactgggccatagggattagtgtttatcagatgtcaggcattaatccggccatttacaagatctcatttaatctttacaatgaatgctatgaaatatggactatattcatccccagtttacagcagaggactgagacacagaaaggttaaacagtatatccaaggtcaatactggagtagtatttgaatctaggaagtcagactcttaaatccacactcccgattctcacagtgtaagcctcttgttcctggggaggttcca

SEQ ID NO: 129361 - DNA, 1066 bp, Homo sapiens
caaggggttaaaaatcaaaactgacttcaagatatgtggtaacctaacacttcctggaagactgttcaattaggcaatcaagcgagaaactgtgcccagactcatggcccagcatcacctctaatggctccatgggcacgtataccacaggaagccttgggaaaggggtctctttctccaagtgcagtatagctgttttaccaatggacaggcaaacatgttttcaaatgactgatttaggcaagggaaaaaaggagtattaaatcagattattctaaggtaaagccagggcaagcactgggaggtagttggattaagaaaaagaatgaggcataattggtgtgatacagtttctcattgggcagtaacccagcagcacaggctgttgtattaacagtcctgatgtctttgcaagcaatgcccttatttaggaaaagtatgaaatacggtttacatctgacggattctttccctcacttgttcattctctgttggaatccatatctacctaagtttcatcacaatgcaaactgaacaacagcctcagttattatctggaaacaatgtagtctttataaaagaaaaatcttcacggaactgtaatgtcctcacacacacacgctctattgggaatttaaaaattggattgtgatatggattctaccagtagttagctgggaatttaggcacattatttttctggatcttttttcatctgtgttgggaagcctattggcattttggatgagaattcttaacattgtgtgggactatcctgctccttttaggactttatcttcctgcctcctgcctaatgaatgcctgtgtggtattcagtcatataacagccttcagatacccttgcgcatttctttttttttttttgagacggagtcttgctctgtctcccaggctggagtgcagtggcatgatctcagctcactgtaatctccaccacctgatttcacgccattctcctgcctcagcctcccaagtatctgggactacaggcgtccgccaccacgcccggctaattttttgtatttttagtagagcgggggtttca

SEQ ID NO: 129362 - DNA, 1038 bp, Homo sapiens
gagtgtcacaagttttcacttgtaacacagtgatatattaataaatggtagaaaacttctactggttcatttttaactcacctgcacactgttgtctctcagtgagtcctgtgctctccactgtaatagattacccagatgcgggtttatctgtggcctgtcatggagtcatttcaggctccaactgagcgtaacaattgttttcacagactcctggggaaactttcgactataccttgcctagtttctgtttctgatataaccgattatgatgcctgtggcagagaaagctgacaatactcaaaaaactaaatatattttaaccttggaccaatatttgagagctcagaatctctctaaagtatgtatttacttcctagtttctgatggaaatgacatggctatcaattttaagaaacagtttatattcctaacttatgtttttaacttctaaaaaggcaaaaaaaattctttctgcttcatttccttttctcctgttgaaagatttgtggtccccaggatatttccttttcttgtgaccaaaacgctctttgaaaatagtagaaggcttttattgtggctcatgcctgtaatcccaacactttgggaggctgaggcaggcagatcacttgaggtcaggagttcaagaccagcctgacaaacatggtgaaatcccgtctctactagaaatataaaaaatcagctgggcatggtaatgcacacctataatcccagctactcgggaggctgaggcatgagaattgcttgaaccccaaaggcagagaggttgtagtgacccaaaatcatgccactgcactccagcccgggtgacagagtgagactctgtctcaaaaatgataaaccggtagaagacttttattcttagctctctctagaaaatggttttttttgttgttgttttgttttgtttgtttgtttgagatggagtcttgctctgtcgcccaggctggagtgcagtggcaccatctcggctcactgcaagctccacctcccgggttcacacagttctcctgcctc

SEQ ID NO: 129363 - DNA, 6689 bp, Homo sapiens
cggtgactcagctttggtcaacaccattttctgtgtctctatataggctcaaggttgaaatccttataagagaaaacaggttttgtcactttaggctgcagctgccccttaaataggcagctgtggtcagaggaataagggcacagaacacagacattggcccctgagtacccttcccaaagaagaaggcttagagggcagtagccatctcatcccagcttctcttcccagggctgctctaatggtttcatatctgatctgttctagtcccttcattgagtctgtcttccctaccacccctagagttaccgccaatcactgtgattctcaaatgtggtccctacacaaacagcatcagcattaccctgaacttgttaaaaatgcaaattttcagattccatctcagagctactgaaccagaaactctagcaaatcctccaagttgatgctgctaacatttgagggtcacagacctactacataaagctgatcatattatcccccccatttttaaaacctaatggcttagctgagcacacactccaaagtcctcagtcatggcataagaggtcctttgtgatctctccccagtctgcttgttcagccaccccacccctgacccctcccaccccaacaccctttctgcatcctgttacagagaaatttgctgagccctttcctgaactgcacctggtgaacttctactcttcatcacttcctctggtgccttccctggctccctggcatgaaactgccctggtatacttttaagtatactggacgaacaagaatatgttgtttctcagcagtgtccttttaaagatctcccagaatttgccctgagtagggaattcagcctctgtagattatatggaacctgcatttgtagagactgttggctgtccagtagccagtcagattggggtgcttgtaagtaactgtttatattcaaattaatatactaatattcagaaactgtcctttctggtccatgtaataaataggacaccatttacatttggaagagaaaggttctctgttcattgtgagaagaacggtgaattatgagcaagagaggaaaaggttgcttttgaaagacacaggttcaccctttcacttggcagtaatcttatcctgacagcatttaatgtggagtaattgtagccagagaagaatcttagtaggctttaattaaaaacacaaggaatttttttctcttgtcttcttcctatctgcctctttttcttttttccctcttcgtttctgtgttctcccttttcctgcccctcttttttctcctcttcatcatcccttaacatttaaaatgtttttggcttggctaatccctatggatggaaacttagctgcgcaggatattgattaccaaatatggtattgctgctaaagatgttagaggaatgtggcttgtattctaagcctccggcctctgaataagctgccaaacaaattaggtcattttaacttctgagctttttttttttttttttaaataaggatgctggaactttgatttggaacatgatgttgatgttattttagttcaaattggggggcgggtatgaagaagggggcagggagtaggggagacttagttcagcatgttttaggactcaagccgccagcccaggttgtgtaagaggcaaacacatgatgtggagcttcagttgattctggaacaccagtgaaagagctgaggcatagaattcacatgtgcagcctcattttctgaggctagatgctctagaccacaactaggtcccaggatactcttcacatcatccccagtggcctgggccacaggactcaggttaatgtgaactcaggtttaggaaagttgcttcttcacaggaaggttggtcaagtttagtgccggggaggacgtcctgaagttgatggcaagttgctactatgtgtgtctgatggagtgtggtgcaaatgaggaagtccttttacagcatacctgtacgtaacacccagggactgtgcttgcctcccagcagagaccacagttcttaggtccattcttggaaatattaattctgttgtaatattagctttgttagggtggaagttggtccacctcagtgaggtcctttgtgacctcaccccagcctgcttcagaatgcagctttgctttttgtttttgtttttccttatatactttttcttcaaaataatactgaggtttcccaaatttaaaaaacaaaaatacaacacaatatcagttaaagaaaatgttcttatgtttcacagaacaggcactatctgttcgctttttggtgttgattaggtatgcacaagggtattctccacatcccttttgctactgccctcagttggtttcttctcagaatgagtgagtcatgctcatgaagttccacccactccaagacttctgggtcagggctctgtggcttttgttaggcctccctaaggacctctctttccttccccttccccccttgtttcctgttaatgccattaccatccagccacaggctcttccttgtatacttgaagctgagcctgtgaagttcagagttgttcatcctggtctctagagtaagagagtcttgtttttgtggatatttctttttttgagacagagtctagctctgtcacccaggctggagtgcaatggcgcgatcttggctcactgtaccctctgcctcatgggctcaagcaattctgtctcagcattccaagtaactaactgggattacaggtgcatgccgccacgcccagctaatttttttttttttgtattttagtagagatggggtttcaccatgttgcccaggctggtgttgaactcccgagctcaggcaatccactcgcctcggcctcccaaagtgctaggatgacaggcatgagccacaacgccctgcctgctcttattttttttcaagctcattaggaagaatggtggcgagggggcgggggatgctttggagccctcaggcccatgtgtgtacattcagaacactaaatggcaactgtgttcttaggagactcgttttcaggactccagtccctttccagaccacaccatgaaaacatgggaactgagtgggtcccatgggtgcacatttaaaatacactctcttgggatatctttttgacacgtagggtccagaattcatggtattggatgcttaataatgaagacattcttgaatggtggaaaggttccaaatagacttgtcttgcgctagtgtctttcatagtgtctgtgatttgttttactgaatataatctattttaggtaaactgcaggaatagggtcagaggtaactgaaattactatatattaaagtgtgtaactgtgctaggaatttgctggttcaaattttaaactgaaaagtttttgtctaaaaagaaaaggaatagttgaaaatctgtgtaactacattttttaactaaactaaatcccactgactttcgggacactttgtgttgtcatttttcatgtaacctgtgtaagtagtaagaatgagagtggttgctgaccttttttcctgatagaccagggtttactggtgtgtttattttgtcaccattccggtttgactcaaaggaaatgaaaacatcttccatttgttctctgtttccaaagggcatccgcttcgatcctgaaattccgcaaacactacgactagagtttgctaaggcaaacacgaagatggccaagaacaaactcgtagggactccaaaccccagtactcctctgcccaacactgtacctcagttcattgccagagagccatgtaagtcgatctacttttcattcaaaagtaataataactaagaactgttcatgtgctgcatgtgaggttacaccatgggacatggagctggctgagtcttattttccatttctgtgaagaggttgcctaggcgttcttggtgtcagaattccaaatacagcaatcttgtttgtgattggcttcccaaaagatggttcagcttgaatagaaccataacttcagaatatcatttgatgtactacagatttccttaatgttatattgaccatcatgagtatgcccctagttgccttgggtataaacccttcattcccccctgctcggacacgagagctggttctcagcatttactttaatccatttgttgaaggacatcagctcggtggctttggaaaaataggatattaaaagagaaagaagcagatcttgggaatttggttctattcagtttagccataactctagggggaaaagtaaacacatacaaagaatgtatatattggaactgtcagtctagcaaactaataccagtaaaactttaaggaaatttggggctttcttttccaacttaattggataaggacactggctaattgctcaagacgtcttctaccccacattaataagcttatttcattatatgtccagactaccatttctgcctttccctgaataactttaaaagattgaatttgctttctcaagctcagtcagtggcagaagtggggcatgagacaggccttaacttctcctttcattgcagagccatatgtgatttaatatggcagggcattcaaggaaacccaagtgacttggattccaagttatttggaatatttctgtcctgttgtttttggtctgctttctaaaccacacggttgtgatcttcttccttcgatagtacattttaactcttcttattgaaattgaaggacacatggattccttgctccccccatgtcatgtgcatgtcagatttaatcaggttatctttggaagtcacagccattctgtagttcagtcactcttggtactcatcagtagaaactaacagataagtctccctgaatgttctaaaataaatgtttctatgaatccagaaagtcataatagattaaaaaaaattattttgttctttcaccttctttgtcccagggaaactagaaacctttgcttatttgggaaggaaatctaaacaaaagttacatcttacagtgtacttgtagtacaggaggatataggaacatcttttacataattcttcatccttatagtatctagcttaatactttgtatattgtatatatttaatatttattatagtgagtggataaattgatactgaaattgggctacttgtagaactgtagatgcatttgtatgcctcttctctctgaaatttcttctctcttgatcaaggcatcaaaaaagagtatttttaggatgcctgatttagtaaaaataacctaaagtaattctttgcctttttagtgaatttgccagcctcagatctcagagttctttgaaaagattaattcaggcaggaaatgtaatgctggtgatacttaactttaccttttcaattctttgctgaatgctctttttaacaggaccacgaaactttttctgaatttcctacaacagccctgtgaaataggtagccaggaaggttgtagccagattacgacatgctatacaaaagcaacaaataggaacaaactggacattcacaagtccctgaagttacaggagagcatagaaactgagcttagaactcttttctggcaagctctgctcacctcccttcccagcatacagaacagtgcaaaaatggccagatagtttccatgacagggtaaaaacttgcccagctgttcacagcaacacaaatttgaagtttaaaaaaaaaaaaaaaaaaaaaatccaagcagccagcagtgtattcttgaggaaaataaaagtcagcatgatttatcttaatatagctcatttttacgacacagcatcttgaggagagcaagtccactatggctcaggtcaaccttattatccattgccattccctctgggaactgggaacttgaccgtcacatacaacttgcttacctggaagcatacggcaagactaagaacactgtgttgggtctacacggacaaacccacttgcattgtactcagaattggtactcaaggtggtcagtttaactacttatcaggtgtagaatataatggaattggagaatttgaggattggaaaggccctgaaggctagtctttgttgtaggccatagaggttttttataaatgtttcttttggttactgtttttatatggtagtggctgaaaagcactcgttgccatcactaaaggaagaatgttctgtggtttgattatacaacacacatacacttgaactctcaattctccataaatatatgaacttaatgaacttaaacgagcacccaatgtgctagaccctggagaagaaggaaattggttgctgccttaaaagagctgtcgttccggggaggtgatggtggtcaaagttgtcagaaaaacttggccccatatgaaggacatataagagattctgcagcttagttgagattgaccccgaatcagactgccgtatttgctgagcacctgctctatttgtgccagggatggagagtgagaaaaccaggtgttgcaacttagctgggtagatggtggcctgctgtggagaactttggcttcaggctagaagatgtcactgagaatcctgtcgataattctgccaattattgacaagctttgtgacctttaagagaaaaaaatttttttcacttggttgtgctcctattctctcagctgtaaaataggaataatactttctgattgttaggagaggtaaataaaaca

SEQ ID NO: 129364 - DNA, 1821 bp, Homo sapiens
tttacaattgaattggtcagtccatatattgcattagttatgtcttttaagtgccttttaatctagagcactttctctcaccctacgtgggaggatctctctcttttttttttttttttttttttttttttttttttttttttttggagacggagtctcactgtgttgcccaggctggagtgcagtggtgcgatctcggctcactgcaagctccgccttccaggttcatgccattctcctgcctcagcctcctgagtaactgggactataggcgcccaccactgcgcccggctaatatttttatttttattttttgtatttttagtagagatggagtttaatagagagactattgtctcgatctcctgacctcgtgatctgcccacctcggcctcccaaagtgctgggattacaggcgtgagccaccgcgcctggccggatctctcttttttatgccattggattattgaaaaaagtgccagccttcctgggaaaagattctcctgggtttgtctgttttcttcttttaggtgtccttttgcttgttcttgtgtcccctctatttactgtaaatataaaagcttgatgagatttgcaaggtttggttaaattcagccttgccatttctgggtatgaatacatcataggccatactgtgtactttatatgacatccctttataaaataagtaatttgggggctattccatgcttggtgtaaactaagaggggtttgtggattcaagcctacattgtaaggtccctatcaccttcattttaacgacttcatgtattgatcttttcctcattacttcattagtgactgaaaaatgttgatttttctaattggttgtttaccctgaaatacaggtcatccaaaaaagcaggacaaatgcttaattcttttcctttcagtgcaaattttccgcctaagacattggtgcctggtaatctccattggtgatcactgttttgtggggggttgtttgttgcatcgttgttgttattgtttcccctttccctacttttgagtatcatcgtgaactcgtgttttttagtatattttcaggggtttcagtataccgcagtcattattctttctgatgctcaggggcagggaagggacagtatctttttgatagaaggaaacaccaggactgcctcagtggaccttgttttggaatgtccatcatttgtaggaatgatggagtctcacttcctaatggttcagaaccattagaggtgcttccctaggtgcccaatacgacctatcactgttagagtataatgcatttctttggctatttatctggttaaagcaactcctttatccacagaaaaggaggttgaggtaggaagatccctggagcctaggagttctagtctagcctgggcaacatagtgagatgaacatccacagaaaaacccacttttacagctttgtgagaataaaatttttagaaaggaaatagattttttttttttaattactaagattctttgattaggaactacagtagaacactgggattactagtggctatacgttgttattttcttcccaattgtaaggctttgtcagcagaacatgaaattaagctaaaagtggaaaggtgggacatgtaatagccagaatgttcatcaacaagaaaagaaatttatcttgtaaaaagtgtgtctttgcacgtaagataaacataaaacagactgagcactgatattgactagatgctttaaaataagcagaaggggcagaaagttaaatatttagattagttcaaaatgttagctttatagtagtgtgccattgatggagcattcc

SEQ ID NO: 129365 - DNA, 1280 bp, Homo sapiens
gcagtttctgcaaggaattgtgttacttactcctttcagtgaatcagtaatgacgttttaggtcaggagattggaagctgcttgcgggggaacgtaggtaggtgactctagtacagagaaaggcatttgatgtggcacagccctaggccaggtaggtggcgggtgtcaggacccatgctgtagagctctctgcaggttgcagctcctccagctggccttcctagccctgaccaattactctgaggcttcccagccctaagctgcttctcttgaattctcctctgaatagttatacagtgtgtgaaagaattccttgccactcatgagaaatgtattgatttatttgaaaatatttgatgcacttaaatcccagattagtagcagttatggtaacagatgtccttttgatgaaaagccatttctgatagatgggggatccccatagtgaaatgagaagagcttcacttcctactttgtagagtccaactctttagcacggtgtgcaggcccttcatgatctgcgccccaactccttatccccagattcccagccataaggtctccttcaaagccatgctccaacaatactcagctctgggagtccaaacagagtccatcatgtattcgctttgccttcaggctttttgcttagagagcccaatttctggccataaatttaatccctttacaaattagctgcttgtccttcagaagtcaccttaaccatctctttcttcataaagcttgcctggctctccaaatgtaggttaattgctctaccgtgttggttactgctgtagagctgtgtttattcaggctgcggcattgatactgactacatttatgtaggaccattggtggaaggcaagttccccaaagtgaaaacaatccactgagataaattttctaaccgcaattttattttactgaaggctgggaagccctcaggttgcttcttgaagcacacacagcctggagaaaagcaattctgaacgtatgtggctaccccttgatttagatgaattacattccagtcaaaaggaagaacagatttgaaaatttaatggcaagactgacttcattcaggaaatcataactaattttaccaagctaggggtgagttgatggtgtgcaataaatttgggaagaaggaagaaggaaatgggaatgctagattacagttaatagttttctttaattcaaaaggtattgggaggtattgcagatctggaagaaggagaattacattatcagaaagaactcagcaacagattttaaag

SEQ ID NO: 129366 - DNA, 1433 bp, Homo sapiens
accttcattctaaaatgttctgaagctttagggagggaagaaaccccagaaactccttggttcctgtgttggattacccaccaaagatctgaagtcatgccagagccaaccagccttctgctgaccctcatgcccagatttccttgattttgcatcattgcaactgaaaaaagatttcagactgacaggcaaccttttagtgttggaaggtaatctgttcatcccagaccagtgatcctcatgagatagaattacttactattccccagaaagaagcagctcagttagtctaaactcttgcagttttcttttggtatttcagtgcttctaactaggttaggataccctgttctcatatatgaactctgcaagaatgagtacaattttcaggaatgagagggcaggaggggggagttatttacattagcatttgccaagttttcactgtttatcttaccggaaagtcaacagtgtgactattaacctcctgcataattaaaatttgggccttgttatggttgttcttaaacttgtggttaaatctttgtgatttttagaaggcaaagagatggagagtaaaaggaagataaaatatggctattcaggggactgaggtacatggacacctggagctgcttgttgtaaattggcaggttcattgcagccggtggaatgaatgataagggaattgtgtaggtcagagtctcccaaggtacttagccagttttgtttaataaagttaagtagatttttttgagcagatcacatttccctggtgaagctggagggctgtgagatttcttttaaagaaagtcttctgctcttaaatgaagagcattgttcttattttaaaaataagtacatgaacaccaatataattaacaaagctctatcttctagtgatcattaatttaatcttagtacaaaagagctgaacaatatgtctgaggcacgaagaatgaggaagaaacagttaaacatgagaagtggctgagggcatacattccaaagcaccactccctgccacctccctctggtaggtaatgaccccagatcatctgatgaatcaagggattgtttttgtactgaggatggatttcctatagcagagacaacattatttatacccccagattgtattccttaccttttttcctatattaatgtcagttactaatgttactgttgtttgacactgtgcagtaactatatgcatgtcaaattcgcattcagtttttataatgaactaggtgttagtttttatttttatctgttgcatcggaggctggcagagattaggtaagttatccaatgttgcacagctggtaacatttacaactaaaggacttaaaggggagaaacaccggtttgactttcaggtgaagcttattgagtcacctttcaccaccatacgcatacattctggaattacc

SEQ ID NO: 129367 - DNA, 1033 bp, Homo sapiens
tccaaatagatgttttcaggaggcaaaaaagttcttaaaccttgtgttaccaactaaactcagagatacatggccatacttaagtccattaaagattctccttgttcttccatctctcagttgtttctaagagtcattcatgtttatctctctttcaatgtgaccgtagactgtaagcttcacctttctgcatctgtttcctcatctaaaacgaaaaggcagaagatgatcttcccaagctctgtaggcttaaaccttcatcagacgctctgcagttctttcgtttcaaagggattacagggtggagttggaagtttccagtccttgtttttcagaatccaatttgagctcttctggttgcatattctcatgctaagaaaaaaagcctattcagatgtatattgtgagccctcaacaacattatcctcagaaggtgcaaaaaagaaaagatgtagccagattggtgcaatgggaaaggatttgccctgcctctcaggagggatggattaggcccagacaaaaaagccctggcctcttgatctgccctctttctgcttactggggcctggctcactctgggtggtcaagagcctcttttgtcaagaggaatctcaccccctccctaaactccaattcatcccagtgggccttgggcagcaatctttgtcttcttttttcagccttccatcctgtaaagtttgagcaggatgggcagtgactcaggaaggtgaaacccatcagggccttgcctgctccttcagtggggagtccttgtgaagggcttgtgctgtggaaaaccagtctctctagcttttgtaattttctcaagcaacgaaaaagcaaacaaacgcaaaaagcttattctgctttaatacccatttccgtcaaaggagtgtatgtgtgtgttaggagagtgctcaggctcatactggaaagttaggtgttggtgaggactgcttcaggtgcgatcctgacctggtcagaccacgtatcttttgatgtttatggtaattccacattccttcatgatggg

SEQ ID NO: 129368 - DNA, 1025 bp, Homo sapiens
gcagtctgtctttctatcaccaagtcctgaggaggtagtttttactgccttgttgagaggagaagggagtcaggaaggccaaccagcaacagtatgttaaaccacattgttggggtcccatcatatctgaaaatgggtacaaactgccctctgaacgtatcatcagcagtcagctcctgactccctaccatcctgagagaagctcgtgccatgcaagctggctgtggggaagcctcacacaggttctgctactttctggtttcgccatagagcagtcccacatcacaccgagcaaagcagttttctgttgctagccccctttctgtattgaagagtttcgggggatgggaaggatgcagagacactgggcctggaatggctccttagatggtaggaaggaataaagtgactctgttgaccttgcactgtagactcagggaaagtactgaatggcagagttactaatgacttctatcaaatcaccttttgctgactcccgtgttagtcctggatagcgtccttggcacacttgatttcagattttgacaggtgataaaagcacatattgagattgctgcttcacagggcccagattccttgctattgactgatgttatttttgcctttcctgagaagctccctcatgtgtttgctgttacttttaatggattgcttcctgatacatgggaggcccaggcacttgcccttcaatctggccaactgcagcctgacctgggtggaattggagctgcctgaggaacacttagaccaggcacttggcaatatgactcacttttttcccctaaaagttagtctgtaaagagcaactggaaatgttcctgtttacatctttgtggagtgtaattttaatcaggattctcaaggtttttcacttcaattctctgaatttttaagatcttaaatgccctgtggtcacagtatttggccctgtacttctgagggctacgtggaaaatgcttgatgatcattactgacttgtcaatagtaattatgccaataaacag

SEQ ID NO: 129369 - DNA, 2055 bp, Homo sapiens
tgagatctcagcaggccagacaggcagcagatgcttgttgcttttcttgtgttatatttttcgttcccttacttagcatttgtgggaccaaagccaacaaacaacaggttgttaaaagaatgagagtaatttgacttccgacagtgattggggctcggggttgttgggtgttttgttttctgatttgaaactagctgtatggtaaccactaactctcgccttattcttttcttgcagatgagctcacagtgcctgcactttaccccagtagccctgaagtgtgggccccgtaccctctgtacccagcggagttagcgcctgctctacctcctcctgctttcacctatcccgcttcactgcatgcccaggtaattgatacccatcggccaggacttcactcacttcaccaccagtcctttcaaacttggttcccgagagcacaccatacaactaacacctatccagctaacagatccaccctcaagagattaatgatcccctctaaatcaagctgacactccttcaggactgacgaggatcgtctgacagcaatgatatcacccactgcctgatgtttgccccaaatgacacctctctcttccttaatgatctcacctcatatcgcacatgagagaccggggcaggtttatccacctggctcccagctagctagagggcatcaccagagtgtatacgtgtgtgccttgtgtggaagggctgcagaggaaggtgtgtgctaggagaaggggatatgtgcgtctgtgcgtgtttctgtgtgttgagagttttccactctcgtgtacggtgagaagaatctctgaccaaagggaaagcttccaggggggaaggctgtactttcttaaatatgttacaggaaagattaagggttccttctctccattttcaggaaaccctgtagaaaaggagatacaagatagtgtctaagatggaattacaggtcaaggtagagatctctattctgaccagctttctttcttagttaaaaatagcctgatttttataaacaaacttcctgtttctccgcaaagattactgtctacatactaacacttcctctccccttggagaaaatatttctcttagcttcgcttttagtgcaagtggtagtaatcagtgtaaagattcacctctggagatcaccactcattctttggcctgcaaagattgatgaccagtaacaaatagaaagtacgtacgtaggtttcatttgtctttctgcatgtgtaattcagcctttaaattttaaatttttaaaaattattaggctggacaggcagagttttcgtttgcctgttttgctcagtgtttgtttacaaggctgggtgaaataaacagcttcccagaaaacctccttctgacttaaaactcttttatgttgtacagaattccctgtcttgataaagaccacctagaagcagcccccagcgagggttcttgaaagtcatggggtcgagattgttgttggctgaacatcttttaattctgagttaccaacacgttgtgcgtgcattgatgacccggcttcctggcctgcccttggtgcctgagccccagtaatgattgccctctatgttgggagaagaagggagaaagtagtacaagtagtgaagaaaaaaatgtaggtggtgttggtggttgagagtacatggcacagaaaataaaggagccaggattacctgtgcctttggcttctccttcccctgctgctttttcttcctttttccatgtcagtgcttgggaaccctcacaactggcaggtaacggggtcgggataaaatgtaaacctgtgggtgtcttctgctgagtcattaggatctttgtagcaggctgcggataaatatgtggatgacatggggcaactaagagccccttttgcttgccacctcccacccctgctctggatggtgtctcctcttgctagactgccgggtacagatcacgtggcaattaaggcaaatgttaataaataccatgaaacagtggtttgcatagtcttctgaatagccatggctttggttagtcagcaacaaagcc

SEQ ID NO: 129370 - DNA, 2800 bp, Homo sapiens
ctaaagagtctcaagagattagaaagcatatgccattgtaaggaaggatggggagagacagtgccaagattaaatggactcagccatttgacttaatgggatgcactgcccatggtggcaccctcccctgggagttcttccttgatcttgagactttcccaaactggaatccacttagctctgccacatcggtcccagatttggtgggactctcctctggtatcagttttcaacgccacttcttgtttggagtcattcccagtgcagtcatggactctatgaacaaatacggttatttaaatgtatttgtccagtatgagaatcagaatgaactagtagaggctttacagatcagctggtctgacccattttacagatgaggaaacaggcctgagaagatggagggagttacccacaatctgaaggggctctaccatgactagacccaggtcacctgcctcccaggcctggctctttccactccgaggtgctggctcaccacagacttattctttaatggaattttggaaaggcctcactccagtgactctttggatctttcttctctaagtagatgggaagcctgtaagaagagacttggaggcaaagcaaagggaatcagcacttaaccctcacccaaagggcccaagagaatctttagtaactggaggcagagcagactggagcctctacggggcatctccccatattggagaattcagtctttgttttggaaatcttataatgtctttggagaggctttaaataattttgtttttcttagcaatgttatgctctattttgagacatggattttttttttcttctagtgtttctctcctgaggcaaagcccaacacacctgtcttttgtccacttctccagcaaattagatttgtctctgggaatgtgtttgtaacataccaacctactgcagaccagcagagggagctcccatgttgaatttgtttgttagctattttcccccctttcacaaaaactatttcttgacgacctttgagagatttcaataaaaattttaatcagagcaaaaatgaactcaagtagactgcagcgttttgttttcatggtgatgcaattttggagcaaaggtgttactctctgactgaggttttgggagaattgggcctgtgacaccaagtctattttacatagaaggactcagaacgagcttcctggagaggccaggtcctggagccgaggccacactgctgctgcttgtctctccctgggctcccagaagagccaccaagagctgcatgttggaagcgtctcatccaccaggagacctcacttcagcagggatgctgcgtctagctaggggagcccctgtgaaacgtgtgggtgcagtgtgcagtctgcccaccgggatccacaggaaggaagaccaggagacaaagtgtcattgaaaagaagttgagtcacatttctagctctgccccggcttcagctgtggtctggtaccccttcagatttcccagctctaaagtaaggatacttatttgccatcagatcccgttttttagaaattattggataaggtaataggactgaaagcctcagtactgacttaatgtttagagatcaaagagcgaccctgtgcagcagacatcggattgctaagaagatcattaacatttttaaaagtgatcatccagtttactttcaaggtcattggtatttgaaatgtgttaattaggagaggaaactttcatctgttgctttcaaaaagcttatacactgaagagagcacacagctgttctgtcacctcacattcacacacttccgcctcttaggtttgagctcatgttctgctttcagtcttgttgtgatgggcagagagaaagtcgttaaagtatactgtccttaccacattctcgaaacacaccatacaccctgtacttcaggcagagtcacagtgtggggccagaagcttctgtaggtaagtaggactgagagagaaagtcctggttacctaattccttttcagaggcctcatttgtccagagtaacagcagttctatcggatttctaatagggctgctgtacagcttacctggacataaaccaaaggttttaaaattataacagactgcctgaggacaaggcatgcgtgtcccttgggatggctctgtgacacactggaaaaattttaaaggttaaacccaaaataaatacagaagtggaccatgggaagagagacataggctaaccaggaagggagctcacagaggagtagatgggcctgggagtagtgggtggactacctgaactgcagggctgtccccacctcccctgtatctgagcagttgctcatcagcagggtgggacttctgaaaactagatttaaaaaaaagcaaatcgtattaagcatctgcatcactatgccctgtaggaaataactgagaaaaaagacacaaggacttctgctttggtgtcgggtatgttttgaatacatagagtgttggggggtgtctcgagggcagtgctgggtatggacctcagtgcgcacacagctccttaggagtcgcccagcagcgagacagctgtggatcccctccaggcgcatgggaggctcacaaggcaaggactctgatggttttggcttccacctcctgtacggtggccagtgctgtgagggtggttggtcccacagggaaacctgtgaacagagtcatgtctggggccccagggacatggcttcaacccctcacctggcagtcctgcctcccaaaagtaaggcaggagtccggagattcccattgcttgcttctgtgaa

SEQ ID NO: 129371 - DNA, 1948 bp, Homo sapiens
ccaggcctctccatgttgggcagttttaggaggaaatgccgttcagaaaccagagtcggtcccctagtgtatggctgtgtggctttggccagggtcactcaccccaaggagacttccgtagaaatcacagtattattcaggattgccagaacatctcaacgtgggcctcctcctgactgggggcaccattactctccattactccattactctccatttggtacactgttttccaggtttctaagtgtgttccatgttgtcctttgcggaaggttaaactccccagatcctacgcgccttctcccctgtccttaatagtagtaagagcccaaccctgagtcccaacaagtcgcacctggaagtgccgtctgcgctcggctcttccctgggattaacaaccgcgtggcccaactgtcacagtcgggtgctgctgagcgcctggcacctaactgggactcagttttttaaatcaaacaaacctgattttaatgacagtttctacccactctgctaaatttgggatcctaggcaagttggtttttaactgcacggagcctcagtttcctcatctataaatgggaagaatgaacatctccatgggtttattttgcagaaaacagtaagatgtttggcttaaagtcatagttatgattaaaatagttcttccaatgccttccctttgtcaggattcgatctggtgtggcccagaggctcctgagccctccctgtaagcttgagaagcacttaggacacagggactcctgaccagcaccctgataagagaaacctaagggcctgggctttttgctttggtaaagaagagaaacaccagagccagggtgagaatggtccgtggctgtggcgtataccgagaggaggccgtctggttgggtcagctgggtgtgtacccaaggtttttttcttctgtaggcataggcacccagatgccgtccggaaagtatgtgaactctaactgctttggaaacaaaaccaaggccacagagaaactttggaattataaaatgtagccttcataaaaggggagagtgaacttttctgtgaagaaaaccaattgtgacagtaggggtaaaggaaaatcaactccaaatggaatcatgttttattcaggatttgtgctgccggtggggaaggccagacccagcgacaggatgggaaagtgggacaccccaacttcaagctttgtgcgttctgccacgaagttctatgcgcttcactgagctcagctcctggggacctctaatggcccttgatagcaaacatagttaaaaattaacagactgacagaattaaatatggatgacaagcaaccactgtggacttaatctgacacagggtgttacatgcttgggtgcttttaacccaagtggcatctcaagtgaacttctgagatgtctgggcacatttcacatgcctgtttggaagcagggcttagcttgtgcttaggacagacaggaaaagagtctaagagcccaggagagaaaattctccctggaggcttttgtttcattaaacccagctttgatcaggcttaccaggatgtactcacagtcctaggaccttgtccttgtggtctagaccttgtccctgcctgggctcggacctcagtagcacctgccatcgtgactggaagatccggcaagagcacaaggccagcggggagcatggcctcctccagctaggactttcttgctcacctcttttccagctgttggggcaggtgagatggcagccttaaccaaggaccaagtcatacaaatcttgacattctgcctagatcatagcgacttaattgccctaggcaaggactattaggtgccagacaggtagtgaagaatgctgatggcgttttcatgcctgagtctgctgagaaagagtataggctgccgattctggggggcagggagaagaggagtggttcctttacaag

SEQ ID NO: 129372 - DNA, 3689 bp, Homo sapiens
aggttcacgcaatcctcctgcctcagcctcctgagtagctgggactacaggcgcacaccaccacacccagctaattttttgtatttttagtagagatggggtttcaccataatagccaggatggtctctatctcttgacctcatgatccacccgcctcagcctcccgaagtgctgggattacaggcatgagccacggcgccctgcccaagctactgttattaactattttgttcaaagagggatagctgacttctgaatgtggtgcaggggaaacctgcattcaggtacagcatctgcactagggaaggtgagagaaaatctgtagctgctccatgtacatgagacatcagagcactagccggtttggtggtctgtcttccagctcgaagcatgcaaatggcacagcccagcctcttagatccaccaaatgctaccactggaagggaccttccagaccagcatttctcaacacccacagggattcacagctgttccataatccagagatcctgcagtcagataaacttgggcagcacaggtctagatcaagtcaaacaggtttctttattttggaacttcttggagccattactgtgcccacacatatcaagaaactgctgaagggaccaaattgtgcatttctctctaatgtccttgacattagagcatttctagaccagtgttcttccagccatacttttcgaaaccttaattaaaagcagcatctctcagacttgaccatgtgcctggtgatcacctggggggctggttacagtgtcgtttattggatgcctctcccagagttttggcatttctgacaagttcccaggtgatgccgttggtccaggaacctgagaaccactggtctaggcttaccccttcattccccagagaagaaaacagtccaaccagagagtatttgctttcagtagtgactattaattgagccagtcacctgctaagcacttttcgtgactctttctaagggcaagtatgatagtgggattcagcccctagaaaggggatagcgcaatgcaaatcattactgtagagttttaccctgtgccagtcactcaccactgcagaagggttggtacttcaggcagggcgtcctcccgagactagtcaaggtcttcctgtccttggcatcagtattaggaacataaattctgtctgtatttaatcctctgggccttcatttttcatctataaatggaagaggatggaaattatttttatgggtgggtaccgctttctctagcattccatttgatttttactctgagttgcttctttttctgggtatcttggtgctctcctgttgtccaatctgtcaccatgctgagtgctggagacttacagtgttagccatgcaggggcactgcattttcagagcattcctgaagaagagggatggtagaatcccaaacagtgtggccctgggtagtgaactgtaacatggtaataacttaccactattgttaagttctagtggagaagattcccagggtcgtccacgttgccttagatgtcacaggctgtgtgaagtgcttagcgcggtctctgacgcagactaaatgtcagggtcagtttggttaagtatattgtgttaaagtttctcacagggtcttgagaagcccctggaattgtgtgcaagactgtgagtgtgcacatttgagagagagaactatgggagaagagagagagggtgtgtgtttgtgtacacatacgttttctgcacatggcatgaagaaatgtgaggggccgctgccttgcatggaaggccagcccttgtcacattattctaatggggagccctaaactagcctgctgaactgtttggagaggaccttgacgcaggcagtctggagggaactgtaggtttccccgttaagaagaattgtaaagcagcccttatgggatgggcaggagtgacctggggccaaaagcccagcagaacaagcagcccgaatggggctaagagagaaccctctcctcattacccccacacagtgattagcgcggagcagcttgttcccccccaccgggccggctgcccgaactctgctgtgcaccatgagccctgccgctctgccggctgtggtgcgggaacctggatgagccgctcagacttggccaggggggcactgccctctgctggaagctgggcgcagcggagcctctcaggctggaagaggaggcagccgtgggtgtctgtggatgcggtgagaagagccccccacttggcaagcacatagtgtcctagcctgagacacaagagcaatgaattcaggggtctgtgtgtccgccacccgccaccacatccactctgaggagcagccacctattgcatcactggcgtcctcactcctcagctgagcacagcctcccctggaccccacagctcggaacccgccttcatgtcactctggagtgcgcctcgaccaggctgacgagagcctgaagacgggctgcacgctcgtccccaaccctgcaggcacctgtgcgagtgagaacgtgagggctgtgtgcgagagctggtcagagaggctggggcagggcttccttctcgcagtcacctgcaccgaaagcagaaccatgccatccactgtgcagctctcctccccgggcagccctccccctcctgtgtctcctgtgaaacaccgtcacgtcttggcctcgtcggggctcagcgccccaacccacacccaggccgcaccagtcacaccactgcgctccacactgacccagtgcacacagacccatcaccctctactgtgtgtttaggtgtccagccccccacctgccatgggggctctgtgtccccgccccgtcctttcccacctgtctcaggaaggcagctccaactctgctctttgcttagtgagcaagtggattcagatgcaccaggccatgagccgtgggtaggtatgagttctttcttctccccacctctgccctccctctcctcccctagactcttctgtccccttccctgcccgcccctacctcacccccatcttccccactcttgccctccttcttttgttctgaacacacttctaatttcccagaggagtgttttctagccttcctgcctgggaaaagtttctgacccttgtccctgtaattgcaatgagtgttgggagtgaccccagccctgccttaaatgagctttggtacctgctggtggccctgaggacagcaactttgcctttccctgatactggggaccctgctctagctggtcatctgatcgctggtcatatctggcatggtcgccagaagagacccaatgcacaggcagcctgacggagtcgtggtgcaggcagaagctccggtatgtcctaagcctgcgtttcctgactcaggccagcgaggaaagaaccgctcgtgaggaggcccatggggaggaggaggttcccaggccgccttgtgctcggaccagggacaaggtcggggtgctgtgtcggatttctctaggacccaatttctagacatccctgcttttagaatcaagttaggggatctcgtggggcctcatcctggattctgaccccactgggctctgtgaccaaggtcattgagaatccccagacttcagctggtgcccacacctgtaaaacaaggagatgaggcaggagctttccaccagtcccttcagagccctgcgttgtgcagtgctgcc

SEQ ID NO: 129373 - DNA, 1008 bp, Homo sapiens
ggtcatggggagaccatgccgcctccatgtgaaaggaagagcagtgggaggcgggcatctcttgcctgtgtccaaaaacatgtccagtgatggatgccgttaaagacaaacggcgcttgcccttttgggtgttttttgttttgtttcttgtttgttttgagattttcattcattgcccagaatggagtgcagtggcacaatctcagcttacagcaacctcccccctcctggttcaagcgattctcctgcctcagcctcccaagcagctgggattacaggcatgcatgcccacgcccagctaattttgtatttttagtagagatgaggtctctccatgttggtcaggctggtcttgaactcctgaccttaggtgatccgcccgccttgacctcccaaagtgctagcattacaggcgtgagccaccacacccatttttttttttcatgttttccttggcataggacctggaatatgctgccaggtgggcaaagtgttgctcaatgcacctgtgtttgcggctggccttccactttagaaagctaatggaagagacagggctgctggtcccagctgggaggctccttgctgaaggctgtaggcccatctcctcagtagggtgaacagagggcctggggtaccagacacacacagtgccaagaagctggaaccctttttttaaaagaacaggaatagaatcgcaaagtagtcctggccaggccactggtgtggatggggtcgtgaactgccccttccttaccaaagcagctatgtttccacactctgcttagaaagccattagatagcctttcaccagcctaggcctgggaaaaggaattcgctgtgccggatcttagcctcaaatggctgctaacctttaaaaggaggatgagagcagaggagttggtggaacctcgggcacttctcgaggtgggtgctttcctcagagagcttgcctgtgtgttcataatggtgtgtggaacgcctctcaggacaccgctctgatgcttt

SEQ ID NO: 129374 - DNA, 1051 bp, Homo sapiens
tccatttctacaaaataccaaatgccttctgtaattcagaaattctgaatttctgttaagtacaaggcactgttcttctaaactctaatttagtatgtgaatttggagagtctacttagagttaagtttttagaatgttttagttccaccatcagtcttctcttggtttacacagttccttcatgaaataggaagaaaaatgagaagagggaggggcctgatcctcatgctgttagaaatgctaaagagatcatggcaaacctgtgcacctgattttacaatagtgtcatgggcctttccttggagacttctattgtaagataaaaatacttccaaactaaactagtgttcttttctttttgtaccattaatactgagtccatatgcttttgttagatcatttgaagccatttagatagactcttctggagaggcattctgtggaaagaacaggcccctggtcaacttagattccacttaatggagaaatgtttcagacctctcacaagaaaaagacactagagctgaactcgcgcaggtcagtgcctgtcagtgaagaagaaagagagcattgaataagatttttaaagagtgctagggtttattgtgcacaggtaagttgccctgttgacctgaagtctcggttggtgggtcaggtcaccttcaagatctgggaggactgctgagtgtggacttcatgtttgaagttctcatcacgcaggaggccggcccttttggatgagctcaggtccgagtcagaagaccccttctgtgttcgcaaaggagaggtctcagcagacagtagagagatgagtaatgggcatgagagtgtcggaagcccacagacgattctcagagcagccagtcatagcccagcagccacctggccattcacagctctttctctgatggcagggataggaaagttgagagagagcgctctgtgctttaggacatcagcatcaggaagctaaaattgtatctactcttcctctaacccaatgtatttcatattttaactcaaatacttcatattcgagtgtggccaaat

SEQ ID NO: 129375 - DNA, 3909 bp, Homo sapiens
tcaaaaaggccaaatgaaaggcgcataccattcattggcagaggcccacatggctctctccgttcggcggggagggctttcttccccatcttgctttcccagcacggaaagaacagaagacgagcaggagtgatgccgtccttccaaatcctcaaaggccagcactcccagaggtccttcaaggatttttcatttatctacttggacttcttagtgctaaagagaaatcagtgactagactagatatgtaaataagaactttattctctagacaaacatttgttgtgtctgctgtgtccaagatacaaaaatgaaaaaacaggcctgtgcccctcaggagcttaagttctaatggcagagaactgtggacacatgtacaggagagggagttactgctcatgatcctgcaagaccagcttgctgtgaggagagccaagctgagggcatgtacaggccatgtgcatgctgttcctgtggcataagcaaggccatcaggagagggggggtcagaaggggacagggtgttactggtgttttaatttgctccgcctcttgctgatggatggtgttgagtttagtgatgcagacacagcctgtggccagagttttgctgatggttcagccatgtgctagagagcccagaatacagaatcacgattgaaaattgtcagtttcccagatacactgagaacaggcgagcatgagcaacgctgctgtcactccttacatgcagtgagagtgaggcagctttctttgatggatattcaaagagttgaactgttcttgaaagggaagaaccagcgtttgggagccaagtggggtgtagggggacgtcttctttcaggactcttgaaattttcctggccatggaccgggaccagagcccagaaattataagcacatgtagttacagcctccccagattggagaaggaaatgcaagagagaacgtgacggaatttggagctatttttcccttctcttctgttttgggtggaatggccttgcctgtctttggctgtgagcttgagtcatcctcagtagagtcccaggtgctggtgcccaggtggagcttagagcttaacaaggaggaaaggcactggggctccagaggcccagacagctgcggtggctcctgctgtcacgctggcctccccttagaagaaagccacctgtccatgtcatgctatcacactgcggtgcacccaccaaccagtatgaggctgtgaggtctgcacatcacacctaaggctactaacgccgtaactgtccgtcatacctaaggctaatacggtgagcagctgcagcgtcctggggaggagatgggtaataggtaatcaaatagacataatagtttgggtggtgatagtattcagggaataaataataaggccaggtaagcagctcagtgttgtggtacggccagcacttctggtgccttctgcttcaagttagcaaagcaggcagggtccgcctgagaaggtaacatctcagcaaagacctagaacttcaccagctttatacggggtttctttttcagaacacattccactttagtgaggcttggaaaatatttaactcctgtaatcttaaagtaaatggactggaagtgcagcaggcttggctcccacgcagcactaaggaatcactgggagagtgtgcagggccctcctcagagacctttctctgttttcccagtgaggagacgcaagcctggttctgcaattctttccagctctggagtctgttatggttcccatctgagctctaaaggtaggggtgggcctgaagaccctccacactgtcagtcctgtggacgtggtgggtgcccctctagccaccactgtcctccggactgtgccacatcacaagcacttaccgagctcctctacaaaccacgtgacaaccaaatgcagtgaaaactgcagccccccaacctgctcctgcccattgtgttttctgtggatctgtctggagtccttggagactcctgagcatgtgcactggcagagctgcctgactcttccctggaagaagttcaaagagggtagccacgtgttcagaccaggccatggggtctgggggctccgcgactcctgagagcaattcctggccggactctggctcatgttactgcccccacctccccccgcccaggtaaacccgggggtgcagacaactgttgttgaggtcccaggagcgggttgtcccctatgctcctggggacatggaggagagggagggtcccaggatcccagtacttgtatgagtcgcactgattagctgaagcccagaggcttcttaatcatcctagaaatacagcctcccgggaaatgtggcctggctctgcagctctgggtggctcgtgctctccctcctgtgtggaggggtcctggagaggttgggtgagctgattgataggtttcatgtgcaaagatgattattttcctgttctcaagtaacccaacttttgctaggaaactagaatcatctaatgttgcatagtgaagttctggggaaaatgttttcttccttaaatctgaggagagagatgtcctaggaaggtagtcttcaggctcactcttgattccagagctgggtttcagcacacgcagtcccctctccctgaagagtcctggtgggaccactcggaggtgccagctgagccagtgccacctttctggggaacccggacagtccgcagcagtatgttatgcactccagttctcataagcctcgcatactggacacggcctgtctgcagggagggagatctgagaaatgttagtgggaaataggaccgctggtgtccacatgcagggagttgggcttccttccctggcactggaatccttgctgtaaccagccggctcagaggcagccgtgcctgcagggggagtattagaaactgattctttgctaggtctttgcaccttcgtatttcaaaattctcagaccctagggtacaagtagccagatatcttcacaaatgtgcatccttttagtttttgttttccaggagatgcttggagcaaagtttagtccttggtgcctgtgacagacagggatttcctatggccttgggctgaccaaagctgctcagctcctggaggtggctgtttctggatcttgctgtgtgggggcctcaggtcccatgcctttcctctgcagggcctttggacagtcctccgggtctaggccacagcccttgggatgcaaccacagggacgtgggtgtagagtcctgcttgctgggcctgcagcctcctaatgcgccctcagcgaagagttcacatgcttttcttggaatgtccttcctcgctggcccccagaagcctcctcttacttgctccgccaagtcctcagtgcgttttcctggctgagagcttttcatgtcgcatatccaaggccattctgcagcagcctctggtcctcagctcagcagcagaggcctttgatctctttcggcgttgcctctcttggctctctgccctcagaacaggccggtcttcaagaccgaggcagccccaggtggaggttactgtgcaccgttaacgggtgatctttctccatcccaggtcccaggtgtgtgatggcggctgcaatctgtcttgtgggtattaatgcaatcttcagtggtggctactgttctctagctgttctacaaaactggagcatgctggtgagtaacagtcagggctgaacaagccctcaggggcggcatggcgaacacgtgggaactgtgggcctctgggggtggggtctggcattccaggtgctcgtgcccctccaccccaggtgattctgcccggagctctttaacatctgctccaacacggcctgccagggaaggtcatcccaggacagcaactgatacatttttaaagcccatcaccccagtatttggtgct

SEQ ID NO: 129376 - DNA, 1749 bp, Homo sapiens
ctcactcaaacttttttaaaagacatgattttgttcttcctcctggggatatttaaaaaccagttaagccacttgcacatttttttccacttatgcaatttttgaatgctggttagacatgattttaaatgcagcaagtcaaccaaagtatcaacaatgcaaggagcaggagttttcctggtaggccacggaagggcctagtggcaggagacagaaaagaggggacaggtttgggtcacggtcctgggggcagctgaggatcaggttgcaaatgccccagatgtgcctgagagagcggcagcagccagcatggaggggagcagtggcgttctcagcaccagtgtgttaaggtggggctcacaatttcttggggccttccctgggttacagcagcgagtttggagggggcttttctcttcccaaatctgaggtcagacaacagtgcttatgtgacctacccttggagggcagagatgggccattctccatgggcccccagggctggaatggagttccaaactgcagaagaccatgcccctagaggctccagagaccgtgaactttttcaatgacacgtttgaaaatctattacaaattaatatcagtacctgattttttgaagatgaagctgacaggtattaaatgaaaacggaagcactcttaattaggaacctttgccacatgatggcccatgtttatttggagttggggggagaacattccttatctgacttggtaaccaggaagccttagaaactcttggggaaggaatcctcaggaattaggtcaaggagctgcagatggatcaagggaggctttcctctgggagaaaaatctcccaaggcatcggaccgagaccctgactgggtacgaagagaccgcagagtgaggggcaggcagcgggcatcctgaccccaggcccatctgtccccacgttctgagttccaccaaagacccaaaatgcagtgttttagaattgtgtaatattccttaagagaccaagagacatcctccagtgtcttcaaactgggactgttcccacttacctgagataaggagatttgttccctgtcttgacgtcccatcacctgtatgtcatagtcggccccttccaggaaggccccgcgaggagaacctgctcctaatcagagccttatgcgttcccaaccctgaccccgccatccatccctccgtggggctgtgttcccagatgtctttggattctgtttaaaatgtccttgttaagacattccaaggtttgaactccgctcctagctaaacctcctccttgtttacagggactgaaatagccacattttgaccttctgttcagtctgggatcatctgtggtagtgtgactacattcctttcccatgcaaggatcccatttacatggcagttatggaaggcccagaaaaccagacttgctcccgccctcctcctgcctatgttccttctcccttcagattagccctcctaggcagccattccgcctgctcaggggctggggcattgggaagctgcgtggttcattacccaggaaagctggagccaccatatccccctcatcagggctgcagctacccatggaggctcagggtgcccctgggctggtgtacagaacccaaagttggtcccctggcctgctcccaggccagacaccatcaaccccaggggcccatgtctcagtgccacatgccataaatgacccaccactcctgttttgtgtgtcctacagtctaagtgtct

SEQ ID NO: 129377 - DNA, 1885 bp, Homo sapiens
cacaaataagcatctccctgtacaaaattctagtgtatgctgagctgattgattgccttctgcatacaccttttctacaacttctcaaacgtgtgtgacatgctggtaagatggcaggaaaaggagtgactgaataatacaatatagctgagatgtgtttcaagaaaacctctgggccagggtaggggtttgtgagcgggagccaaggacttgccccatgtttctaatcaaggtgagaccactgacacatgtggtcagcaaatatgttctatacacacatccgcacactgtcatctaacccatccgttctcccatccacagcatctccaggacaaagccatcgcaactagggaggggttgacacctgctctcctaacatgttttctttctgtttcaggcttgaaaaacccttgcccagttttgatcccttcaagactttgtcacagcctctatcacacatctgtttttctcgaagaaaaaaatataattaataaaaatgttttactcttttacactgtataattgtaagaaatagcgtattatttgtgaatgcatggtctgaaatttctgtacagtttggagatattttcaaacgaaacgtaagagaagtcaacaataaaaccaagaaaagtgagtatttttataccaaacattttaagtatgctgggatggacgatcttacactggtttggatcacagtttttgttcttgacttttgaatgcttgtaattaaaaatatctatttttttcctctgaagtaagttgcatgtttgaggcatgtttccaaatattatcaaaatatcctgaattgtattgtgaatatatagaaatctgtgcctggccggagtccagggtaaattagtagcatggtgttagatgttagaaacagaactgttatttgcagtgttaggtctaggatcccagttctagtaggacagccctgcaagacaatcaaccagaagcctccaggagcttctacctatggcttattcacaactgggcaagaaaacatcattggtaagaactgctgagtgtgcccttagaaagccctagtagctccagctgtgactatatcaactgtgtgccaagtgtgactttgtacagttttatgtttccactctcctgtatgtgtagccactcgatgcctaacctaccttccacaagccagccccgcatccctgctcccgcagtgtaagtgcagagcctgcctcactggtaagggaaaaccttggcttgggaggccagccctggcccttgaaggggttggctgtgcccagcccacctggctgcagtgggcagctcatgtctgtatctccaaagtgatgtttgtttgcaaaacaccggctgaactgagctggtgttgccaactcttggcagcactgggccaaaccgaccacataccatgagctcccaaatggcgtgtgctcactgtgagacgtcctgccacaccccacaggagacggaggcagtgggcatttggaaccaattctattcagacttcgtcaaagccaaagtcagtctggtgttgtcagttgacacatctccagagttcatgacagctcaacctctccccttgtacagaagccatttttgtaaaaccacactgacctaaattcagctgccaaacacagtctttcctattgatccgctcggcttatgttgaaaatttcaatgtcatgattacctggttggtttgggtttttgttttgttattttccattagaaatataaagatgtcaagaagcttttaaaggtcaacacaaaaaaccaaggccaggagtgaggggctctttcttaccgtaaataaggggaaaaggcagttagctcaaggacttgtgacggatccactttggtgttcaaggacctgcttatgccctcagtgcca

SEQ ID NO: 129378 - DNA, 1126 bp, Homo sapiens
gtctgtcaagatgacataaagaagtaaggttttttttaagggacggggtctccagactggagtgcagtggcagattcacagctcacttgcagcctcgaactcctggactcaagccatcctcctgcctcagcctcctgagtagctgggactataggcgcgtgccaccatgtccaaattcaactagttgtttctgagcgctttgggcaagacatgatctgtgctaagaatatggacaggttcccaaaagcactctcacccacccagatggaaggttctggcacacagttgctctcctctccaactcttaaaccattctctccacaccctcatggcataaaacctcatggcataaaacaactttacagcctgcatagaaaacctaagaatattcattaccagtgaggtgttatttaaaacactcatcctcaataaatgcctctcctaaaactctaataactatgataatgaaaaactgtatgttgtcagcaatttgatcaagagcactaaattaggaaatttcaataactgccactgtaaagctatctgtccctgctgtagaacatcccagatggaactaatattaactcttgtgtgaactggcctggctccatagctacccaatcctgagagatgccagtgtgctgtgagaactaggcccctctgcagctctccaacgaacctgccacttacctcttcctgaccctcagttcaaactcattcctatttggggggcgagggaggagggagctcttcctacaaaccgtaataatttgctggtaaacataaacaaaacagtgaaggcttccattctccaccactgttcacatacatctcacctatggacgatctgaggggaagagaaaattcgggtccttgtgttccacttgtccagttgagaaattcacgtggaactctgcccatggtcgttaattccaagttaggaacttgggccaaatgcttaaagtcaacccaaacttctcttctgagcaaaaaggaaggcctaaatgcaatgagaaatgatgcacgagttaaataaaagatttacctggacaaaagagcactttttaaaactacaacataagctttggcgtgggggcttagcaggcacttcaaaacctcacaatca

SEQ ID NO: 129379 - DNA, 1053 bp, Homo sapiens
tggcgctgtacggttggcccccctctggctgcagtgtaaagaacgacagtgcattttgcttccctggatttccattagaaataaatgtggatcctgctcttcagcagatggggaggggactaatccaactccactggttggggatgggaccagcacatttgtgtgacttaaccatgtggttctgagaccctggtgaaagcccagtgacttttcatctggccacaacttcgtggggcttgcatgtcaagggagaaaaggcaaagactttcctttaaagaaaacacagaagggtgccagcaggggataactgagtgaaccatatcctgatttaggcgggaccagctctagaagcgccaagagcaggtttgtcccgtgggtggtgattgtgaggttttgaagtgcctgctaagcccccacgccaaagcttatgttgtagttttaaaaagtgctcttttgtccaggtaaatcttttatttaactcgtgcatcatttctcattgcatttaggccttcctttttgctcagaagagaagtttgggttgactttaagcatttggcccaagttcctaacttggaattaacgaccatgggcagagttccacgtgaatttctcaactggacaagtggaacacaaggacccgaattttctcttcccctcagatcgtccataggtgagatgtatgtgaacagtggtggagaatggaagccttcactgttttgtttatgtttaccagcaaattattacggtttgtaggaagagctccctcctccctcgccccccaaataggaatgagtttgaactgagggtcaggaagaggtaagtggcaggttcgttggagagctgcagaggggcctagttctcacagcacactggcatctctcaggattgggtagctatggagccaggccagttcacacaagagttaatattagttccatctgggatgttctacagcagggacagatagctttacagtggcagttattgaaatttcctaatttagtgctcttgatcaaattgctgacaacatacagtttttcattatcatagtta

SEQ ID NO: 129380 - DNA, 1021 bp, Homo sapiens
ccaaccgtacagcgccagccagggccgtctagctctttgagtttccagcggtgcttcccccaacactccagacaggacagggatgggtgttctacggtccagttagtctgaaaaatggtttccaagaggtccttggaccatcccaccacaactcccacagaacaccttctcatctctcaggacaagcccacaaaaaccaccctgagagacctcgaacctgcaggaaggtccaggagggctgctccgcctcgctgcagaaggcgcggcaccaggctgagcttgtcaacagtcaaccaaaccttagaaaaccccaaatcctccccacaaatgagtcatctgaaagtaaaacccgtggctacagggaagagacactgagtctcatcctctatgcctcagaaaatcactattaactaagaatcagggaactgataaaccaaatgccctcatcccacaaaaccgtccacactgacaatcccattctactgctacagatttcaaacggctcacagataaagacagggctgtccactcgcagtcccttgaacgctggggctggaaggaacgggatgtcctgcgctgcctttccactaagcctctgctcaacaggtgtcaagtgccactctgtcccctgggtcccaccatcatctggccacatttacaggctgtgacagcagcagccaaatgttcggtttttacactctgtccaggcttgactacatttcccttagctatcccctaaaagcctcacatcatggtgatgaattatagatcaaatgcactcccgactgtcataccctcttaactcaccgagccgtgccattcccacgtgcttctaaatggccagcagagccaccagaaacgggcagaggcgagaacatgacttcaacttggtgtttctggtggatatgttttcagacacccagaagaactgcgaagagacagcttctctgtatagcatccctcggagatgctgcagacttggttccaggccatcgcaataaagcaaatatcacagtaaagt

SEQ ID NO: 129381 - DNA, 1088 bp, Homo sapiens
tttccatattgaaggtttgtgggaaccctgcttcaagcagatctgttggtgccgtttttccaacagcatgtgctcactttttggcaataatatattttaaattaaagtatataattggattctttaagacataatgctattgctcactttctactatcatgtagcataaacattttaatatgcactgggaaaccaaaacatttgtgtgacccactttactgtgatatttgctttattgcgatggcctggaaccaagtctgcagcatctccgagggatgctatacagagaagctgtctcttcgcagttcttctgggtgtctgaaaacatatccaccagaaacaccaagttgaagtcatgttctcgcctctgcccgtttctggtggctctgctggccatttagaagcacgtgggaatggcacggctcggtgagttaagagggtatgacagtcgggagtgcatttgatctataattcatcaccatgatgtgaggcttttaggggatagctaagggaaatgtagtcaagcctggacagagtgtaaaaaccgaacatttggctgctgctgtcacagcctgtaaatgtggccagatgatggtgggacccaggggacagagtggcacttgacacctgttgagcagaggcttagtggaaaggcagcgcaggacatcccgttccttccagccccagcgttcaagggactgcgagtggacagccctgtctttatctgtgagccgtttgaaatctgtagcagtagaatgggattgtcagtgtggacggttttgtgggatgagggcatttggtttatcagttccctgattcttagttaatagtgattttctgaggcatagaggatgagactcagtgtctcttccctgtagccacgggttttactttcagatgactcatttgtggggaggatttggggttttctaaggtttggttgactgttgacaagctcagcctggtgccgcgccttctgcagcgaggcggagcagccctcctggaccttcctgcaggttcgaggtctctcagggtggtttttgtgggcttgtcctgagagatgagaaggtgttctgtgggagttgtgg

SEQ ID NO: 129382 - DNA, 1025 bp, Homo sapiens
ggccacaccacccctcagagcagctgttgtttctaattgtttttaccttttcctttaggcccctattcagagaaggaaaaagcctgcttcacagaaaaagcgacgctttaagactcataacgaacacttggctggagtgctgaaggattactctgacattacttccagcaaatagggaacagttttgccctggaacagagttacagatacacaatcaagagtgttcttgctgatgctcggggtctgaagactgtcttcctatctgcttcttgcggctgaggagaggagcagttcagtttacaaaacaagtgcaaattaccaaactcaaagcttatttgagtagaatgggctcatgggcaatgtgatgttccctgttaaccttctgttactccctgggagaaaggcgctgagcgtggcatgcaggtgtctttgctgtgtttttctccacttctaaatggttcctggttcctttcttcctcgtttgttactttagagcaagtttgcccatagtcttgaatgcaatatttgtttattccaaaagaacatatttataataaaatcactgtagaaggatttttaagatgttagtgaattctgtttcttttcattctcggaaatggcaggaagcagctccagtctctgatttccatgggtcacgtgctggggatgtgatgaagcctgcagtctgcactgtgttgctgagcacatggatttcaccactggaacacaggtgtgctgcttgttagcaagcagagcaataaagatgtgctggatgtcattgttaatgttttcttttaaaaagaagcgtcagtgtcagccgggcaagctggctcacgcctgtaatcccagcactttgggaggctgaggcaggtggatcacgaggttaaaagatcgagaccatcccggccaacatggtgaaaccctgtctctactaaaaatataaaaattagctgggcgttggggcatgtgcctgtactcctagctacttgggaggctgaggcaggagaatcacttgaacccgggag

SEQ ID NO: 129383 - DNA, 1028 bp, Homo sapiens
tccttagtcaccagttaccaggttatttgatttcaaaagtcttttttgcagataaattgttgaataacctcatttccatgtgaaacttcggttcccgtctccctacacgtttcttattttctattatcaatgagagaggaatgagtatatcatgcttaggggagctgagcaggaaataagctgttagccctaaatagaggaattaaaggagggtgttgacggcccaggaaagcagggcggcttcattgtggcagccctcatttgctggcctcaagaaacagccccactgtcggggctgtgtgggtgcagttctgtctccaggcctttccctgcaccgtgtcccacatgtggatgttctgccctgacttgtttcatgatgacatatcagatgtgctcatttggatccagaggagataacactgaaacctggattttgatcaagatgctatagtttgtaaaaatggattgtaaaataactagtgtctgtttgatacagaatttcagaaactgtggaggagtgtcactgtagattccatggacgaggagaaaattgaagaatatctgaagcgacagggtatttcttccatgcaggaatctggaccaaagaaagtggtgcgtaatctctagcaaagcagcttaatcccctgccctgggaactgttagcctgctccgctttctgccctctgaagagctgggagttgttcccccgccattgtttctcagtgtccgcagcccaggtcacatctgaggtattgcaggcctgcagacccgccctcggtgctgctccaggcctgtgagtgcctttctacacccagctcctcccaagcagtcctgctcttgaggtatagccatatggaaccttccagggcctgtgtgttccccactctcccactctaagctgctacaagcccttctccctattcttaaagggatgctgtgccttgatctgcacaacctttcagacttgaacggggccctcccctgctccgtgagcctcgccgtcctggtgcctggttctgccatagtaa

SEQ ID NO: 129384 - DNA, 1001 bp, Homo sapiens
cactgatctgtgtccctcttaagaaggatggtgggggttaagcagggctttcgaccttggcagtgttaacatttggggttggttgagtagtttttttttggtgtggggagtgtcctgagccttgtagggcattgatcagcatccttggcttgtttagataccagtagcttagcttccctgcagtgtgacaaccaaaactttctttagacattatcaaatgtcacctggagaacaaattccccttgttgggaacttggttaaaggtccagtttatgttgatagaatagaggaagattgagacccactgttttcagattccttttcctggctcctgtcattccgcacacttggtggtggaagaagatcacagtgaatgaggttgctgtccttgaccttccaggctgagcgggtagaatggcataggaagcatagttcagctgtttgcattttgtcattttggtgttcacacggtgctgtagagacaccagagggaacagccatttacaggaaccttgggtaaggtaccaccagtcttttagttgaaagtgccagtattacgtaaatcagtaacaaaaacaaaacaaaacaagtttttgttaatgatataaggaatgtgtgtttccagggaagacccattgaaaacggacacgttttaacattcatctctagcctcagaatgctttatgctttgtgtgaagattttcgtttcgttccactaggtggcaaccttagccatagagaggaactctgagtgcgcacacttcaggcacacagagggttctgtctgtaatagaagcacttgtcctaaaatgagaattagctcaaggagagagttgatggtgtagtaattttttaatccagtgtagaagtgaacacagagtagttggacctaggcaggcaacttatttttcaaaggcatttctttccttaagtcagaagcttattcatttaaaggtagtataaatgtgatggggaagaggctggtgctgaggagttagatt

SEQ ID NO: 129385 - DNA, 1063 bp, Homo sapiens
cctgggtgacagagtgagactctgcctttaaaaaagaaagttaaaaaccatttaagatatttctgagctcaaaaaaaaaaaaatctaagaaataaccgattcctttattcttaggtataataacaatcattttgaaaaatatttgcagtacttaaaaaaacctatcacaagtattacaagttcagatagagagtaagagcctatactaaaaggcagatgtgcctttcccttctctagctgcagtccctttcttttgtggcagctgcttaactagttttattttggattcttcagttttttcccaattgctaataatatgcttatgctattgtttcttgattttttttcaactttaaacattgtgtgacttactgtcatttctctttcctatacctatctctctcctcccaatatagttgtatctctagttaagttttagtttctccgtcatttactttgatgccttcaacaaacatatttaaatgttctcagtgggaattttagtgttaagtctgctctgcagatggcagcatagtgtagcatgtctgttgtgtaagcagatgtttaacttgaggcgggtggttgataggaaagagattgcagtagctctgtaagagtgtacatgaagctctagaatttcttaatagcatttctttggggttattttaggagtacactgtgtgtttagcagtgggaagcccagatgttcttgtaatctgcacgctaagctgtcactttctggcccttgtgtgctctttctgtggatactattgttttaactttgctttttcctgtttgtgtatcttttatctatacttccttaatattacccgttttcatttgtcattttatatggcctttgttggcctaaactcttttctatttccttattgcatagcttataggggtaaaatgagaattttcactttcccccctagaaaacattaacaatctagaaatacatagagtaaaatagtaatattaaactctagcatatgtgatgcagaaattaaacatgcatcatggatatgtgttccgtgtcttgtgataacatatgcttggt

SEQ ID NO: 129386 - DNA, 1048 bp, Homo sapiens
tgggattacaagcatgcaccaccatgcacggctgatttttatatttttagtagacatggggtttcaccatgttggccaggctggtctcgaacacctgacctgaagtgatcccacctgccttagtcccccagagtgctgggattacagccatgagccactgtgcctggtctattttgttagttttttgaagctcttgaaatgttaggaagaatatagctcttggtgatacgagttgcatatatttttttgtcagtttgtcttttgattttatagagcaatgagtttcaaccccattctgatttcatggtctatggctcttcgtcactataattatgctacctggaataatacatgtttttcattcctgaaggtttgtttacatgtaactatgatttaatgcatctagcattttgaaactgtcttctaataacaatttcttcacttgatagacacggcatcagcgaggagatacgcatcctctaaccttagatgaaattttggatgaaacacaacatttagatattggactcaagcagaaacaatggctaatgactgaggtaagaatttagttgattatcaagagagatttcctgtaactagaattttcttttttttttaagacagagtcttgctctgttgcacaggctagagtgcagtggcatgatctcagcccactgctgactcagcctcccgagtagttgggactacaggcatgtgccacgataccaggctaatttttgtgtttttagtagagacggggtttcaccatgttggccaggctggtgttgaactcctgacctcaagtgatccgcccacctcggcctcccagagtgctggggttataggcatgagccactgcgccttgcctagaatgttttaatatggtgaaatctgataatgctttttactttttcttaaaagaaatggtgtagggtctttgttttttgaatgtacacatttataagattgatttgttggttttcatataattttatgttatctgtttcaaaatgttaaaggtaagactttgtgtaatagttgtaaagaa

SEQ ID NO: 129387 - DNA, 1040 bp, Homo sapiens
acaggcatgcaccaccatgcctggctaattttcttatttttagaagagacgaagtctcactgtgttgtccaggctggtctcgaactcctaagctcatgtgattttcccacctcggtctcccaaagtgtttggctttcaggcatgagccactatgcctgaccaagactttgaatcttaactaaatttattaaagcgggatttcatttttagctaagatggctaagtaatttcaaatttgctcccttcttttgccaaactcttattcacgattagttactagttgcatctcttgaaaaagacagtactatatttgttattttaatttcatccatctattggttaaaatataaatcagatttttaactgtgctaaggcttttcttttgtaatttaatagacttagtgtctagctgagtctaaattctgtggtttgtatttgggttatagtataaatatgttagtatataactccccattattaaataatgtattttgacacgtaagtattcactgttgattcatttcatccatttattcccccacatggtaagcagttatgaaaatctattggctgtttagggcactaatggtgggaatacccagaaaaaaatgccaccctcagggctgtcactctgttgagggacactgacatttaagtgtcatgtttttgctactctgttaatatggtcttcacttccctatgtggcttacttataactttgtctgtcttagaacagtgaacttcagaatttttacttgtgctccctacagtttgaaaaactgtgtacccctttgtacatatttaagttgataactacactctgttagcaaagtttaaatagtggcactattcaagcaaaaatttaaatgatgaccagaaatacagaatttctggcatattgtagtatttcaataaaatatatcacttttaaatttatctaatggaatctaaatgtcattatttaaaagtataaaaacaaactcccttaatgattgggaattttaattattttttctttgaatatttgtgtcccatctgtt

SEQ ID NO: 129388 - DNA, 1050 bp, Homo sapiens
tgagaccagcctgggcaacatggcgaaaccccatctctacaaaaaataaaaaaattagccaggcatggtggtgtgcacctgtagtcccagcctctcagaaggctgaggtgggagaatcacctgagcctgggaagttgagggtgtagtgagctgtgattgtgccattgaacttcagcctgggcaatgggaatgcgaccctgtctcaaaaaatataataaaaaataatgtgataaagatatttataaaagaattgtggtttggtgttttaagttatttatactttgtttctacccttagtgagaaaattggtactttaatgtatatactcaaagattgtgtatttttcaccagaatattacagggtagaatatactagatgaaaaactcaagaaatatgttaccagcattaaaattattttagctgctcaagagtcataatcacacataatatgacgatgttattttgaacttcatttgcagatcatagcaatggatcatttaacttgaaagctttgtcaggaagctctggatataagtttggtgttcttgctaagattgtgaattacatgaaggtaagtacttttctcagatagcaaaagtcctatttaactttttggcaaaagaaggagattagggttttcagaagttaaatttctgtatacatcaaaatttatcaaaattgtgcattttcagtatgtgcagtttattgtatgccaattatacctcaagccttttacattgtattaatttggcattgtggcgagttaccaaagcatatttaatctgcattaactcaagggtacagtttaagctcaccatttcacttaataagagtgtgcctaggcagtaggtatatcacctcttaatgaatacaggctggcaaaaccaatgggaggatgtgattgatttttcaggttattacttccattgatgtgagaagtaaaaagtacatagttcaggcagatgatggtgatggcttctctgcatcttggaggagaaaattagacatttactgagagtcttagaaaaacattgactcacaaaagaatt

SEQ ID NO: 129389 - DNA, 1045 bp, Homo sapiens
ctgaacaccttgggagaatgaactacgtaggtaatatttcataattgaaacagtgaatggaaaagcacctataaggcattctttttttttttttttttaattttgagacggagtctcactctgttgccaggctggagtgcagtggcactatctcggctcactgcaacctccaactctctcgttcaagtgattctcccaagtagctgagactacaggcacgtgccattatgcccagctaatttttgtatttttggtagagacggggtttcaccatgttggccaggatggtctcgatttcctgacctcatgatctgcccacctgggcttcccaactgtaaggcattcttaatgttattgttacttttggaaacatggtagacttcagtgtgccaattaattaagattgtaacaaagttagttttaaaggaaaattgcatatgaagtttcattttagtctcaaaaaaggatactcaataaagacttcactaatctcaaaggagtatggtattgccatctagaagctgttcttttggatctctgacagttgttacatttgacttgtggttgttctaatgcaatcttttgtttaaattattattaccaacctggtgccagagattggttctcctctccccttttacttaacctctctctttgtggatcagccacatgggaactttataatatctgatctcatgccttgctaatagaatgtgtacttctaaaatgtttttctagtatttatgatggattttttactgttcctggttatgactaatggaatgcatttgtgatgcagtggtgacattagggtttctgcttgtaagaatgcaacaaaatgatagatattttgaaacaaatgatcttttgtacagggttttccacaccagatagagaaggagaggggggtgtttctcaaagtgggtgggtagtgctgtgatgctttttaaagtaagcatccatgttcatgcagtggcagtgcctgtggctttttattcctaatttatctgtaaagtttactttaaaataattgtgatatcttttt

SEQ ID NO: 129390 - DNA, 1058 bp, Homo sapiens
aagacagaccaaactgcagaaatgaaatcgctcagagaaaatgaaattagcaagtaaccagttaaaataaaaagctatggtttactctgaggtctggatatagatcaggttcatgtaaaatgtaatgaattttccattaaggcacagatggtaagggtgcttatcaaatagcacaaggcagtcttcatattttcataataaaatcctaccaagcggtgaaacgaatacattgctttttcttgatatttagtaggagcaaagctttctggttgatttttcagggtaaaatattttcctattgcatcataaggacatgtaccactaaataaaaaagatcatataaacctacctcttgtctgagaggatgctgctgaagcgatggtatcgtctgtttgtaatgcagtctagtgcacagccaagatggagctgtgcttctattggttgaaccacaatggagctgacagtttcctctatgttcatttgcattaagtcttgccacccttaagagtaaatcattcataaacttgaatagagctgtctggggtatcaactgtcatcccttctcctttatttttttgttcttaagctaaattcctatataggaatttgtgagttactaacaaattgatgattctttagtgtttcattataaaatttcagatccttcagtgaatacttcagtgctagggctggaagataatgtcgggaaaggtagtaacctaggaaacaaacagtccaggtttgccagcctgatatttccttcaggaagtgtgcataaaatcttataaatttttcttgttcttccttttctttcattacttgttccgtatataatttttgcactctggaagtgattatttccatgtggtggtttgatttaggaggaattatgaaggaaaataattggcttttagctctgcaagttggaagagggctcatttaggtaaatacactacctgcattcaaaaaatagtctctaaaatgtaaatggcaaagtgatctccaggttggctctttagagacagagtatttttagttactgtgtattatttagagtt

SEQ ID NO: 129391 - DNA, 1212 bp, Homo sapiens
gctgtatttatggtaaaagcctttgaattgaattctcaggtgcttttaagcatatcactttgaaatgtgatcagttaatcctaatagcctgtaaatatagagcaactcacttaatttaagctctggaacttaggccatgtctccagtcagtttggtgaaacagcaatgagcctccatctgtgctaacaatagacatattccaagcaaaatgcaggctgatgatagagtgttaaaacaatgtgggtggtaggggtttctgttgacagtttacctgaaatttgatttgtaagttaactgttttatttgacaaagttatttttattttatctgagacttttgtttggtgcttctgtactttctgtagcaagcacaaatggtttctagataattaaccccactgtgctgaacctggacagatctagtatcttattacagcaacctttgggttttgcaggggatactttgctcaggctagctgaatgccgactaagaaaaggaatagaaattatgaagaaaaaaaaaacaaaaaccctttaaagattaaataaacttaccagcaaggtaaaaggacagaagctggctctttaggtccgatatagtatatagatggagttctaacatctagtaaataactaaattttcatgcttgaatagtataaaattagaaatttggtcagcagttaatattaatttttaatagacatgaatgattgctctgagccacgaagataatcttgttacctagaaaggtacttactctcctttcttaaccagttcttcttaggacatatttttattttaaaatgcagtttatcaaaaggacttactttgtatttattttgaggatcagtttaagaatgacttcaacattatatttaaatggtgtgataaattgatatcaaaaatgaaaggctatttaagaaggtttttgtttaatagcatgactttatattacgagagagaaatttcacagtgaagaaatactttaattaaatgttaaggaagtctgaagctgtataaattatctgttcagtgtagtataatgcagcccatatagtgataccttttatgatcttttatataaaaattaaaattgtgataatttcttggcattctctgcatctacattcaaagcaaaataaaaataattttgaactattttctcatattctaaaaaatataacaaactttcttataagtaactatttttta

SEQ ID NO: 129392 - DNA, 1499 bp, Homo sapiens
ccaaagtgctgggatgacaggcatgagccactgtgcctggccttcagttgctttttaataattcattaagttgatgtgccacatttagttaaagtcttagttattttcaattttttgttattttgagtaatgccattgtaaaaaatctttgtaccttgagcttgtacatttgaactaagtgcttaggatacatttccaggagtggcatttctgacttaggggtagtgtggtggttaagagcatgcttttgtttgctcatgggtgatagcaaaatagtgttagggtcacaaaatatctatatagcccttggaattccaagaaataaaactgccatatttcaacaggtgttgagtggccctatcttttgaccttttttggggggatggggggaggggcagtctttctgccttggttatcttagcctttgagagtataaataagagaggtaaaatgaaagaacaaactcaggaaatgaaggggtgtagtagtaagttttagtttgaaaatagactaggcctttcctatatcatgcatttctaactaaacagtaagtcagttttgtgagaattttgtgcaaatatacttgtggcatttttgattattttgagactttttcatactaatcctacataaaactcaagtcattatatatttatataagttgttttcagtaaattagaaaatactactttttaataaataggaactttatatatataagtggaagtattttacttcagacttagaaacatgttttaaatagcctttttgttaccaacacactattttttgtctacatgaattggttagttataaaatcattttagcatcattagccttgcttgtcttttccagcttatcttttgctgcttaatattgaactctaggaatcttttatccagtttttgaagtgtcagtattaaacagattagtaaattcacattcatgaagttttactgtatatttaatgaaatggctatacacacaaacagtgcatgtttaacttttttttccccttctactagaaatgttttaaccattcagtcagaatttgttttgtagcaacagttggcctcagaatatattttttttctcagaagaggttgagctgctttcagagattttgttcatcttctatagagtgttagaccacttcagtttcacgttttctgatgttgtccatcatacttctaagagggttgggttcacttttcaagtctttcacggttttgttttttacacagcagcagcagtcaagcacttcataaaggaaagccagcaccactaaagataccactgtaaatataaataaaagcaggatgacaaagcaggcagtgttccagttgtcatggaaagggtaaattttttgaacttgaaaaccaaggtactgataaacagaggtagtggtttcattccagtggctggaagccattcttagagattccacttgctcttttgaatctataaaaaaggtagaaaatgaatttatgtagcaaact

SEQ ID NO: 129393 - DNA, 1049 bp, Homo sapiens
cgagtagctgggactgtaagcacacatcaccatgcctgcctgattttttgtatttttgtagacaggaggtattaccatgttgtccaggctggtctccaactcctgggctcaggcagtctgcccacctcggcttcccaaagtgcttcagccactatgcctggcctctttttttcctataatggctagtacagtgcttggcgtgtaataagcgctaatgaaatatttcttgagtacttgaataagtgaataaatgcaagtgctagagaactaataataaaaggtaattttgtttgggaagtaacttgttgagatctgtggatttggagtgcaggtttgagtgacttgaatttgtattaaagacacttattttttctttgtagcattatggatccaagcctgttgagagaaagggagctgttcaaaaaacgagctctttctactcctgtagtagaaaaacgttcagcatcttctgagtcatcatcatcatcgtcaaagaagaagaaaacaaaggtagaacatggaggatcgtcaggctctaaacaaaattctggttagtaaaattgtttaggactgtttggtttttattcagattattcaggaggaaaccgtttagttatggctagttcatttttcagttcagcactcatgttgataggcactttgttgaatataaaggatgggacaagagaatttaagctcttaggatgttaatagtcttgtgctgtagttaaaatttaggttattacctctttaaaaaaactttatttaggtttaatttacataccatacagttcattcattttaagtttacagttcaaagatgtttggtaaatttacagaattttgcagctgttattacagtccaattttagaacatttccatcacccccagcagatctgatgtgcccatttgcagtgacttttcccatccctgccccggaaaaccaataatctgctttctggctctgtatatttgccttttctggatatttcctataaatgaaattgtacagtaagtggtcttttgtgtgttgtttttttcacttggc

SEQ ID NO: 129394 - DNA, 1044 bp, Homo sapiens
cgggaagctgggaccgccgttctcgaagcgaaacacccagcacgcgaaccgttccccggagcattgtctttaggccagaggttcattgagcaaacttttgggttggaaagagggaaaattcgcggtctgccgcctgactgtgcctcttccaagcctccaagttcacgggcgcggtagccaagcgaaccgtgtgtggagtttgagcagccgcggggtccagccagctcaagactgtgatttaaaatgatgctcatacgcggactgctttctaggctaccttttggagatttggtttgtgatgatccctaaactttaacgatagtagttgatttctgcagtctaaacaacgctgcggcccccttttcgcccacctccccacttccgtcatttaagggcgaagcagcctgcttttcatagccgggtcctgaggtgccagggacactaacgaggctgggtaaaagtgaaagagaggggaagtagtaaggttgaaagaggtcgaatggtggcaagaatcgtgggcttggaggcagatttcagtttaatttttgggttttccgtgtctgcccacggaggaaccagccaactccttgagttgtggttttgtttaattgtaaaatggacatggtgatgtagcctgtttactccataggggggtccagagatctaaaacttagtacacatattgggtagtctttgaaaaaggaggaaaagttaggcggagcacgtgatggtgaaagacagacattgcgaagctttctgctctagatgcctttgaacgttcccgaacctcacaggtggcctttgttttaaaggcctttaccagcgttccaggtctggtgtaaggagcacttgagttaggagtcaggaggtttggttcctggccctggctcttccatctgtgcgaccttaaccagacagcttcacttcagatttcacgtattaaaataggaataacactaatacctgtttgctcctagagttgcgagggtcaaatactgtaagcatttagtttgttgtaaactgtacggctttatttactttttt

SEQ ID NO: 129395 - DNA, 1051 bp, Homo sapiens
tgagaagccggcctgccttattttcttttttcttttttaatgattaaaaatagtttgtggcaaggcacggtggctcaggcctgtaattctagcactttgggaggccgaggcaggaggattacttgagcctacaagtttgaggccagcatgcacagcatagcaagactgcatctctacagagagtaaaaaaaattacccgagtgtggtgatgtgcatctgtaatctcagctacttgggaggctgaggtgagaggatcacttgagcttgggtgaggtgaggctgcagtgagtcctgatcatgctgctgcactcaatcttggacaacagagcaagaccctgtctcaaaaaaaaaaaaaaaaaatatatatatatatatatattatttttatgaggtgaagtgcatcaaacttgggaaagatttgaggaggctgggaacctcctggaaaaccactccttgaagaaagatatgagagacatttagaagtgattcctgctttcagaaggaggtggattcaaatacatcaaaagtcccttcctctgctaagtgtttatagttcaatgaataatttcaatatttgtatgtgttcttgtcattttatttttttctgaaaaacttccaaaaatttgaaaataaaattacagccttttcttcttataaaatttgttactgtgagctttaattggtacacaggaaattggtttattttctaaggatatttcacattggagaatcagttgcctgtgcttacgggggtgaaaagagagttctcgtataaaaataaagatcgaaggtataaaagaaacatttagcagattaatgattgagttggaagaaaagcctagaaatcacttaggtctttaacactttatttctattaggttttaccagctagttaaatttttccaggattttcattagtcatccagtgttactgaatacttttttttttttttttgagacagggtctagctttgtcgccaggctggggtgcagtggtgtgatctcaggtcactgcagcctcccggggtcaagcagttctcctgcctcagcc

SEQ ID NO: 129396 - DNA, 1048 bp, Homo sapiens
atattgaatcatgaaggctcctacttagttatttcttcatgccagttatcattcattcagttgataaacattatttgtcattcttctcaagactaagaactgctatatagagaggaataatatgaagagctggccatcaccagaggctctttataagttcaattaagatcacaatatcagtcagacaccgtggctcacccctgtaatcccagcactttgggaggctgaggtgggtggatcacttgagcccaggagttcaagaccagcctggccaacatggtgaaaccctctctctgctaaaaatacaaaattagccaggcgtggtggtgcgcgcctgtaatcccagctactcgggaggctgaggcaggagaatcacttgaacccgggaggtggaggttgcagcgagccgagatcatgccattgcactccagcctgggcaacaagagtgaaactccgtctcaaaaaaaaaaaaaaaagaagaaagaaaagaaaatgtttctcttcttttcccaggtggttgggatccatatgcagggacttgggtgtgatgaaatgctgcagggttttgctgttgcagtgaagatgggagcaacgaaggcagactttgacaacacagtcgccattcaccctacctcttcagaagagctggtcacacttcgttgagaaccaggagacacgtgtggcgggcagtgggacccatagatcttctgaaatgaaacaaataatcacattgacttactgtttgagttttatgtatttctttattttaatcaggatcttctgatagtggaaatttttagtacataatagaacttatttatggagttagaaatttgtagtgttatccaggattgattttcatttgatcacatctcacagtaattaatattttcaagttttttttttattaacagctctgtgctagttttttttttctgttttagcctcatcccaaatataaagctttgtgaagtacaattaacttaatgtacttgaatgaatagaacttgctactttttttttttttttttttgagacagagttttgc

SEQ ID NO: 129397 - DNA, 2069 bp, Homo sapiens
atataatgagatattttgcagatgcgacccaagtcgaaacacggaattcatttgttttacatacaccttatacacatagttggtaggtaactttatacgatattttaaatgtgtgcatgaggcatacttttgtctgcgtttttgactgcaacccttcacatgaggtcaggtgtggaattttctgcttgtggcatcatggtgctccaacattttggattttggattttgaatttctggattagggatgctcaacctgtaatagaatgtataggattctcataagccaatcattttgagttgttcgctgaggcatgacatatcttcgctgtattaaactatctagatagtgtaatgaacaatggtgtgaaactgtcagaactagggcattaaggtagatggataaatggctagtggaacaatttagctatgttaaaacagacagtaagataaacactgattttaaaatatctccatagttgcaatagctgctggccgaaaacttgcccatcgactttttgaatataaggaagattccaaattagattataacaacatcccaactgtggtcttcagccacccccctattgggacagtgggactcacggaaggtaggtatttaaaaactgaaggtcatttgtggtttccttcctctttcccctgcccccaactttaaattaggtctctgtcagctgatgaaacctatctcagccccagattacattgctttttggttactctcttgtcacagttccagttttctcccctgctactactttgagtgtacagtatctttccttcacaccaccctatctctttgatcttttttttttagcttttttatttgaactaattttaaatttaaagaaaagctctaaaaataatacaaaggactcctctctaaccttaatatttttgcttttttattttttcactctacacacacacatgtctatctttcctaagaactggcccttacataaaccgagtatcattttctttttttttttctttttgagacaagctctcccactgtcacccaggctggagtgcagtggcacgatctctgctcactgcaacctccgcctctgggttcaagcaattcttctgcctcagcctcccgaatagctgggactaccaggcctgcaccaccaccatgcctggctaattttttgtagagatggggtttcactgtgttgcccaggctggtctcaatctcctgggctcaagcgatccacctgcctctgcctctcaaagtgcagggattacaggcatgagccactgtgcctggcctttcttttcatctagaggcagaattcctcagcccttcttttgtcttatatgacactgacatttattttgtagaatacttctcattttggcgtggtttgatatttcctcgtggtttgattgaggttatgtatttctggtcatctccctctttgatagttcagtgtaattgtttagttttctgatagatgctttttttaatgtgcattgtagatgaagccattcataaatatggaatagaaaatgtgaagacctattcaacgagctttaccccgatgtatcacgcagttaccaaaaggaaaacaaaatgtgtgatgaaaatggtctgtgctaacaaggaagaaaaggtaaggaaaaatccagcaaactaaatagtgccttgcaaaatggacagggatggcagtattttgcaggggtggaaaggagggagaccaagcagttgagccttctgattcaactggacaggcccactttgatctgtcttacctgcattttggggttcttcataatatttcatctagaaggaggttccactccttttaaaaaataaagacgatgccaggcgtggtggctcacacctgtaatcccagcacgctgggaggccgaggcaggcatatcacctgaggtcaggagtttgagactagcctgaccaacgtggtgaaaccctgtctctactaaaaacacaaaaattagccaggcatgatggtgcgtgcttgtaatcccagctactcgggaggctgaggcaggagaatcacttgaacctgggaggcggaggttgcagt

SEQ ID NO: 129398 - DNA, 1029 bp, Homo sapiens
tatatacccagggagaggcactaattgtgcagttttgaaaagtttcctagtgatgctgccgtggcctactttcaaagcactatgcttaggtttaccacttaaaatgttattacatttttccagaagtacactttaaaatactttgtttttaaagtgaggcattacaatggtgtcatgagctgacattcccagccactgactggaagatttgggtcaacccagggaacaggcttggtttaagggagttcaagtgttggtggcctttgggtaaaagtttatgtctatctttgtatgtgggattcagtagggattttctttaatgttaaaaattctagtttcctctgtatttgctttccttcttcccctgtcctccctgagcctccacacatgtgtaacacattttatttgccaataggtcaaggaggttaaaaagactttgtcgggcttggaagtcagcatggttactgcagttcccggtaggctaccagtcatgaccatgattccagatgttgactgcctgctctgggccattgggcgggtcccgaataccaaggacctgagtttaaacaaactggtaagctggcttggtctgcccgaaacatttgtgaatctactaggagtcttatggttttattttccccccagacacccaaaacttgggtggattccattggattcttttctctttttcccatgtattcagtttgtgatcaaatttcattgcttcttcctttgaaattaaaaaaaaaagttttctcttctcttctttccttttcctttcttttctgtttttgtttttttctttttgtttttgagaaaggtcttgctctgtcacccaggctggagttcagtggtgtgatcatagctcaccgcagtcttaacctcctaggctcaagtgatccacccacctcagcttctggagtagatggaactatgtgtgtgccacaatgcccagctaatttttttatttttattttttttagagatgaggtttcaccatgttgcccaggctggtctcctcggctcaag

SEQ ID NO: 129399 - DNA, 1043 bp, Homo sapiens
tgtgtgtgtttcttttttgaggcagagtctttcagtgtcacccaggctggagtgcagtggcatgatcatgatcatggcttactgcagccttgtctttccaggctcaaagggtccccccacctcagcctcctgagtagctgggaccacaggcatgcaccaccacacccagctacttttttttgtagagacgtggtctcgcttgttgcccaggctggtctcgaattcatgggcttaagcaatccaactgcctcagctcccaaagtgctggaattacaggtgtgaactaccaagccctggcccatcttgggtgtttatccatgtattctgcagtactttcccgagaagtcctcttagacagcagctcaaatgggctgattgttctttctccgtccaagaaaaatgctgatgaatgaacttctctccctcattacagaaggaaaataatgttcttatctttttgtaacaaagaaagtaactagaatttagtacactgtgacttagaacccaaggaagactcctcgcttgatgcttagcgtgcatttcttgcagatttcgtttgatggtttgaattcaatattcttaaagtgtgtctcttttttttttttccaggtgaatgttggatgtgtacccaaaaaggtagaatttttatttctctttccctttacaatcctttttctatttggtaaatcataatcaaaatcagaatgtttccaaatagatcagttaaaattctttctgcaaaaaaaacccctagaccctactaaaagtagcttaagcaataggattgtttttgtttgatttgtgttttttaaatttttttatttatttttaattactttttatttttattattattgtttttttgagacggagtttcgttcttgtcacccaggctagagtacagtggcgcgatcttggctcaccgcaacctctgcctcctgggttcaagtgattctcttgcctcagcctcccaagtagctgggatgacaggcgtgcgccactgcacttgactgatttttgtatttttagtagagatgggggtt

SEQ ID NO: 129400 - DNA, 1047 bp, Homo sapiens
tagagatgaggtttcaccatgttggccaggctgatcccgaactcctgacctaaagtgatccacccgcctcagcctcccaaagtgctgggattacaagtatgagccaccgcgtctggcatgttgtttcatttttaagagacagggtctccctctgtttcccaggctggagggcagtggtgtgatctcagctcactgtagcctcaaactcctgggctcaagcgatcctcccacctcaacctcccgactagctggttctgcaggtagataccactgagccttgcttgaattcagcatttcaagtctccaaaaggttaagtatattgcttatctcatgatctcgtgtagactggagagaaatgcaaagatcgcccaaagtcaaggtgaattagagccttctgggagctttgcctctgtggttcgcttctctgcctacacacgtgatgggagagtcagcttaaggaaaagttgtttctaaattgctgctccctttgccccagggcctggggaacttgcggtcctgggttcctgctgagtgtactgattctgtgataagaataaccaggttcctgtggttttggcgagtagtacttaccaatgagagttgggtagtaagggttgatcatgtgacaaaagttcatgattgccaagtcacagtgaactatgctgcacagcagcagttggagaggcctaggggagagagaggtaggggctttgaaagatcagtgaacagcaggctgctcagtgaatcattgttcatctaggctgaaaacaattacccagcaacatgtaaatcataacctcatttggaagtgatactgtgtactttgatattatgatgtctataccctggtaaagctgaacactggacatgctttttttttttttttttttttttgagacagggtctcattgtgtcacccaggctggagtgcaggggcatgatcatagctcactgcaaccttgaactcccaagctcaagtgaccctcccacctcagcctccccagtagtcaggaccacaggcacatggccaccaccatgccctggct

SEQ ID NO: 129401 - DNA, 1026 bp, Homo sapiens
acgagaggacgttcaccgttcctcgcctcgatccaccggacttcagaaggctacacgcggcaggcgccgctcgggatccaggggccggggtgagaacggaggcggagaaacccctcaggctccgccaccggggcggggaactgggaggcggccccgcctctgggcatcctcctgggtcttgcctagcggcgggcgcatgcttagtcaccgtgaggctgcgcttgcccggggcccgcgcccccctaccccggggaccgcccccgggccgcccgccccacttggcgcgccacttccgcgtgcatggccctgctgccccgagccctgagcgccggcgcgggaccgagctggcggcgggcggcgcgcgccttccgaggcttcctgctgcttctgcccgagcccgcggccctcacgcgcgccctctcccgtgccatggcctgcaggcaggagccgcagccgcagggcccgccgcccgctgctggcgccgtggcctcctatgactacctggtgatcgggggcggctcgggcgggctggccagcgcgcgcagggcggccgagctgggtgccagggccgccgtggtggagagccacaagctgggtggcacttgcgtgagtaccgccggtttgttcgggcggggggcgcctctttgtctcggtctttcgggggacagcctgtgctcgttcctatggcgatcctgtcccccggcgctgggctttcctcttttccacccccgcaactccccattccgaagccaggaacccagcaggtggaggagagagaggcgtccgggggcttctctgcggcccgcaaagccgagccagcgtctgcttccgcacggatgcgatattgaccagggccggggcgggttagattaaccttcctccatcctcacttgtccaagtgggagaggattggattctgttcttgaccgcgtgaaacacaaaactgcatctgggaacattgctggtggcctgtgtgtagggacgagggtgacggtgccatagatcctggttcttgaaaaatgtaga

SEQ ID NO: 129402 - DNA, 1032 bp, Homo sapiens
cagaagttcaagaccagcctggccaacatggtggaaccccgtctctactaaaaatacaaaaattagctgggcatggtagtgggcgcctgtataatccaagctactctgaaggctgaggcaggagaatcgcttaaacccaggtggtggaggtttcagtgagccgagatcatgccatcgcactccagcctgggtgacagagcgagactcccatctcaaaaaaaaaaaaaaagaatattcctatctctgaactcatggcaagctattttcctttaagttctagaaagtttctttgaaaggtatgaaacttctgtctcattactcctagggatatgattttacattgacaaaattataaaatgttatggtggtctaaagggacatggtgtgtaaagtatttgataatgactaagccaagcttttcatcttctaggtcttatttgactggatgacgagaattgggtaccacatatctctatacagcctttctacttcctttcccagacggcctctggcagtggagggaggccagtcgctggaggacataggaataactgtggacactgtactcatcctggaggagaaggagcagaccaactaggaaagaagggagagctccctgtttgcatgaagtcagttatgctatgaccttctggcacaataaaggcttcactttcaaatcacactataccttgattgagctcatggcagtaaactttgaacattgatatccatgggaataggattagaaaaggattgctttctatatataataatctgtggactgtgccattttacagtgtaccaaatgagaatgaggttgaaatgtatgcagtaaggtactcagtaattaattggtattttttcccagctgacatgatttctcagtgttagaaaacaaacccttagaactttcctttctgcctcttcaatccatcttaccacacaatatttcatgattcaaattcttcaaagtcttatacgcaggaatgtttattctgctgtatttctgtgaaattaaaaacttggaagaag

SEQ ID NO: 129403 - DNA, 1047 bp, Homo sapiens
tagccctatgaagcagttagttggaatgggagcatctgcagtgatttgcccatggccattccagccgtaagtgatgtagtcatggtgggaaagcaggactgctgtttctactacagtgtcttgttctttattcatttgttttctttgcaaagtcagatcctttatttgcttccttttttgccatttacagccttcaatttgacccagcgcctcgtcgtggtgagcctcatgttacacggcgcaccccagactacttcctataaatttctcctgggaaacctgcctttgtatgtggaagtatacctggctttttaaaatatatgtatttaaaaacaaaaagcaacagtaatctatgtgtttctgtaacaaattgggatctgtcttggcattaaaccacatcatggaccaaatgtgccatactaatgatgagcatttagcacaatttgagactgaaatttagtacactatgttctaggtcagtctaacagtttgcctgctgtatttatagtaaccattttcctttggactgttcaagcaaaaaaggtaactaactgcttcatctccttttgcgcttatttggaaattttagttatagtgtttaactggcatggattaatagagttggagttttatttttaagaaaaattcacaagctaacttccactaatccattatcctttattttattgaaatgtataattaacttaactgaagaaaaggttcttcttgggagtatgttgtcataacatttaaagagatttcccttcatttaaactaaattactgttttatgttgatctgcatatttctgtatatttgtcatgacagtgcttgcatcctatttggtgtactcagcaaataaacttttcattttaaacaaaaacattcatttattgtgttgtgcattaaatgaaaactttattttttctagaccaggtcttgctctgtcatctgggctggagtgcagtggcacagtcatagctcacttcaaccttgaactcctgagcccaagccattctcctccctcagcctcctgagtagctgggac

SEQ ID NO: 129404 - DNA, 1043 bp, Homo sapiens
tgcacacgtatatatacacatatacacacgtatacatatatgcgcacacatacatgtatacatacatatatacgtgtatgtatatacacatgtatatacacatgtatacatatatgcacacacatatatacatatatacacgtatatatacatatgtatatacacatacattaattagcatgtatgtatacacactatatataatactatagctaataatatgaatgagataggctctaataaaaggtattattagaaataaagagattattgatgaaaactggcccagttctctaggaagaaagtattctaaatttgtatttacctagtaatagcttcaaaatatataaagaaaaaattggcataattcatgagggaaaattgagaaattaattatgattgtgggagaaattcagtacacatccttgccaagatttcaagcatagatacggcaaaacaacaattagcgagctgcatttaacagactcctaggcccacgaattgcacagtattctttacaggtacacaaactattaaagatggagaccttatatagtaatatagacgactacatttccacagagagtacctgtagtttttgagtttagttttttttaaatgtgtctgtgtcaaaatcataatattataatgaaataatgaatttgtttttatcctgcagggatacaattggtgtcatgatcggaatgtggttaccattttcagtgcacccaattactgttatcgttgtgggaaccaggctgctatcatggaattagatgacactttaaaatattccttgtgagtaactgtaaattttaattgtatatactttcagaaggaaaattttaaatgttaaaaatagaagatttctgtttctgaaattggatgaggagtatagcaaagcccctctccagcaaaaataaccattagctggagaacattatttttaaaaaataatttttcaaagcttttggaaattgtcctaagggcatacagcaggtggagaaacagttaattcaagaaaacctactaaatctcagtaa

SEQ ID NO: 129405 - DNA, 1180 bp, Homo sapiens
taccataatgtcttcaaagttgtagcatgtatcagtacttcatttcttcatagctgagtgactattccattgtatgaatatgttatgtccattcatcggttgatcaatatctggtggtttctactttttggctgttattaataatgctgccatgaacatgtataaactggatttcatttctcttgagtatatacctaggagtggaactgctggattacatggtaattttaggtttaactttggaggaactgccagacagttttccacagcagctgcaccattttgcatttccaccagcagtgtatgagggttccagtttatccacatgtttgcaacacttattaactgtcttttttattatagcctttctaatgaaagtgttatctcgtggtttggttttcacatacgcttttataaggcacttttcaagtgtttttttccccaaattttcttttaatagataagaaatgatagttttaactttgtaattgttgatttcacttttctaacaggcaaaggaaattttaacaaaagaatcaaatgtgcaagaggttcgttgccctgttactgtctgtggagatgtgcatggtcaatttcatgatcttatggaactctttagaattggtggaaaatcaccggatacaaactacttattcatgggtgactatgtagacagaggatattattcagtggagactgtgactcttcttgtagcattaaaggtatgattattgaaattcaatttttttttcaagatttaaaccaggcaaaaggcaagaatgacagtattgcatatcatctgttttatggtctgttcagtttatagccccttaaaataataattggttttacatctttttaaaggagaggtgaaaaggataacttctgtgtattcccgataaatgtatcattctctcgagtagtccatagctgaagtcttggaatcatatttgactttatcacttatccgttatattgagtcagtagacaagtctttttaaatccttgctttgaaaagtctgttgttcctgtctctttctattttcacacagtttatcacttcacaattcgattgttacaatagcttagtaactaatatttctgcctccaagatctgatcccccccaaatccacctggcatacgctggccgatgaaatctcttatttaacccttttatat

SEQ ID NO: 129406 - DNA, 1021 bp, Homo sapiens
ggagggaggggagagaaagagcgagagaaggggaaagacaagtcgggagaggccggtaggcgtgaggcgggcctgaagcggcagcgggcggccttcgtccggcgagagctaggccgaggacccgcgccgcgctccccggcacctcaccgcgtccttcaccgactcccgcggcgcgcggccgggcggggaagggcgggcgggggtctcctccaggctgcgcgctcggagccgcctgctgggcttgggcggggcgcggggcccgcggccgccctacccggctcagtcctccccctgtgggacctggcgacggcggcggagggagaggggagcggcgcccgggccggggccgggggcgggtggggaggggggagggcggcggccgggctggggctcgggatccgcatcgggatcgggccgccatggacgacaaggcgttcaccaaggagctggaccagtgggtcgagcagctgaacgagtgtaagcagctgaacgagaaccaagtgcggacgctgtgcgagaaggtgagggcgccgcgggggcgagtgcgggagcgcggggctgggacgggccgccgctttcctgcccgccccggtcccgtccgcccctggcccggcgcggcccaccgggggcctgcggggctgtgggtccggctccggcgtccacctaggcggccggcccatcggttcagggcccggggcgttgggctgccctcgcctgccccttccacctccgcctcacgcccccggccggctgcccagatcccgggcgtggggggctcgggtgcggacgggcggggaaacgtagccccctgagccaagcaggaggttggtcggggtcgcctgcgctccactggggagttcctgccactctagcatttcccgagtggactagcgagagcgacgtccgaaaaggaccattttcagaccagtttctgaaaatgcaactaaaattaaccagaatgtcgtgcgtattaatgaacttgttaataaatgcagaatttttgtcaggtgaacggggcacc

SEQ ID NO: 129407 - DNA, 1369 bp, Homo sapiens
acaaaaacgtattagtctgttataacagagagggaagaaatctttggtgggaaggcaggggttacagctggtagtttaccagttatttatagctatttacaagtaatgaagatcatcaggcaggaggcatatgaattaaaaaactatactgaacaattgactagtgatagttttctacttttaaaagcctccattagaaaatgtctaatgcacaaaatagtttattacaatattggaaatatatttaaaatgtagagcatatcatcttcagtaggaaaagtatctaaatccaaaccacggcagtcaaactaggaaaatgttaacttgtatagtgccaatagaatgggaaaacgtaaagcttaagaactcttcccctggataaaaatttcaaatatatatttccattaaaattttatgaccctatatatttaaattcatttttatgtatgtgttgcacctaataggactacaggatctcatcccaaaagcgaaaacaaaatagtaccaagttcatgtgacagtctgaaaagaaatcatttaacgccaaaaaaggttgaaatgcaaagatcactacctggctcacttttacccttagagaacccaaaagacacttgcgcatcaaagtcggaaagcaaaatagacttaactgtttcatctgatcacttcagtggacaacaggaaaatttaaatagcatgaagaaaagaaatgtgaacttcagtgctgctgaaacaaaaagtgataagaaagattgtgctgcttttgcaatttgtgaccaaaaaagtgtacatggcacattttcaccagaccatgggacgcttttgcagaaatttcttaaaaattccccagatcccacccaaaaatcctgcctttctgatataaacccagaaactgatgtttctcttgtgcctgatgcgtcggtgctctcaaagccaattttctgttttgtgaaagatgtccatcctgatctagaaatgaatgacacagtctttgaacttcaagataatgatatagtaaattcatctattaaaaattcctcatgcatgacttctccagaacccatctgtatccagaacaaaattcctactctgcagataaacaaactacagcctacagaaactgagtcagaggacaaatacatgaaggatacattgaatcccaatactgtgcatacttttggagcatctgggcatataacccttaatgtgaatcaaggagcagagtactctctttctgaacaacagaatgacaaaaattcaaaagtcctaatgcagaatgctgccacatattggaatgaacttccacagtctgcatgtaacccaacatataattcttctgagcatttatttggaacttcatatccatactctg

SEQ ID NO: 129408 - DNA, 1077 bp, Homo sapiens
tgaaagaaagcaagaatgttcagttgaacaaatcctgatttcaagagaactgttggtagaccaaaacctgtggaataattgcaaacacacattaaaaccatgtgctgttgacactttggtagaacttcaaatgatgatggaaacaattcaattcattgaaaacaaaaaaaggcacttagaaggtgaaccaacattgcgaagcttgctttggtatgatgaaacactgtatgctgagcttcttggaaaaccacgtggatttcaacagcagtctaatttctatcctggtttccaaggaagattaaaatataatgcattctgtgagttacagacttaccatgatcaattagttgaattgcttgaagaaacaaaaagggaaaagaattcatactatgtattcttaaagtacaaacgacaggttaatgaatgtgaagccataatggagcattgttccgattgctttgatttttctctttctgttccatttacctgtggagttaactttggagatagtttagaagacctggaaatcttaagaaaaagtactttaaagttgatcaatgtatgtggggactctcctaaagttcattcgtatccaggaaaacaggaccatctgtggattatcatagaaatgatctcctcaaaggttaattttattaagaacaacgaggcagtacgtgttaaaatatctctttatggtctggaacatatcttttttgatgctgcaaaaaatcttgtttggaaagagagaacacaatccttcagcaaaaaatactcacaaaagaaggacgaagaaaggctactcagagtgaataaatgtgccttttctaagttgcagaagatatatgatactttgtctaaagatttaaacaatgaaccaatttcccctattgggcttgaggaggatactataattgcttccagaaagtcagatcatccaataaacgaagcaacaattagcatagaaaattctaaatttaacagtaatttgcttgcacacccagatatttgttgtattagtgagatattggatcaggctgaatttgcagaccttaaaaaattacaggatctcaccttgag

SEQ ID NO: 129409 - DNA, 1923 bp, Homo sapiens
gaacagagtagtactgcaggcttaaatgaggttttgcaatttgagaagagttcagataatgttaattcagaaataaaatcgacaccatctaattctgcctcctcctcagaagttgtccctggtgattgtgctgttcttactaatggtttggataccccttgctttaaaacttctgttaatgattcacaatcttgggctcacaacatgggctctgaggactatgactgtatacctcccaataaagttaccatggcagggcaatgtaaggaccaaggtaatttttccttcccaatttctgtgtcaaatgtagtgtcagaggttgagaaccaaaaccacagtgaggagaaggctcagagagcccaacaggagtccggtaatgcttatacaaaagagtacagtagtcacatttttcaggactcgcagtcttctgatttaaaaacaatttatcagactggttgccaaacgtctacagtttttccactcaaaaagaaagtaagcattgatgaataccttcaaaatactggaaagatgaaaaacttcgctgacctggaagacagttccaaacatgaagaaaagcaaacttcatggaaagaaattgataatgatttcactaatgaaacaaaaatcagtccaatagataattacattgttttgcaccaagaatacaaagagagtgagagtcataattcttttgggaaaagctgtgataaaatattaattactcaagagttagaaataacaaaatcttctacatctaccataaaggataaggatgaactagatcatctagcattggaatggcaaattactccaagttttgagagcctgtcacaaaagcatcctcagcactctgtggagtatgagggtaacattcatacaagtttagccattgctcaaaagctaatggaactgaaattggggaaaataaatcaaaattatgctagcattataactgaagctttcccgaaaccaaaagacataccccaggccaaagaaatgttcattgatacagttatttcatcttataacatagaaacagctcatgacagttcaaattgcagcataactagagaacatatatgtgtccataggaaaaatgaaaatgaaccagtgtcattagagaacattcagagagactataaagaaactgcttatgttgaagataggggtcaggatcacaatctgttctgtaattcacagttaagcaatgatatatggctgaatgttaatttcaaaaaacaaacagatagagaaaaccaaaatgaggctaaagagaatagtgcttcatgtgtagaaaacaacatagagaacatatatggagacaaaaagcaggattctcatacaaacgaaaatttcagcaatatagatgaaaaggaggacaaaaattaccacaatatagaaattttgagttctgaagaattttctactaaatttaacttgatttgcagagaagataatgcagtgtcagcagcaactgcattattagagagtgaagaagataccattagtgccgtgaaacaaaaagatactgaaaatactggaagaagtgtagagcatttggcttccacgacatttcccaaaactgcaagttcttcagtgtgtgtagcctcaaatgctgcaatacagatagctagtgctactatgcctgcattaagcctaaataatgacgatcaccagatataccagtttaaagaaacttgttcttctgaaagtccagattttggtttgttagtaaaacatagggtttctgattgtgaaattgatacggataaaaataaatcacaagaatcatttcatcaatcaataaatgagaacttagttcttcagagcattgaattggaaagtgaaattgaaatagaattagaagattgtgatgatgcttttatatttcaacaagatacacatagccatgaaaacatgctt

SEQ ID NO: 129410 - DNA, 1192 bp, Homo sapiens
gtattgtgtactgtacataatcatacatgctatacttttatatgactggcagtgcaccaccatcaccacagacatgaaagtgatgcattatgctatgacactgtgagacctaagctatcactaggcaataggaatttttcagctccattataatcttacgggaccaccattgtatttttggtttgtcgttaacaaaaatgtctactatggcacatgactgtattttaaatgcaatctgggggtagaaattgatagtttcaagttgaaatccactatatgaagttcattatagattgagggccttggatggtgggaaggtcccagaggcttgttgccaagagacagacattcttactctcacccattgtctgaacaagatctcctgctatagttactagcctttggaattttgagagcaaggaatcccagctacttctttacagaaggatatacttgtgctaaggacaagttaatactgacaattgttagcattctttactttttagaatttaattgtattttttcctccaccattgtattttgggtttagataatttaaacctagccgtaagtcacctaaaggaacgttggttatttagatctatatccagatctattggaaatgaaggcatttcatccatgtgatcatcatggatctggagttggatgtagtaattcagtgagactttgggttgttccctccttgtgaggtggattgaaagtgctttgtgtgaatgagcgtttttgaaagtatatgtgttagaagaagggtatgtgtgaaaaagcgtagccaaatgagtagactgcagttttcctaacaattctagatcatcttttataattagcctaaccattttttgtccaattccccttgctttatgagtttattgatgtacaagcctagtcgttatttttaaacaaccatagcataagacttgcttggaaatcctgggaaggtgaagtctgtttctcttctggtggctgtgagcaaggaagcctcgttgctaccagctttcttcttgtgaccatcatgggagctggatgtggataaagataaagctgtgcacagcagagggagagttgtggggaaaaacaagttcttcgtatcattgaggggccaagttcagaatctgtgtgtggtaagcagcataatgcttccccaaagatgtccacatcctactccccagaacct

SEQ ID NO: 129411 - DNA, 1096 bp, Homo sapiens
tattgagatagagtcttgctgtgtcgcccaggctggagtgcagtggagtgatctcagctcactgcaacctccgcctcccgggttcaagctgttctcgtgcctcagcctcccaagtagctggaattacaggtatgtgccaccacacccagctaatttttttgtatttttagtagagacggagtttcaccatgttggccaggctggtctcaaactcctagcctcaagtgatctgcccacctcagcctctcaaagtgctgggattacaggtgtgagtcaccatgcccagctgatatttttcatattatataaaaaccaaagttgtaaactcattttcttttttgggcaactggcaaattgagatggaaactttctgacagttgactaagaacattttaccatttacttttgttgaagaacttttaaatgattgtactgccattgccttttatgtatttattgacctttttgcttaataaccttgggttgattttaggccaacaaaatggaaatgaaagaaactgctaaacaggatacactgtggcaaatgagctcaactagcaaacccgtgttgaatactcgtgaagtcaatcctttgaagaaattcaccattcctaagatcaggaggacagctgagaaaggtaatatttctgtggttgggaatttttttagtaactattactgtatttctctgattcttagtttatgttcatcttttattttgactctatataaaattaggttaattcaggtctctaattccttaaacatacatgtacttatgtttccactcaaaatagaatagatgcacgttctgcatccttcccactaagtacacctaaaaaccctggacatttttatgaaacaaatatgaaaagactttcgaaactggagagaagaccaaccaactagggaatgtgagactcagggaatggcatagcagtaagttccctcaattttctttttgtttcctccatatctcagactagatgcccccaacacagaaatgccagctggcacagacctcccccaaaagccccaagaaaaacctcttctttcttgccagtgaactaagaaaagggcagcctagaaagttgga

SEQ ID NO: 129412 - DNA, 1013 bp, Homo sapiens
tcaccgaccaccgcacccgacagaatgagtctggtaaaaatcttcatgctttagatccctgaaacttggatgtacttgttagctccaagctgaagccttagctaagggatttggccattagctgagcaacataaagtcctccccgatcttctaactccttttgaattaaattagaaagccatgacaaaacgatcgttttgttgaaggcccactccgtgtacacggagtaggcactgaacacacagtttgcttcaggacatggaaagtctctcaggagtccgttcctgcgcgggccccacctacgggcttcgagcttccacgtgcagggcctctggctccgcccccggcgcagtgcgcaagcgccgctgctttccgagctgcctgctcactgtgcgcacctcgctggggggtgctgctgtgttcctgaggcttccagggaaggcagtgggcgaaggtctgtaccgtgctaagattgagtctgaggaactgactgagcaaagaagacagctcaaggtttgtggggaatgtggcagatgaggagaggagggttagcagctagtttggtgtgaggtaaattaaaattaaggagtgaagaatgttaattatggggagtctcagacgctactcttctggctcggagcttcccgattaaatttatttttaaaaataataaattttttaaaaatgttaattatcattgattcagggactctggggccaaaggtgggcctccgagggccagggcagccgactctacaggtgaaatgtttagctttcctcagatgcgcgggttcccgcgctttcgctctccctctgcccccgctgagccccacggagctggccctgcgtccttgtttgcagctgaggagaaactcgctgctctgaggcagcgagaggagagagcgccacaacttggtggtggcctccgcctcgccctggctccctggaggcgcagtttgtagtcagcagaaggcagcgcggagcagccgcgttgcgcagggcgcgtggggatc

SEQ ID NO: 129413 - DNA, 1059 bp, Homo sapiens
atcactgacaatctaataaacttgtttatatgtgtgattagtttggattcttaattattttaaggaaagcatctcagctctattgggccccaaaagttgattttgtgtttatttcattatgtcatttgtgcccccaaattcgtggtatctttataaatttcaatgcagtttgtctggcttccaaaatcatgtttaggtaggatctatagaaactagacctatcagaactggaaataagtaagttgagaagatcaaaaatgtgccaatccagtctattacagtgcctttattgtaatttattaataaggttttatcacctggttgagccgggagataacacttgcacgaaagcaagtatgccttcaaaacctttattgcaactcacatgacattgaaaaggccatttctatatgctgatattaaaagttccacttctcatatatgaaaatagggacaaaaaaattaattttgaattttccaggacaaactgacatcatatgccagaatgtcatagtagataaactcatgacaatggttttattggatttttatcttctgcatctatattaaatcacaacagaaggccaagtgaacctgctaatatcttcatgagggcagagggctgtttcttccaagccagggataaattcaatataaaggcactatgtaaatttgcattccgaccttggtactttgcctaactcaagggtaatgttaaaatttgaaaagaaaaaatcgaaacaaatgtattaaatctccttgagcaacaatcattgaccataaatagaagatgatcaaacctatcaatcagtcaaagaatctagcaggtatgatgactgaaatgatattcccataccactatggttctttattatataaagagtttcaggcccagtaaatttttgcctcaaatagctattaaattgtgtctaacttctaacatcagaaaatgaagtttagagaatagtgccagtgtgaaccctaagcttgcttctgtgactatctgaaataaatgcaatatttactaaatcacagcctctcaccaaagatatttctaca

SEQ ID NO: 129414 - DNA, 1881 bp, Homo sapiens
agtatttctccaatatttaaatgctgaaactatccaagactattattcacaaacaacggattatattttaatactcagaaactgtaggaaggtttgttaaataagatgaatatcctgtgattaacttgccagtatgttgggttcagtgatttattatgcctggtcttttctgattttagttaatgtttttaaagtttgttaattctctcagaagatgaggatgccaatttatatcccattatacaccctcaaaagatgaatttatagaatgggccatgtctttaacatgcttctatatagtcattcttatacctaagattcagatgctcaaggaagggacccatttagacagttatttaatgttctttgactatgaactaatcctaattttaattttagtacttttatgttcttaccagctttcaccctaattaaatggggcactacaccgcagagtttagcctgtggtgtagcagagcccaggtcatctgtcacagagaatcgtaatcttacattctctctctcctctgaacaatagaattttgaggtgggggagaatcttagtttataatgaggcaactctagttttatcacactcagaaacaacaaaaatattcaaaatttaactttctgtgcattccatttatttgcaaatatatatcagtatgattattacatgagtaagagatcttcattttttactgtcatccctgatttgccaaatttgatggagaacctccacagagttgcatattattttatttgttccacatgttggtgctttgttctctactgtccttttgtcattatattatctctgaacatttccatttagtgtttctatttagagtaaagaaatagaagcatgaaaattaataacccatgcatcatattttttgctggactttataggaatgaccagctaaggctagaaacctcagtgtttaatactgttttcaaaatttgattgttacatatattgtcatttcagtgactggagacaagatgtatatgtagacaaatagataaaaacagggtaattaaaccagtgtggtttttttttattttaaaggaaaacacatacgacttatgtacattgcatggcagagtattactaaaattcgcctaaacaaaccgtcacgatgttttcaggttttatggtaatgctttgactatatagtatttggatttgaatcctcataatcacaaagtctcttagttgtttaaaacaaaaaacaaagactatactgattctagaaagtatcatctccttgattatatttgtgctaagtgtatgaatctgtgctataccagtatgaaaaaggtaaaactgtatatatatttacattttgaaaagtagcattgtgcattttagaaaaatatttgtcaacttgtggcactttggcaaaggaatgtgcaattataaaggttaatgccactttatttttttctaattcccagtaattattcttactaggctttagagtcaaaatcaaacccaattttaagactagcacttttttcctactggtaattcctgtttttctaattacacaaaatgtttaacttaaactattctttgcaatgagttttagctttcctcctctatcctaatttcaaaacctttaatttaagaaccatttaaaattaatccagtggtaaccagaagaatattttaggtatcatgaccacttaatcttgtgcctgattttagtaattttctgataaaaataactgaattcctgaaaaagaatattcaaactttttaattagttttcattggtcataaataattgagtagttgatgtccatatagtcataatttatctaaactctggagctgccaagacaactaagtacacagaagtgcttaaaacacac

SEQ ID NO: 129415 - DNA, 1048 bp, Homo sapiens
tttgcctgaaggtgtctttgggggtaatatgacaccctcattttacaagagataggaaaaatatttgtatgactttgacatcatttaactagtctttcagaacttgaactatattaagtggtacttccactgttcagtgtctgtttttcttattacactgattttgcttcagaatcagtgagattatatagacgtcattcagaatatttgtttttatccttcaactcgaagagttttctcacctctttattttcaagttgaaaacattattataagagtatgttagcgggtcatttgactctgaaaaaaatagctttttaaaggttgatcacactttaatcttcaatttcaggatagtaaagaaccattataatttaggccccagtgactgtcataaaacagcttttaccagaccaccatcttaatactgatattttcctctttcatatttgaactatatttttttctataatctagctcttagaactctattttcctttgatactaatgattcctcttgccctcagaaatgtttacatgaaacagcacatgactgtcctttttgttgatcccaaaactttttattgttcattctagagaggcaaataatgtccttcagtgtcactaattgagtttttaaaaggaagatttgatagctaagaatctgttgtcttgtatcaatttatcatttttacaattgggtcaagatatatttatgcaatttttatgttaatagcataatagcagtagcaatataatgtgtggcttgggagtttcagagctttttaaaaaaaactaagtatgtgcctatgcttttcctttttaaccatattgaatgtgtaatgttgagttagaagacactgtgtgaggtaagaaatggcagttcaaggggaacaagaacattcgtttattcagtcaacaaatatggattgagttcctcccataggcccagcattgtactagggaaattgctcactatttttatttttcccctctaacctaaggtggagatgataatgaatagtaaaattacatgttttagatgtct

SEQ ID NO: 129416 - DNA, 1667 bp, Homo sapiens
tcagaacttaacctcccctcaattttcagcttctaacctaagctggacactaatattttgccagtaggaaccttttattttttgagacagtttcgctcttgttgcccaggctggagtgcagtggcgcgacctcggctcactgcaacctccgcctcctgggttcaagtgattctcctgcttcagcctcctgaataactgggattacaggcgcccgccaccatgcctggctaattttgtgtttttagtagagacggaagtttcaccatgttggccgggctagtctcgaactcctgcctcaggtaatcctcctgcctcgtgcttccaaagtgctgggattacaggcatgagccgccgcgcccggccaggaacctttatatggtacaatgaattccagcctgaaaattccccaagttctgagcctttacttcatacatatttaccaaatatatcaattattatattaaacttagaatgaagaatgactgtaagatttataatgactaaagttagtttgcattatttttcttcaagcgttattaaaccgtactcctctttaagcaagtttttgggtcactaggtaactatgtgatttggtttgttgatcaccatttattgtttgactcactttttcaaaggcccaaatattatatttaatgacataccaagctctaattcaagcagtgccctctgttaaggtgatttgcatctgacttgaagcatattaaataaaatctacattttatttgatgcaaatgttttatatttatataaaaaattaatcttgggtaaacacaacttgattcttaaattagattcttaataactcaattctaaatgattacttattaaatttgtcacaaaataactataaagtgaacgtgaatgctacattactcagtatatctatgctataattaataaactccaaaaattagttgtgtattatttggactactatttcaatcattcagaaatttgttttaaaaaatccttgcagtcttgctgctgacttcatagcgtgcagtagtgtgatatggagatgatgcactgtctttcagaagccttggctctatgccttctagctgggcctggggcaagtcatttagcctctgtggaccccagcttgcttatccataaattgagggaattggatcagagtgatgatctctaagaaccccttcaatttctgtatccctgaagtcagtgaaacttctcttaaagttagtttctactttcttctttggccttttctcattttcttcccactccccttggtttcgtctctcatctgacatttattgaccatcctttccttcttggcatggttcatatttagttatggccactttacagtgttgcagtatgctgcttctctgcctaatttgcccagttcccatttttaccctgccattttaattttacatataaattatcttggaactaacacaaaaactagttgatcatgatatattatatatataatcaataagacttatcttttggccctgtacacaaaagttttaaagaggcaattcttccagttccaagagatttttttagacacacaacctaaaacttgttggagtatattttaaacttaagtttcccatttgaaaaatcctaactccttaacttgcatttaagtttaaaagcagagacagtttctt

SEQ ID NO: 129417 - DNA, 1085 bp, Homo sapiens
cccggccagggctcactttaaacacagagaggctaaatgcataaatccaggtgtttaagattttgtatgctatcatattggccagctttctgggcagtgattactggaaatgccagtttctcacccgcctcctaaactcaagttctgtctgtctggtcttacttgacatcagtccactggtttcatactccctggatttcacaaccaaacattcagagtcttcagagccaagcgactggtctttcagtctcaaaagttgaccctttacgtctcaaatgacatttctcaacctcttttttttttaaaatatatatgcagtataaacctatcatttatcaggagtagaaaaaaattgccttagtcaatctagttaatctttgaatgcctcacttctggtggtggtgtgtttgtttgtttgtgtgtttgttttcaattgtggttaaaaaaatgcatagcataaaatttaccatcttaagcatttctaagtgttcagtaatgttgtgttcagtagcgttaagtatattcaccttgtcatgcaaccaatctccagaacttttttgtcctgcaaaactgaaaagctatatccattgaacaactccccatcttcctttcccccgcaagcctggcaactaccattacactttcttctcaaccttttctttaaaataagcaatatgttttcttaacctttctcccatccataatgggtttacagttattgctatttagctctccaagtataaagcttatctcctgtattgttagaattctcacatgcaaaaagatttacaattacaaagcaattgtgctaataagatatgcttataatctttgagtgaaggtattttatcctggaagcttttccactgatttacagggggaggtaagcctttattcctcttgagacctatggatctcactttatgcttcctggctggtttggtattttatttgtttgttgaaggtttaagtttagagttaccagggcaattaggcttaaatcctagaatttccttggctttttcctgtctacattctaagactgttttaccataacactttataacgtaagtagtagattggaa

SEQ ID NO: 129418 - DNA, 1077 bp, Homo sapiens
cttagtttcaaaataaatcttatcaatatttttggaagttttattgatttcttacaactttttcctgccatcttattgatgtctcacaacttttcctgccatactcctccctatatcattccactcattttcatatttaattaccaaatttcctcctctttctcttaattccagtacaataaacagataattctccatttacagatacatatttttccccattactatagggcactaattttcaaacttcagtgtgaatacaaatcatcttgatggtttgttaaaccacagattgctggccccagctcagagtttctgttcagtaggactggtgaggtggggagaagaccaagaatatgcatttctaacagtcctaaggagagtggatgctgtgatctagggggaccgcactttaagaaccacactgctgtcagctgatgagattttaccttagctacagaagatagtgatggaaaaactcggtcaaaacaactagggtatctgggtagaaagaagactgagagctactccttcttctgccttgacaagcttacaaatcttgaaacaagcaactttttaataagttgaccagagttttgtaaaaaattattttcttcccttttgaataacctttctgattccctctcatttttcaacagctatcttgagagaaatctgataggaattaacagttatgaagcctcatgtgaaaagcttagcttttaaatatatggagactgatgcatatttttaatttattttgtaattatagtatataaatcttggtaaagaaaagtgaacaatttctctacctaagaattattaatacaagtttaatgactattaaatattaggacttaaaagaccttggaattaatttaatcccttagttttccattttgtgacatacatcatgtagctcaaattgttcatagttactagaatacgctaagtaaacagaatttaaaggctagagcttaaattgctgattatctcaagatatataaatggtgagaaatatactaatttcttctaaaagcatatcgcatttttaccatcttcctgtatcctctctgt

SEQ ID NO: 129419 - DNA, 1092 bp, Homo sapiens
cccttgccattttgtagaaactttcctcagcttcccatcagatattctaagcaactttaccaaaagaagtcacctacgtgccaaaactgccgagcaaaataaaacaacagagccatagaaaatgatgtaggagtaaggataaagatatatacagacacccaaattcacaacattccttatcatttgctaatttacttcagagactgttgtattttatttcttggttcttcaaactagcaatgtggtttattccaatgatttgtcagtctagaatgtcaatagaacaaaatcttttgctgcttagtaaatgttccaaaaagggtatctcatgttataatcagttgtaaaaatagaattctaaaattccattcattataatcctctttccttcttccctcctgtacactgtaccctattggaagtgggtaagggcattaatttctttcactatcacatggacccactccatcctatttatttgttcagaagacaattgaaacataatagagaccagagctgctctttgaaaatctagaaattgccctgtgagcttgatctatagactgtaagaaagaagggttactacttcactgaactgttctccacgctcttgccagatttctatatgacagtttaggatgaatagaaaacagatttgacttgggatgacatgaactgaaaggtcagttcctccagcttttcaatacacagtgcatcttcagaaaatatttttgacgagcatgattgacaggtaatttcagaaatgaatttaggctgggtgtggtggctcatgcctgtaatcccagcactttgggaggccaaggcgggcggatcacttaagttcaggagttcaagaccagcctgaccaacatggttaaactccgtctctactaaaaataccaaaattagccaggcatggtggcacgctcctgtaatcccagctagtcagaaggctgaggcaggagaatcgcttgaacctaggaggcggaggttgcagtgagctgagatggcaccactgcactcctgcctgggcaacggagtgagacgccatctcaaaaaaaaaaaaaaaaagaaagaaatgaatttggtccc

SEQ ID NO: 129420 - DNA, 2573 bp, Homo sapiens
acttttttttaacttagatatcatacttgagctagttaacatatcacttaatttgaaatatattaactataccaaggaaatatcaaggaaattttgaatgaatcccattggtatttacttaaagtgcaaatatatgtgtattttaaatatacaaatattcagttcatcctactagtttcctttctctcttcctagccatcttgccttcctgtattcccctcacaaatatattggtctttttcctgaagtagtgcacttcaggagtgccaggatattaaataatttaaccaagtgttatcttaaaccgtattccctaatgaaaaacacccatatttaaaagctttaataaagtatcacgttcagtcaatttttactaattctgttactattatctttatccaaagaccttgcccttataagagcaaatgagtattagaactatagtaaaaaggtatatttctgttgaaatactttattagcatgaagcctttatctttatgagaaaggtataatgttcatttagcaacctcatcaaatccaagtttaagcaaataggtaactctagacccgattgtttaaagcattgatttttcactgaaggaccaagagtctgtcagtagtcttgggaccaaaggcagtgggatgatttggggaatgagtaaaaactggagtgctgtgaggttacaagtacagctaaactgtctctctggtggaagaatataaaatggtcaatataattttttaatgaagttagcattattactagtcctataaacataaacaaagctgccttaatagttttgtgagcacccgtccccaaaaatcataattctcttttcattcccatcaagagtgcattttgatatgacttttctattgaccaccaagaaaaaattatctgaaaaatgaaagatcccatacttgagtcctgaaagatgctatctaattatgaattaaagcaaccagagtaaaagatccaatacaattgtaaatatctttaaaaatgtgggttgaggaagaagaattttttcatggattggtatccgtgaattttatgaacatgtcataaggtttaaaaatttaaagcattgctttaaactttagaataataactctatatttggtagcataatgtcctgtttacaaaatgaaagaggtgttgttaaaagataagatcctcttaaacatattttaaaagcataaaagtttgctccctttattttcatgctgaataattcattataaaattcattaaaaattcatctttaggaatgaattttgcttaaatttaggctaaagcatattaataatttcccatccttaattgaagagcttcccatgttggtgctttctggtaaattatatttttcaaactttatgttcttttgaatatttcttatgaaaaattacatatttttattgaggccagtgacatccaccagtaaataaaaacataatgaattagtgctgctatagtgaagttactttgtgatatgaatatgaagaaaaaaactcatttaaatggaatatatactttcctgtttaatattgtttacttatttctgattaagtagcagttctctgtcttcacattttaccctcttaaacttaatttttgcaaaaaatttttctattcggttttcattttcctagggaaagggaaaaattgtccctgatgaaaagtgtttatagtatttaaaagagttgctcaaagtgtaagactggggaaaaaaagcttatgttgttttttttgtctttatcaaaataatggtataaatctgattatcttacttgatctgattaaagtcaggattacttttatcagaaacttttatattcaaaacatatttagtattttatttttcttaaagaaaatggttctcttggataatacagaaatcttcaggattttgttgtggattcaatgaggttgttgcctagaggtggcaaacagaaaagaaaaaatagaaaagagaaagacagtggctgattattttgcttgtctgtaacgaaattcatctaagagaaataagtcattctcaaaactcaacctctgtttaacctttaaaagagcatttgagaaagaataataagacgtaattctgccaaggtgcggcctgaccctgagtaaatcattcaacttctgttggatgatttcctcatgtgaaagatgaacagtattgtgctggaagctaaggttccctcctactctaaatgtttaaaattctgtatcagtggactgtgaaaggaaaaatagatggataataccagagttggaaagtgtgagagtttatctgtttacattaaaaacaactataatgatgcagcaacctgtgatgatacccaacggaacaatgcaaaaaaatgtcagttttataatatgtatgtatttctttagccacacaaaataaaattttgtttctagtccttattaagaccaagttgttgtatactaactacgtaactatcctaaactttaattttttaaaaggaatatttttaaatattgattatttcccatctccttattatatcaaatatctcattatttggaaggagcattgcttttttct

SEQ ID NO: 129421 - DNA, 1045 bp, Homo sapiens
ctgatgatgtttgcacctaataatccaagcataatgtggtacaggctcaaactgtagtaatataagctaatagtatgaaatttggaaacgggttcctcttgatagttggcagtgtgctcctagcaatcgaaagcagcactaatctgttgctttatgcaaaagatgcaatgtattataaagatattaaagttcctctacattttataattttccttgttaaagccccagactgccatgtccctgaaacttgagtcaaacacaagcttatttgcactaaagagcatggccaaaaaaataaatgacagggtggaaaagctagttggaacctcttgaaataattggttctaatatgagaatttcacatttgtctatttgaaagctgtatggtccaggcagacaatctgtcagttcactaatttaataatgcactttaccttttgtatatagaagatgtacatttatgccacttgacaggtgggatgtgtttcaataactatgtagctagaatctataaggtgatcccgtgcatgcatatgtttgtgttggaactgttgttgtaacaggtttccattaaatcagtgtaatggagaagggtagaagatgcttttgaaacaaatcccagtatatttaacaaagaattttaaagtagagttcacatttgatgtcttaagaactagaataaataaaatactatttctaacccaaattcttattacagttgagactatatttagttgagattccccacagtgccctgacagttaatttggggaatttgtctagacaaaatttttttcaatcattgtttcattgttgatatgtgtttaagtaatgaataaatatgcagtacataatattatactcaaattaaaagtgtggttagctgatgtggcattatttaaagaacattcagactaaagaagtaaggtttcaagttaaggaaatgcaaggaacctatgaacagtcactaacacaaatatgatatctcagaattcacagaagtactaaccttccccaactaaaaagggtattgggggatttagtg

SEQ ID NO: 129422 - DNA, 1033 bp, Homo sapiens
tattcagctatattttcttctgaatgaaattattgtcttttatcttggctttattcacctcccacacaataagtccatctaatcatatttaagagccagaacactgatttcaacccccaaatatcactctcattgatgagagctggctgcatggattcaaatcagaatgtagctcttcttttatatgctaaaagtaatttaaaattatatcagcgatttttttcttccagagttttgtcccccaatacctttacgtgaggtcactaagaaaacttgatggtatgaattaaaaaaattaatttcattggtttatgttacttaagaacaagcaatcagtaaccccgacatatatactagtgttggtttgcagattgtatttcacatttcctctagtagcgtgaaggaatctcattagttcattataattgtggaccatctggatcactatggaacaactgaaggttaggagataatgttagtactagagctaatagcacatggtgggtgttgagactctaaaagtagcaaggatttttaaacagtcctaactgtaaaataactatgtaggcttgctaaaaaagtagtttttggtctatgaaggaatgatgtgcacttgaattactgtactactgattgttattgctgcccatcatagtgcctattaataataatcaacctgtcagattttggcaaactggagctgtgaatattctagtatttgattgttcctatcgctattgctatgagtgtatacactctcttaaagtcttcctttctaaaatatttatatccattaggtctaaatgatttccttttaccttttgggtctgataagatttgggtatgtgtctatatctatatatatacacacagacatatgtatatacatgtatacatatatatgtgtgtatacatacatacaataccatgtcagacttaaagataaatatctttaactcattgtatataaacattattaaatttagttttccattaattatttaagtaaagaattagttaagcagccagattt

SEQ ID NO: 129423 - DNA, 1855 bp, Homo sapiens
gcggagcgcgggacgggcggcggcggcgtgcgggagcggccccgggggcggcggagggatgcggggagcgcgggcagagccggagcggcggccgccaaccggccggcagtggctggagccccgcgctgcggcgccgggggagccgggcccggcgtgggggtcgcgggcggcggcggggcggtcaggccgaggggcgtctgcgattgttctcaacacccctcccccaccccatcccgtgtgtctgtttgttacttgcagctgaagatggaaagagccaggcgaaggggaggcggcggcggccgcggccgcggaggcaagaatgtagggggctctggcctaagcaagagtagactctatccccaggcccagcactcccactacccccactacgcggcctcagccacccctaatcaggccgggggcgcagccgaaatccaggagctggcctccaaacgagtggacatccagaaaaagaggttttacctagacgtgaagcaaagctcccggggccgcttcctaaagatagccgaagtctggatagggagaggccggcaggacaacatcagaaagagtaaactgaccctctccctgtctgtggcagcggagctgaaggactgtctaggggacttcatcgagcactatgcccacctgggcctgaaaggccaccggcaagagcatggccacagcaaagagcaaggctccagaaggaggcagaagcactcggcaccctccccaccagtctcggtggggtccgaagagcatcctcacagtgtcctgaaaacagactatatcgagagggacaataggaaatattacctagacctaaaggaaaatcagcggggtcgcttcctacggattagacaaaccatgatgcgggggactggcatgataggttattttggccacagtttgggccaagaacagactattgtcctcccagcacaaggaatgattgagtttcgtgatgccttggttcagctgattgaagactatggcgaaggagacatagaagaacgaagaggtggagacgatgacccgcttgaactcccagaggggacttctttcagagtggacaataaaaggttctactttgatgtgggctctaataaatatggaattttcctgaaggtaagtgaggtgagaccaccttaccgtaatactattactgttccattcaaagcttggacaaggtttggggagaattttatcaagtatgaagaagagatgaggaaaatttgcaacagccataaagaaaagagaatggatggcagaaaggccagtggtgaagaacaagaatgcctcgactagagtgaaattgaactccatcaggcaaaatttaaaatcacaaattggctaaaagtactgatccattatcctttgaagaagtttttcctcttttttggcccgttgttattagtaatacctctagtagttgatacttcaggaagtctgattctcatgttatgttacacatagatcactataattcttacgggaattccaaccttcccagagctaaatagtttagctgcttcaactgctccagactattgaagtatgcaaatcagcacaaaatgtgacattctgacattctaaataccataactaagatttacattgcactatgacataatcccgaaaaaagatacatatacttaaatagaagtgtgactttcccccaaaagtatttcaattctacttcattaaaagctgctaagcttacctgtagggcagttaccacagaaacagaaattgacctccggtatatataaatatttacttataaaagtacaagtagacgtatattgtccgttgaataactgaatataccatcaaaggatcaaatcttattacc

SEQ ID NO: 129424 - DNA, 1028 bp, Homo sapiens
cggagctgatgtgtactgtgtgcgccggggaggcgccggcttgtactcggcagcgcgggaataaagtttgctgatttggtgtctagcctggatgcctgggttgcaggccctgcttgtggtggcgctccacagtcatccggctgaagaagacctgttggactggatcttctcggggtaaagtgtcttcctattcccgttttcccagctccgtgccccggggtatctatagtgctaggcttctgagacacgtggaggcgcttaggcccgcggagcaggcccctgggctgtgtttgggagattctggaaaaacagactttctcccttttcctttcccctctggagcagctgggaaaggcgtctctcggagcttccgccattcagaaagtgtttccccgcccctgacggccccagcttgatgtttaccttgcgcgcttagttaggattgctctttctagtacggcctttattatggcagaaattgagccactacaggtctgcacagcaaagtcgagggaaataacctgctgtctatgatttagcaagtgatgatggatatttttgagttcaaatcactcagtctttaatggattttcttttctttttttcctagttgaatctcagttgttctcaggctaggtttgatatgaaaaatactactccctattgaagagggtaatataattcttaggatgctaatacaggagtctgtaagtcggagtacttcaggctttttatggttcggtacatttctttttaggggtgggatattgggataagtaggacagttcagatcttgatgtcattgaatagtggtgtctacctaaaaggaagaggctggggcacaaaattataatttaaagtgtttacttcagccaaaatgaggacagctgcccaggactcatttcccagttgccttggggagtgctccttcagccttggttacaagcaggtttttaaaggcgaaggggaagagtgggctgagacaaagttggtcaggaattgttattggtttacagagataccattgc

SEQ ID NO: 129425 - DNA, 1066 bp, Homo sapiens
tcctgagtagctgggactacaggtgtgtgccaccaagcccagctaatttttaatttttttttttgtagagacatgctgtgttgcacaggttggtcttaaactcctagtctcaagcagtcctcctgccttgactttccaaagtgctgggattacaggggtaaaccaccatacctggccatatcttttggatttattggtcatttggattttcttttgggaattacctgttcatatttttctccatttttctgctgaataatttgtcttttcttacttatttttcaagaaattttacatattttctggctgttcattgtcagttgtatgtgctccagataacttgaacagtctgtggttgccttttaatttttgaattatgtctttagttatgcagaagtttaaaattttaacataaattaatttacactatttttctcactttagcatgagtctatcagatggggatgtggtgggatttgacatggagtggccaccattatacaatagagggaaacttggcaaagttgcactaattcagttgtgtgtttctgagagcaaatgttacttgttccacgtttcttccatgtcaggttggtatctctacatttcatttttatatggctgataattgtaatatgtcaactttatccctataaaattaagttcttttattagctggccgttctctcattatctcaaatttatttaagtatttatgttctacctgattcactcacattccttgttttatttaattttcacaacatacctgtgaggcattgacattttttctgttttagagaagagaaaactgaaattttaagaggctaaatgaccaggatatgtactgctattgctagcaggagtggcattcaaactgattattttttcttgtcatttatcaatcaggactgtttgctttagttaagaaatactcaaggtcaatgtgtttctgaatttaaaattactgttaaatacaaatttacacataaacatggtatgtataagaagtaggacataaatccatcatacttgacagaacttatggaaataacaagaaaatgtt

SEQ ID NO: 129426 - DNA, 1032 bp, Homo sapiens
cttagtggaagtttggctatcaattccatcacctgtatttcacatattttattaatgaagttcttaaattaaattctcatatttagccaagtattcatttggctgggaggtagaaagcctactaaccaactttttttcatgaacaatatttttaaagtccaagatttttaatacctacattagggaaattctagaattaaattcttacaatgtggactgcatatgaggcttttagtgacagggaatttgttgaaggctatctgtgggttgtattttggtataacatttcctaattttatttgtggtatgttcatttgatatcatttggtaatacctgaaaacaggaactgattttactgtgttgctttttcatcatttctagctgaaatgcacagagacctggagccttaacagtctggttaaacacctcttaggtaaacagctcctgaaagacaagtctatccgctgtagcaattggagtaaatttcctctcactgaggaccagaaactgtatgcagccactgatgcttatgtacgtgcttaaagatctttagaaattgtgatgtgttttaaaaacattattataaatgactttagaaaaattttattatagtagtggcagaaactctaccaaaatattttatatcaatttggcattgaaaaatgcttaggaagacatttagtgaaactattcattttcgatattaattagcaagtaccaatcaacagattgttcaatgctagtttattttcattgtcatgaagccaaattaatgtctaatttgtatgttaaaaaatgtgaacttgctgaaaacatgaaaggctaataaatccaggctgagcaagcataaatagtactgatgatggatttgatatataaacaattcagaatgaaaataattatagtacagtttctattttaaaactggccttatttcttatatataaaatgtggtgaaattttagaaaaattgcctccaaatttagcttgttgctgccattagatatatttttatatttacatgtttgtat

SEQ ID NO: 129427 - DNA, 1987 bp, Homo sapiens
gttaagggagggagacctgtaagacagcaaagtggaggtggtgcaagaattagttgtgttggctgtagcacagaggacagtttgagttaagagagttgggactgagaatcccgaggaactcttagtgttgaacatttgcgtggaggaggggacaccaaaggagttgccatagacatcgaggaaattaggaggtgtggtgtgcagaaagccaagtgaagaacatgttttaagtaggaggatgctatcaactgttttaaattctgctgagagtttgagaaactgaggacttagaattcatcattagatttggcaatgcgccaatcatttgtaatcttttaaacaatagttttgctgtactgggtagcaaaagagtgatttgaggagtggtcatttggagcatatgctattcaaacagagaagagtccacgggctttggtaacatgaaggtcctataaccatagcaagagaatgaggtgggtggaagtcatattaacgtgaatagaggagtaggttagatctgaggaatgtgggaacagagacagggtctcattatgttgcccagcctggctcagactcgtggcctcaagcgatcctcctgcctcagcctcctgaatacctcgggtttcaggcctctgcatctggcttgaaaacaacattttctcagaagcttgttttagttgttttagaaataacgaaggcatgtgtaaacaactgttctagaagcttagtttggaaagggaacgtttattgatgcatataacacttatatgttgggtgcttatgtgtcaggcactgttagagttgctcgggaaaatttacaaaccaagcaaaccatgccccttcatttcctttgggtgaagtgagggagccatgtggttatctgaaggaagagcttagcaggattagagggaagaaagtgcaaagcctcctagggtgattggctggctcttttggaggaacagtacctataactgaatgaaatgagtgagggtaagagtggcaggaaatgaggctagaaaaggagcttgggccatatcacgtagggcctcgtaggctgtgaatctgacttcatttcttattaatgaaaataaatacgatgatgggtgatgggaaacccatagaggatttggagcagaagaatgatataattaaaattttattttagaaatatttttctggttgtcgtaagaggaaaaatatttagccccagggcattttggcagagagttaggaggctattgtaacagcccaagcaatagacaataattgtttggattaggcgggtagcaatagaggtgatgagaagtcgtagcttctgtaggtatttggaagatatatattgtgaaggatttgctgatgaattccctgtaaggggtgagatgtaaagattcatagaacattaagatattttggtcagatcatctgatcaatggaaaggtcagttatagtggacagattatgagaagaacaggtttgggtgagaaaactttagatttcagtgttggatatcctaagttttagatgattattgatatccaagagatatcaatatttgggatcaatttgggaaatatgatcccaaagttcaaggttgaggttggagatgtaattcagatccgatggtagttaaagcagtgagactgaatgagataaaatagggagtgaatgaaataaagagtaggtgtgatattgacctcaagggcacaccagcatttagaggttgggaagatgaggagagagcagcaaagaggactgggagggccactaatgaaggagggaagtacaggaggtgtttagttctgaagccacctgaagaaaatgtttggaataggaagaagttgtcagttgctttaaatcattcggggaggttgagtgagatgagagtctagaactaacagttaggtttgatggtgtggaggccatcagtaaccttttctttcttttttttttttgagacagagtcttgctcagtcacccaggctggagt

SEQ ID NO: 129428 - DNA, 1055 bp, Homo sapiens
tgacacttttagggttcttttatcacagtttatcaaacacctttttttttttaacaaaaaacaaatttacaaaatctttccatgtattcaacttagaatttaatgaaatagggtttttttttttttggtggtcatgtatcatcaactttctttacatttaattaaattaatcaacaaaaaacatatagttgacataaacaaatttgggaccaagcactactgactcttagtaaacatacaagtcaactgttggtgcagaagtgccttgatgctagagagtagcctgcaagctgtaattatatatgggcattagggaatgaagaacagccttaatactattgatcttttaagtgaaggtcagcttagaaagcttttacttgttaaaaagcttcacagtttgtccttgtagttaatgcaattgaagttgaattaatctttcttaattttttttttagggtttctatcttactaaaggatatttcagaaaatctatattcactgaggaggatgataattgggtctactaacattgagactgaactgaggcccagcaataatttaaacttattatcctttgaagattcaactactgggggagtacaacagaaacaaattagagaacatgaagttttaattcacgttgaagatgaaacatgggacccaacacttgatcatttagctaaacatgatggagaagatgtacttggaaataaagtggaacgaaaagaagatggatttgaagatggagtagaagacaacaaattgaaagagaatatggaaagagcttgtttgatgtcgttagatattacagaacatgaactccaaattttggaacagcagtctcaggaagaatatcttagtgatattgcttataaatctactgaggtactaaataaagaggaagcacatttttagttattagtaggttctggcagactttattcccgtaaagagacagatagtaaatattttaggctttgtgggacatacagtctctgttgcagtaactcagttctgttattgtagtgtgaaagcagccacagacaaatgtaaac

SEQ ID NO: 129429 - DNA, 1958 bp, Homo sapiens
ttctgttatttcagtgtcttgaatattgtcaaatgacatttattagctactactggtactactgaatcttaataatcaatcttcaagccattaactgaccaatggtttcttctatcttaatgtattagtaattattcatttagagtaaaacatctcccagaacatgaaagaatacaaactttattcatgttacgttgtgacaggagactttgttggatgcgcctgattttcctgccaattcacagcttcattaaaacagtaatgctttgaaatatggcttaggaaacttcacaatgatcattaattacacctaatttctggaagagtatatgcatgtatgtgttgcggtattctcccttgctgtggcaggatgtcacaaatttttatccacattacgaaaatttaaaaattgatatggttttttctccctacgttgatatcagatattttgttttatctgacagctggcccaatgtactcctactttgccattataaagaattcaaaagcttcatatttgcattgaaagttctcaaacactttgtaaagatgatgaaagtatgtttcatcatctatgtagaatagtcaggtgttcttgcaattgattacttgctaccgagaattgaatacctactgagtgcataatgtatagaattctagatattcacttttgtgtgtttttacagttgttatataccttagtgtggctctaaaagtggaggtgacagctgtagctcttaatgtcttacactgagtgatgtttagaatcttaaattttcttttataattttagaaaaaagtatacttttctttcttatttttataaccagatccaaacacatttgcatgtagataggcatttttagtcttgaacattcatttttacttttaatcctcacttttattagtttcgtatctttttgtatttcatttcccctttcaagatgccttgagtcctttctttttaggaatgatgttgtgaataaattatttgataaaatgtctttacacctgagagtttataaggatagtttgaaaatcatgtctgtaaaataggttgatctcacctaaaaataataccatataattaaaattagaattattattgtgttgcttattgactcttacatatatcaaaaaattgctgagtcttattcagccagagcttttacttagtatgatattcattcctatatttacttttttctcacctttctcatactttcttttacttactcagcattttcctcctttcctccctcctttcttttcttctttccttcttttctcttcctttcgtattcctggtccatcttagcatgtaatctttctttatgaaatggcatgcagataggtctactgttcttacagtaaaaaacttcaaggcctcatgtctttcccacttctgtttcccattcacaacctttttagctgattcttttggtactttaccactatatcttgccatagtttatgtacctggctcctacttaattttttgtttatttgtgtattagtcgtaggcattatttatcgactcttctctctgaaagatgaaaggttagctctctttcacattcttaactgcccttttttcttaccttgtccatgtatttctaaccccctttcctcctaatatgtttatgtcataattttggctagattagtgtatacgatttacataattattactctgtaaatgctttttatgatctctgagccatgtagtatattatggctatttttctttcttatctatttgtatttttattgttattacctaaaaaaaaattttctatgtcttatcactaattcttccctaaaatttcccacaattgtgtaaacttacctcagtatattcatagatatgagacattctatcaattttaccctcttaaagatgcagagataatgcattatgtttcatcccaccatctttaatgagaagcttccatctt

SEQ ID NO: 129430 - DNA, 1045 bp, Homo sapiens
attttacttaagaatgaccccaaagcacaagagtactgtgcctaatttataaattaaactttttcataggtatatacatataggaaaaaacataatacatacaggatttggttggtactattctgcggcttcaggcatccactggacgtcttggaatgtatcccttgtggataaggaggaactgtatatggttaacctaggagctagagtcaacagttggaagagactttggggataattacatggaagggcatggtgggtggtcgtttcagatgacaagaatgtttttgaataacggatcatttgtgtcttcagactttccagaactccttgagaattatgcagaggtatttaatcagtcagaaggttgaatagtcaaattattagtgagtgaagtctattttgatgaggattttactaatgctgtcccttagatattataagtaaatcgttgttttcttttgaaatatctgaaacctagttaacatggactttcatttgttcttgtaaagatatgcaaagctatttgggagattgtcatcatctgatatttgatattcatgggctttcttcacagaagactagaaattaacagagtcatgatgaattatggctgcattgactttaaaaaacaaacacctccttaatgttatttaacaattttgaataaatttgatatggcaaacaaatcagttataatcgattgagaaaggaacttaattctaatacttgactggtgtcccataataacccataatactaagagacagttttggagggcgagaagtcctgaagagctgatagagataaaggttcaaatttgagcttctttcagtgttccttacgtcaatgcttttagtttctcatacaaaataaaataaagaataacctttttactgggaaaaggtaaaaattaataaattgtagaagcattgtttgaagccaaaaagtgtgtgacatgtaaattgaaatgaaaaaccttagagtttttgatactttttcaaagcagctaaagaattgatacttggacacaggaagaattttt

SEQ ID NO: 129431 - DNA, 1011 bp, Homo sapiens
aaaaaagtaagaaagttgccaatacagttttacatattcctgtgatgtttttaatcgacaggcaccttcttactgagatacgtaatgagaagtttcgattatacaaattaaagatgatggcaaagatggaaaaatatcttcattctagcagatgtaggagacagtatgtattatttattttatgccaatagtatggatttatggatgatgctcttttaagacaacaatttggctaaataattatcagtattttgaaaaaatattttgttgctgttacatgtgtgctgaatttttaaggctaacttctttgtgtctgagtaaactgaagtcaaataatgaagtcccaagtgaatcaattaatggtgattttacctcattattttcaggaatgaacttaacatatacgtttctgttcttttatttaatttaaaattttgtcttgggtagaatcatcttgtctcattttgaggacaaacaagtacaaaaagcctccttgggaattatgggaactgaaaaatgctgtgataattgcaggtccaggtaaagatttcttattatagatggacattctaaaagtctttctttctcttccttttcatgtttaactgaatttttgttgaatgataagtatttcagttttttaaacaaaacaatgaatgtgtttagatatgagaaagcaaacaatattaaagtattttgcttaaaaaatagataaagcaataaaatggtagccctaaatctaaacatatcaatagttatgttaaatgtaaatgatctaaaatattatttaaaggcgtaaattgtaagaattggtttaaaaacatgaccctgttctgtacgttgtccacaagaaatccactgtaattatatagataggtttaaaaaagaatgaaacattacattccatgaaaacattaatcaaaaggaagttggagttactttaatatcagacaatggacactttggagcaaagaatattatcaggataaagaaggatattatatgatgtaa

SEQ ID NO: 129432 - DNA, 1949 bp, Homo sapiens
gaactcctgagctcaggcaatccacccgccccggcctcccaaattgttgggattacaggcgtgagccacagtgcctggcccagaggagatatttaatgaaaaataataatcattagataggcagatttttagaaggagggcatcgaatgggttcttggatattggacacaataagaaatattgagctaaaagtctgaaggaattggcagatatactgttacaggtaaacactttgtagaagaaaataatgaatgagactttcttttgagattttcttagcctcttagttgttcccagttaaagcctcatatttttccttttcatgacaataaaaataataataaaatcagtaataaagtgaatatatgagatgttaacctgttcctttatgacaatgtcctgtttaccaattaacagtgtgtttttgtggtgatgggggcaagacaaatctttaaatggtggaaagcaaagaaagaaattataaaacatgattagttgtattatacgttgtttttggttgttggaaaaactatacatttattgagagaatcattaggaagctgaacatcagctatattgctggagtgatactgtttcagtggtttcttgacctttttgttgttgttgttgttgttgttaaacacagaccaactacggttgaaaacgtaaaaaggattgatggtgtttctgaaggcaaagctgccatgttggcccctctgttggaagtcatcaaacatttctgccaaacaaatagtgttcaggtaaaatactgtggtttgcaggagctcttagagaataagcattttttgtaaccatttcaaaagtaccctccagaagcaacatttgctcactttatttgcatttccatactggacacttagaaaatgaattaaaattgtttttacagtcaatctgttgtaaaaacatgtcagttatctacttttaaagatgatactaaaaagtagttgtccaggctgctgatgtctttctatttcattgggaggttttgtttttaaattggaaacattattttaggttgataaattataattttacattcaaatgtggtagttggaatttaaagctggaaagttatccttgctatgagttggtcaggagctcagccactttcttttggtttagcatcttctctaatctccctccccttccagtaatgctgtcttttgatagtaagtggatttcatattattctcttcagttttaatagtgtttccttcatatccttttattattgcttgttctgccctaagtgaccatttccagaaatgtcatttaggattttctctaaactccacgtagcagactctataatgcatactctgcagaaggtgaggcagtgggaggtagaggggagactactagactaggagtcacggaatcaggactttagttcttccttacagttgttcacctggtgaacctgcacatgtcctttaatttccttgggtctccatttcctcagctatacaatggaaatgacacttcctcccccacatccaggaaacaacagatgacattagaaaatagaagacatgggataagtataaaatgttgaaagagttaaacacattcaaggcaatattaagggattattttttacttccaagaagctcctggaagctttgggcaggcacagttggatcctactttagaaaaatctttctctaactataagtagaaaacccttctgctttttgaatgtagcatttccctcttttgatatagagtatctttggcaactttgaattttctttttcatactcttatataagacatcatgtgaaaattcttatttcttactgagtttttggaaatgaaattataatgtcttaatagtttgagaaagaatatcatacctaccagcggtaattgagtaagttccctctctttggacacttgaaagtagtatcttctttcatgaattagtg

SEQ ID NO: 129433 - DNA, 1058 bp, Homo sapiens
caggaagacacagatcctttgagggtggtagagactcctaaagtctgctgattcatacccagctggccccattaacaagagaattaaagagtggctagaaagggactgaagagttcactgggggcccatccaaaaagctgggggtacagacaactgctgattcccagccagtcatggattttattttgagacaggtctcgtttggtcgcccaggctggagtgcaatagtgtgatcatagctcactgtagcctgggactcctgggctctagtgatcctcccaccttaacctcccaagtagctgggactacaggcatataccaccatgctcggttattttttttttaattttgtagagatggggtcttgctatgctgcccaagctggtctagaacttctgggctcaaggagtccttccaccttggcctcccaaagtgctgggattataggcatgaaccactgtgcctggcttgccagtgatggattcaaagtcgcctctgggttgtaaccaggaagcatgcctgggccagactgagagggctgaaggatgacggcatggtttcagtgtgtgagtgtgcatgtatgtacgtgtgtgtgagaatgtgggtaagtgtgtgagcctgtaaaagtgtatcatgagtagctgtctcttgggaggagagggaatcaggaaccttggtcaaataacaccatgtactggcatggaaaggcactgttctgggcagcagtcaagaagacagaggaggactaactgtatatgatttgggcaatcatttaaagtatctgggatttatttccttgtctaataattagcaaggttgatgtagatgaggtataacaactttaggggtagaagaaagctatgattcaaagtcggcattttattagatcagtggtctctgatttggtgtgatgtgttcctggtatgttttcgcttagaacaaggttgtttaacccatggcccatgggcttcatgcatcctaggacagctttgaatgtggcccaacacaaatttgtaaactttcttaaaacattatgagcttttttgtgattatttttt

SEQ ID NO: 129434 - DNA, 1127 bp, Homo sapiens
tcgtttcaatattgaagtttcctccaagtgagctgttatcacttttgtcttcaagagaatgctaactcactgaatctctttgagctttttatgctttacactgtggattttggagtttgctttggtttttccactagttctttaagttaaatttaggtaaagaaatttaaaatcatcaggcttattcttaaaaactcaagtattatcaaatgatggatgatagagatatgctttgggaatatatccaagtacttcaaatgatagaagttagaacaccaggagacatttagtaagagattcttctgctgggtgaaatcaacatcaacatcacctggaaactcgtgggtagtgcaaatcccctggcctcaccccagagctcctggaatgaagctgtccgggatagggcccggcatcctgtgttttaataagctgtttgtgggattctaatgttcgccaaagttttaggatcatgcctgcagagaatcctgctcactatgaaagtttgcatgcctgagtaagtcaaaagagatctttgaaaatagtatctaggtttgagagacttgctgtgattgtataattttagcaaatgtgtcaaaacaaatttttacttgcaggcaatatcttgttagtacagagaaataaaacaaacaaacaaagattataaataagaacaaaagtaattcatccaagagccatgtgaaaatgaaaatccttgaaatggaaaaaaaaaaaaaagtttttcagactaccctgtggaagtagtaagttacattgaaaggccgaaatcagccaagatcattttttgttgttttgttttttgttttttgagacagcatctcgctctgtcactcaggctggagtgcagtggtacgattttgactcattgcaacctctgcctcccaaattcaagcaattctcctgcctcaggctcccaagtagctaagattacaggcgcacaccaccacacctggctaatttttgaattttttgcagagaggggttttgccatgttggccaggctggtcttgagctcttgacttcaactgatccgcccaccttggcctcccaaagtgctgggattacaggcatgagccaccgtgcctggccaggccaagatgattcttgaa

SEQ ID NO: 129435 - DNA, 1031 bp, Homo sapiens
aatattaatttggctaaagagtacataaggttttttttgttattctttcttcttaaaaatagttttaaaaatgggttaataataagcatgtggctaattagaaatccttatttctgcatatattgtagtcaagggatatctcctcttgtatttatgtcaccagttttcgtacgtgaatgtacttgtgatgcttatctcgatcaaattgaatcttagtcttggcccattgatgttctgtcttaggattcccaagggtgttctccatagaaaagattccatggccacatgtcatggctgccttagaaattcacagtacagatttgcaaaaattcactgagatgcattgttgtaaagagacctatttaactttttttaatgcaacatttattttagcatagaaccattttttttaaatctctctttcttttaaagcctaacatttgattgcattactaggaatagtattccaggaaacagtgccaaggcctattaggagaagtttgattttaagacttatccctttaagattatgttaactgtaaatatgattaccatgttttcttatagttccatctagttcaatagttaaaatgttaattgcattgggtcaagaaaggggtctttacatacaaacacgattgttcctagatttgtataaataggaaagaaaggttgttcttgagggtgttgtaataatcttggagttgtaaattcttgggatgttgttgtaatcttatctcagaatttggggacttaagaaaagctacagttttcttactttagaaatttactccttctgtggcattgaaaatcaagatactatgccccaccctgatattgttcataatttatctattattgctagtggtttcatggttatacatgaaaattcttccagcaaaccatgctaaatgttgggctggaaaatcttacagtgcttatccatttttttcctcactatttttcaaaggtacctgtcatgaaggaaacttgtcatatatgatcaaagtagatatatagctgataatcca

SEQ ID NO: 129436 - DNA, 1072 bp, Homo sapiens
tgggtggagaatccagcagcagagaagctcaaccttcacattggagcctctggccttagggtccactgaccagttgaccactggaaaaggtgtgttcagaatgggagcgtcctgaataacccaaggattctactgatttcaacagaataagcttagcatctaacctttcagattttttcagtaatgtgaactttacattttctcaagtcacattattcatagatgttctaattccccagggatcgaagtatagcattaaggaaaatcccttctcaataaaaaaatggtattgggtgaggggagggggacagaaaaagctcttagatgttctatagcaattaatggttgccatataaagatacctcattgtcattagataatggttaaaattatatgaatcttttacccttgatataattttgaaattcatcttaaaaatcaattccttaaaataaaagtagtaggggaaagaggtagtgatgggtggaggctgggggatgatgcagagaaggaaaaaaataagcaagtggaggttactaaatgtagcattggtggattattttgtttgtttggcataggtaatgagttttataataaaacttactatagtatatcaagataggctcctttcatatatgaacccagaaacaccatgaaaaattttttaaaaagttccagcattttattatgaaattttcaaacatagagaaaaggtgaattaatcattcagtaaacaaacttatgcccactaccaagattttacagttaatattttcctatatttgcttactgagtgtctacccatttatctatcaactttttatttttgatgaaatttcctgtatatatgagttcattttacccccaaatatcccagcatgcatagtatatatattttattacattgtttaagagaacatgtaggtcatggattatgctatcaaatagaatatatgtttctctcaaataagccaccatatttggaccgagggttttctagtcatcatatttcagagtataactcagacagtagcagccttcttgttcctgttccctaataattactccttcc

SEQ ID NO: 129437 - DNA, 1053 bp, Homo sapiens
tttttcctacaaacatgcatgttttatccaaaggaaattctgacctctaaccccattcacactttcctttcttactcttttattgctatagaggatttgatgaaggcagaaaggcaacttctgggtcctagtcccaagggtagaactaatggagaattcttttattcttcacctcccatccttctccatttccccatttacattctttttccaatttggcggaaaaaaagcaatgttataggaagctggctgtctgcagattagtcttagcaccaaggtggaatgacttttgggggaaaaacagacacatcccaaagtctggctcatgtagtccaagggaaagagtacttgtggcagtccataggattctctctctgatgtgttgtcctagtctttgtataaaatgttggttttctctgtaagtgttgggtattttcagtgtaacagctagagcaatgcccagtaacttttttttttttttctgctgaatatgtttgctcttaatggttgaggtaaggtgaataattgctcttggtgtaagttaaagaccacttttctaaactatgggttatcatgcttggtattttctcctatctgcctgacttgaggccacctgaaccccattttggtctttgaaatttagctgaccttggccttggatgaaatgctggtgtattgagtataatagttttggtttaggtcaaaattggggaattcagtgccgtatatttcaactgggtgctttttgaagaaatcataaattaccctagtttagcataaacacctgctgatattgtttctgaatatttacatgaatattgatcattgagatcttactatctttcaatttgaatgctttaaatgcttcaatagatgttttctacaccgtgaaattgtatgtcctttgctagaatctttgtaagagaggtctcactgctttgaagtcaaataaacctagaaaataagcataggaattatttttaaacaccatttactgtgcagattatagagagatgaactcaaggataactcatgttgctcataaacttgtca

SEQ ID NO: 129438 - DNA, 1119 bp, Homo sapiens
tggacgatttatcgatttccccctgtaagatgctgtatcatttggttgggggggcctctgcgtggtaatggaccgtgagagcggccaggccttcttctggaggtgagccgatggagatttattccccagacatgtctgaggtcgccgccgagaggtcctccagcccctccactcagctgagtgcagacccatctcttgatgggcttccggcagcagaagacatgccagagccccagactgaagatgggagaacccctggactcgtgggcctggccgtgccctgctgtgcgtgcctagaagctgagcgcctgagaggttgcctcaactcagagaaaatctgcattgtccccatcctggcttgcctggtcagcctctgcctctgcatcgccggcctcaagtgggtatttgtggacaagatctttgaatatgactctcctactcaccttgaccctggggggttaggccaggaccctattatttctctggacgcaactgctgcctcagctgtgtgggtgtcgtctgaggcatacacttcacctgtctctagggctcaatctgaaagtgaggttcaagttacagtgcaaggtgacaaggctgttgtctcctttgaaccatcagcggcaccgacaccgaagaatcgtatttttgccttttctttcttgccgtccactgcgccatccttcccttcacccacccggaaccctgaggtgagaacgcccaagtcagcaactcagccacaaacaacagaaactaatctccaaactgctcctaaactttgtaagtagagagagagagagagacgatgatgatgatgaataaaaggggtgggtttgaggtccccaaaggacatttccctttcttcttgcattttagttgcctggttttgtttaagcaaagcctatgtttgagatgcttgggatggcattgaagggccgagtaaaatgatcttgcaaactccggatctgaaccagtgttgtaacagcagctctctctagccacatggctcaatctggtaccgggaatgaaaaacttcagcatctgcaagtcatgcttgaatttaagttaaattcaatttatttctaacacattttaaaattaaaacatcacgccatctcttat

SEQ ID NO: 129439 - DNA, 1147 bp, Homo sapiens
atcttttgctcctaggctacaaactgtgcaagtatgttactgtactaagtagtataggcaattgtaacacaatcgtaagtatttatatatgtaaacatatctaaacagagaaaaggtacagtaaaaatacagtattataatcttatgggaccactgtcgtagatgcagtttcctgttgaccaaaatgtccttatatggcacgtgatggtatatgccatattttgtttatctcttcttgcatcagtgaacacttgggttacttccacctcttaaccggttaataatactgatatgaacatgggtataacattctaattatgttttgttcatctgtggtgggtgtgaaagttaaaccaatggaacctttttttagtgaatttagtcaaatttctgaaaaccaagaattcctatggaaacatactgataaacatacttttcttattatatattaaaaatgcttgtagggaaaacccagcttctaatagtactctgggtttgtgaagatgcagtaagtgcttgctagagagatgtttttaatctagagagctagagcagagacttagagttcacttgtttcttctctttttttcaatcatttataagatctctcatcttaactcattaaaactggctgattgactttgattactgacacacccaaactatttcaaaccagttagttcaaaaatgcagttgcctctttgaattatttataaaaaggatctcattacatttttccatagataacgatgatggcaaaggggaagaagggatcattatgccactcctttaaaatgcgggcttctggcctggcacggtgactcacacctgtaatctcagcactttgggaggccgaggcaagcggatcacctgagggcaggagttggagaccagcctggccaaaatggtggaaccccatctctgctaaagatacaaaaattagccaggtgtaatggtgggtgcctgtagtcccagctacttgagaggctgaggcaggagaatcacttgaacctgggaggtggaggttgtagtgagccgagatctcatgactgcactccagccagggcgacagagtgagactccatctcaaaaaaaaaaaaaagtgacatgctggttaaaggtccctgtccatatcccccttttgcaa

SEQ ID NO: 129440 - DNA, 1033 bp, Homo sapiens
taaaaatatttaagtactttgacatatgttaccccctaatacacagagggtgctcagacagcatttgctacaggagtgaaccctggccaaagctgttttaaccaagggacagtggaggcccagagaggttcgttggtttgcttaaaatcacacatccatgggtaagcaaggtgatggataatcagctcaattgagtcagtttacattgtatacacataacaaagcatcatgttgtgccctgtaaatgtatagaattatgatttgtcagttaaaaataatattaataaagtaaataaaatcacacatctcacattgagaggagggcagcctagacccagatttctgttagccccaggaattgaggcatatatgggagactagcagacaacacacataggaaacttttgccacttaattattattctttttctcaagaccactatattcatttgggtttgttcttatgcttttttttttttttagcaaattaaaaaaaaattatccttgaatgattctaggttagctttttgactaatggatgttggaaggagctcagtgacaaaggccagggattattttgcttttcctcacctcttcctttgttcctcctcatcatattacaaccttctgcttcaggattccttctgctttttagcaggattgacatgctgggccttacccggaaaggcaaaggctgatttgattagggaggtctttgttccaggtatctcacatcagagagccttcataacaaatgagaggaatggattagaagtttcctggggataattttttgtctaccctttaagggaaatcttgccttcattaattacatctcaaatggaatatgtggaatatagacattttcataatcaacaaggtgattttcattttaaaatgcttaaaaaatgttaagcagcatgtatgcacgcacacacatgcaaccaatttcttccacctttttcttgttttaattcttaaaatatgaatttttaaatataaggaaaatcctaaaagcagaaactaataaata

SEQ ID NO: 129441 - DNA, 1115 bp, Homo sapiens
aacttcacctagatagactaagggaatgtattccttattgaaaatatattccacctcattcatttacaaataaggtgtaaaccttcctggaaaaaaattcacaagtgccattataaatgcttctatggataaagaccttaaagctaacccaaagttattttgccacatatacttaggtgtcttaaataaataatatgcattctctcgattccatccttgtgaatttgcatttgggttcccacttcttcaaaagagagtgtgtttgttccatggccaattagtttgatagtacatataagtaattttgcatggataaaaactaaccatgcaactttaactctgcctttaattaagtaatcattaaaaatgaaacttgtctacttcctcctgttctgtagttgacggtgattgaggggcttggtatggctgtagtggcacaaaaatggaaatcagtaaattagagcagttgtcagacccagattctgattagctaaacagcttgcctgggttagtgattaatgcagttgtagggaatgaaatctgctttcctagaaaagtcaatagagaacgtttaatgaagtagaattatgtgacagttgtccagttgtgtgaaccatctttgaacttagtcaaatgcagatgtaattttatattaagactttaaaagaatggaaaaatggcttcaaacataggagaacaaaattttctgctttctttgtttacttcttattttatgtcaccccataaatgtgattggtacggcttttgagattattggtttagaatttcttaccctttgttgtcttgagccatcttttctctagaaacatgctaatattacagatggttcaaatgttcctataatgtcaatgtgtaaatccatattgagcaatgtagaggtccggctgtgaataggacaaagaaaaaattaagaaaatatttaaatgtacatacctccttttctaggatttaataactcgaattatttataaaatgttattgacaactttattaaaagtataagttacacgttataagattcacacttcaaagtgtacgattcagtgtttttagtaaagtcacaatgttgtacaactcattaccactatctaact

SEQ ID NO: 129442 - DNA, 2143 bp, Homo sapiens
ctgcatctcttatagaaatactttttttgtcttttctccctatctctttgttgtgtacaatcagcttttaaaggatccagtggtattaattttgcattgcggtcaatcagagatcttatgcaaatattaaatattgcacaggcatcataactaaatttagcatttcatttggaatagttccttgtgccataactccctgatggtgtttataactcagcatatttatatttgtatgtgcatttttatgtatatgcatttctctttggtctcataaaaaagtaaagtgtgtatttttttctaactctacagtcattactaaatgaaaattaagttgtttttaaggcatattttttaaaaggaaaatgatgttaatctgaatgaaggttaaatagaatcccttataacactctggcactatgtggtcacatcattgaatttctgataactttcatattatactttagtctaactactcaagatcagtttagttttctagtgtttaggaaagcttaatgaaaaatataagacaacagacaactagaaaactagacagataaactgaaacagacaacagaaaactagataatatagacagagcgttttccgtgaatgaaaactaaaatgcatcagtttgactcacagtggcctcctgccttctgctaagtatgcacaacctaaaggtaatattttaagtctcattctctgacaatgtagtttgcaaacatagagaaatattcagatgtagaagaatatggcttctctaatggccttgtttgtttttagctacaaggtgacatatatagttctggaatgaaagaggcgtcatcgggcagaatatttcagtggctgtattatgggcctagcaagtaacctgccttggaattcctctttattattttgagaacaaaggcatgccatttaacttttttcagcctcagttttttttttttttttccaactgtgagaaagagaaagtgtcacctatttcttgttaaggactaaaggtgttaaaatgctagaatgtctggcacatagtagatatttaatgaatgtcagtttatcttgtcttagctaagaattttcatgctttactatacagataactcttggattttatctgcattcatttcttctccaaaaaaagggaaccaggaagaagagaagcaaaagacataactttacaatgcctagctaacattatcaatgccaaacacctactggtcgtggtaaaaatgatttctacttcaaaagacaagattgctgtaaaaaatcattgctacactatgaagttatgctgtaatgttacgctatgaatttgttgtgctataaagaggaaagaagatgtttaagaacaaaacatgctatccagagcacacctccatttttgcaattacaaaatgtcttctttctttgcttctcatttctccagttcctccctcgtgacctaccttgaagatcacctataagcagaacatgataaatagcatgcccagtagaaatggtagttgtgagcacatttaaagtgctctgtgatgttttactctcagctgtattgaaatatagttggtgatgactcattctagaaatatgactattaagaatgagtacatttatttcttcaataataagaaaaccaacagaatggtaatcccagaatcttagttctacttttaacatttcacacccagtaagttggataacggatggcagagtgagcctgcgtaggtaataacttattattattacccttaccgtacatggcccttttccttgtacttttctccttgagccaataatgactttgatggttcagtctttctgcactttgtagaaaccatatcccaaacagtattttctagacatcaattctagcatgtgaaagaatctagacagcctctccgattttcatgcttctgggacagaaaagtatttatcacaggtaatgatgataatccagttaaatttgttatgcctttccttactttcaaagttaatttccatttttccattttggatgctgtgttttatggaaattgtctgtaaagagtctactagccttacatgtaatggtcagcagacatatttgatacctttctttttcctttagtaaaaggagttgtaagtaaggagcaagtgaaaagtg

SEQ ID NO: 129443 - DNA, 1050 bp, Homo sapiens
tacatgcaaatacaaagaactgtgttaaacatcttaaaatatttgcctatggggaggaggataggggtgggataatagggggaaaaggaataaacaaatcaacagataaataaccagagggaggggaaggctttagaatctaaagagaactatattcgatcttaagtatatactgtttggggcaatttatgtaacttttttgtggtttagtttccactcctgtaaaatggggtagtagcacctattcaatatgcttaccataagaattaagtgaggcaatatgtgagatgctttctttcccctttagctccatggagtaaagctgttgttttaaggaaagtctgttgctttaagggaattgtgcttcattatcatatgtttttaattcatttctcttttctcttcctgcagggcttaccacccaaaagatgggaggcagaagatacccacctgagttgcccagagcccacagtgtttgctttctcaccactccggactccacctttgagctctttgcgagagatgtggatttccagctttgaacaatccaagaaagaagcccaggcactaaggtggctggttgataggaatcaaaacttttcatctcaagagttttggggcctagtattcaaggactgatttcaaaaatgatcagaatgaaacagactagagccttcttgaggtttattttctaggttgccttaatatttgaacataatagctattctgttgactatccatcaggataataattagttgctgcagtactcataatgagccctttcaaggaatagatgtaaattacccttaggggtagccactatattttttatactaaaaaaggaaatatttcttatggacactggttatcttccatgtccgtgtctgtggacccacatacttactgccttttgtggaaattcacctagagtgagtactttccttgtgcaatggagggagacgatctagctatagattcttgatactcacctcactctcaacagcttattggtatttggcaaacctggtatcctgcagccgagcatgaac

SEQ ID NO: 129444 - DNA, 1051 bp, Homo sapiens
tttatttttttttgagatggagtttcactctttttgcccaggccggggtgcaatggcaccatctcggctcactgcaacctccacctcccgggttcaagtgattctcgtgcctcagccaccaagtagctgggattacaggcatgtgtcacccacacctggctaatttttgtatttttagtaaagatggggtttcaccacgttggccaggctggtctcgaactcctgacctcaggcgattgcccacctcggcctcccaaagtgctgggattacaggcatgagccatggcgcccggcccatattgtcattttaaatccaaatgaagattttaaaaaaaattcagaatctattttcttaggaactaatggtgccatgtatttttccttttgagatagaggcattcaataaagttgaaaccagcacatccttttcagcaggtctgctagggagcagattaatggaaaataaaactaagactccctggttcattttgggctcgttccagctgtgctgtggattaaaacgacttcagcgttgccctgtctcacccctccatcctgattttgtgttatttgatcttaatattcatatgtaccttggatcagtgaatttgctatttttctcataacgtcattcaccaattctaatcctctaattcctttcatgcaaactcaacaatatctctgtggtgccattatttttcctgatcactagctccaagttactgggggaggatttattttcaaggtttggcatctgaatggcccagaccataacacccagtggctttctccagctcattattagacagaggggacttgatggtatgataggaaacccgagtgagtggctgttaggggtggtgatcaggaacaggcagcctgcctggagggtctggcctgggcagacggcactgtgttggggcccccgtgtaccagttctgctttcaggttgcagaggagagaagtggctctgctgttttactgggccaggaactcagctctgcacttgacttcattacaaaccatcagatggaagagtcaacccaataac

SEQ ID NO: 129445 - DNA, 1084 bp, Homo sapiens
ggaggctgaggcaggcagatcacgaggtcaggagtttgagaccagcctggccaatatagtgaaaccccgtctctactaaaaatacaaaaaattacctgggtgttgtggctggcacctgtaatcccagctacttgggaggctgaggcaggagaatcacttgaacctgggaggcggagtttgcagtaagccaagatcgcgccactgcacccaggtgacagtgcgagactctgtctcaaaaaaaaaaaaaaaagaggcaaaactatttctggatatcctacagacttatgaaatggaagggaaatgtatttgttctaagtgtttagtagaatcgttggccattcttgttggttgatatttggaggctgtgtccactccctgatccctgaaacctgtgaatatgttactttaggaggcaaaagagactttgcagatgggatcaatgtgacccactttgaggtggggggattatcccaaattattcatgtggaccccatgtaatcacatgagttcttaaagatggagagcctttcctgacatggtcagagagaagaggtgatatcagaagagtcagagagatgcagtgttgctggctttgaagaggaggaaggaggccatgagtcaagaatggtggtggctctaaaagagaaacaagaaagaggcttctctcctagagtcttcagggaggaatgcagccctgctgacccctgggtcttagcccagtgagacccattgcagacttctgacttcagaactgtgtgataacaaatttgtgatttattgattgattgattggtttttgagacaaggtcttgctctgttgcccaggctggataccattggtgcaatcatagttcactacaacctctaacttctgggctcaagcaatccttctgcctcagcctcctgagtatctgggattacaggcatgcatcaccatgcccggccaatttttttttcttttcttttttttgacatggagctttgctctgttgccgaggctcaagtgcagtggcgcgatcttggctcactgcaacctctgcctcccgagttcaagtgattcgattctcctgactcagcctcccag

SEQ ID NO: 129446 - DNA, 1382 bp, Homo sapiens
ggctaagtcagggtctgaggggcagggccggggcctggctgcgagctggggccgggggactcggaggagcggggacccagccccgccgcgccgcctgcagctttccccagcctcctcccagcagaggggaggcccgacagggaggggtcccatcctcatgaacggtcacaaacagggcgctagggaagcacgcccgacccccgcggtccccgcgctccaggattcggcagactgcgcgcgtcctgcctcccgcggatcgcactgggtcccaacagggttcccagctccaggctgcgcccatgaacaagcccagcattgcggacgggcgcgcgcagacgccagcgtggtgaagacgcgggggcgcgcgcgcggcgacgagactgccaggggacgcttcgcaacaccgagagtctcagcgtttctcgagataggtgaggctgcgcgttccggaactggtttcccggaaggagcatgtctgcgcccgcgatccgaccggaagttgcacgctgagccgcggacaccatgcagtcggatgatgtgagtctcctccggttgttcttacacccggggtttgcgcagggaattttgcccattttcggacacttagaaaacgcgtacgcagcgggtctgttgcctcgtgccgctctggatgtgaggcttccggaaccccgattttccaacataggttctcacgcgtgtctagcaggggtttactgcccgctgccccggccgggttgtgagcacaggactccgtcacctcagcccatggggtcgatgtgtcccgtccttcgtgcctaccaatgcaggacgtcgcgtcatgctgtcagctgtcagctgtcagctccggacttggggtggggggcggcccgggatttggcgaagctgactccaagtttaagcgtccttctcatccatgtgcgcgttactcttccatctgcgtttcctgtgtaggcttttctttacatttgctctacttctgcctaagtcataatttcggaagtatcctagattcattcattgagttttttgttggagaaataacagtgtgcttacagtgtgccaggcattgtggtaattattgaggatttggttaaccagaaaaaatgtcccacctctcctggaacactgatgggggagacacagtaaacaagtgaacaaataagttaacaattacactatataatcatactatgaaagaaagaccagagatgatgaaggacacttcagatagggttactcagggaaggtttctctgaacagaagatgtttgagttgagatctaaaagataagaataagccagtcactgaggagctgaggaaaaagcaatccaggcagtaggaacagtaaagtacaaagagttgaagatatgagagaatgaata

SEQ ID NO: 129447 - DNA, 2678 bp, Homo sapiens
ttttagatattgaagagatgtcatataaaaatctggtgctcaggaaagaagtctgaccagaaaataacaatttaggagtcatccatttagagatgatacttaaagccacaagcctaaaagagctcccttattcttcttacctgtttcctaccatcccccaccagacacacctataaaattcttaaagtgtgttttattcttttgccctcttcatatttttcctttaacagtggtaaagcttttttttaccccagttcctcaaggcagcgcactcaaaggctgtcatactcttacgcatgctatgtggcctttagacctgctattttgtgatactttgtttacatatctttcccctaactagatagacgaaactctttaaagagtatactttctttcattcagcaaatacttaagtggctactgtgtgtcaggacttggagatgtcagtgccttacataaattaagtatataatgctgaatgaataaagagcacattaagtacaggaggatagcagtagatagttttctttgccctcaatgagataaaattatggtatgtatatctaaaaatctaataccatgaagccttttttttttttttggagatggattctcactctgtcgcccaggctggagtgcagtggcgtgatctcggcttaccgcaacttctgcctcctgggttcaagcgattctcctgcctcagcctctcaagtagctgggattacaggcacctgccaccacacctggctaatttttctattagtagagatggggtttcaccatgttggccaggctggcctcaaactcccaacctcaagtgatccgcctgccttggcactcaaagtgctgggattacaggtgtgagccactacacccggcccatgagagcctttaataatggataatgaacataagtaaaaagggaaagttacgaagtatataaaatgtgatttcacagagtatgtcaaaaaaagtctggaaaaatatttacagaatagtaatgaaattttatctctgggtaatggagttatgattattgctcatctgtatttagcttttctataagaatctgctgggcttttttgttttgttttgttttgttttgagacggagtttcactcttgttgtccaggctggagcgcaatggcacaatctcggctcaccgcaacctccctctcctgggttcaagcgattctcctgccccagcctcccgagtagctaggattacaggcatgcgccaccatgcccagctaattttgtatttttaatataaacagggtttctccatgttaatcaggctggtctcaaactcctcacctcaggtgatccgcccaactcagcctcccaaagtgctgggattacaggcgtgagccaccgtgcccggccttgctgtttgtattttaaaaagtaaacaagtcaggctattttacaaaacatttcttcctctcattcctgtccttgggcattgccttcttgaattaatatagtatctcttggggcagaggatttgaaatgggcttttactttgtcttgcaggttatctgggatacactaggaaacaagcaattttgttccttcaaaataaggtgagtctcaatttacaacttggtcaaagattccttcagttgcctctttggcaacccattttataatctttgtttcttttctcccattctagaaccaagactcagagcttctgccgaaatgaatatagcctgactggactgtgtaatcggtcatcctgtcccctggcaaatagtcagtatgccactattaaagaagagaaaggtaactccccagttttaacttctagaagaactgctccacagcttttacagggatgttctttagtttctgtaaataacactaaagctattttactttatcttcaggacagtgctacttgtatatgaaggttatagaacgagcggcttttcctcggcgtctctgggaacgggtaagccttacaacaaaactacagtgaccgctgatcaagagcatcaaagccacatgcttgaccatgatgcccaattccatgaccattaacttttgaggccatcctcattaggccatgggtgtcactgacagtgaaaacctaatgaatcatttacacttgcccttcaaacttcctgtttctgtttggtaggtccggcttagtaaaaactatgagaaagcactggagcaaatagatgaaaatctgatttactggccccgtttcattcgacacaaatgtaagcagagattcaccaagatcacccaatacctaattcgaattagaaaacttacactaaagcgacagtaagtatttggatcattcattatttttaaatctctctttttatggagcttgttttgaagttgagaaattgtgaaacttcggggctttctattcaactttgtggagtctgttatgatgtactaaagagaaactttagctttgactaaaggtgtgccctttgatatggcaggacttttaaaacagtagaatacaacttgattatcaccctccttgtctgaaaatctttcagaaaattttattttcttttttgttaagacggagtctcactctgtcgcccaggctggaatttgcagtggcgcgacctcagctcactgcaacctccatctccccggttgaagcaatcctcccacctcagcctcctgagcagctaggattacag

SEQ ID NO: 129448 - DNA, 1049 bp, Homo sapiens
tgaaaactaatttttaaaagtgatatgaaatccccagaattaacagaataccttctctaggactgttaggccctaatgctttttgactgtgatctacatagaatgctaaagatgatgtcagacttcgacagaaaattcttttttcttagttcactgaagtcttaattttagcatggtgaatgccctgagaatcccagaatgcctgaacaaaaatggccggattaaaatacatgtaaaaatatatgactttttatagtattaaatttctagaagcgtttagtgtatcttgctgtattgagctgagccctacagcaccaaccttgggctccaaggcttgtttgaatcgctagcctccgtgaatgcctgaagctcagccatcctgccctgcacatgagtagacttccattttagtcaccaattccaatccttttttcttctcatccttaaaaaggaacacagcacatgacagtggattttctgatatattttctttcccttaggaggaaacttgttcctttgagtaagaaggtggagcgtagggagaaaagaagagaggtaacttattgttgagatattcataccttctacattttctttctgggggtctcttatagattcagtcaccatcattatgtaaactgttgaggccttggataatggttcactaatagataactattagttgcctaagacatttaatttttcatattttaagattatgattttcagcacaggttaaagtatgtgtgctttggggatatatgtaatggagaacagaaagaatccacaactcctttttctgaatttcttgtggtcaaatatttcagacttcagaattttgatgttgcatattttacatactacataaaacctttagtagattttgagcattctaatcaaatggaatttctgcagtgaaatacaatacaggcatgcagtgagtaataacatcatggaaaattgggtatccgtcccctcaagcatttatcctttgtgttacaaacagttcaattatccttacagttattttaaaatgtacaattaaataa

SEQ ID NO: 129449 - DNA, 1084 bp, Homo sapiens
tcctgggctattgtgtggtagtacaggttgatgtcatgtgtcatctccaatgagagatcactggaggaagagatttttacctattctgtcacatggaatctagcatgattttagaaaatgtaaacgaatgaagatttctgttctcttttctcagcttttacaaagtctggctccagagttgctagattatttctgagacacttaaatgtatatagacttacatgctttgtatctatcaaagcctgtgttagaatttaatttagaatgttgtttacaaaaccataggaatttcaaaatggaaatgttcccaaggaagtttacaagagaaagaagaagaaatctatctcgttggaaaggcaaaagccagtattagcaaggaggggaaataattacattgtctttcttataaacaacttggtagtttcttccatttttataagatgagtaatgagcactgatgaattaaacagatttgctctttcccccttataggaaaaggcattaatagctgctcagctggacaatgccattgagaaggaattactggagagactgaaacaagatacggtgagaaagccattagctttggggtactgaaattttaagtggtagtatgttgctaagacatattgggaatttttttttttttttttttttttttttttttttttttttttttttttttgagatggagtcttgctttgttgcccaggttagagtgcagtggtgcaatctcggctcactgcaacctctgcctcccaagttcaagcaattctcctgcctcagcctcctgagtagttgggattacaggcaccaccactgcacccagctaatttttgtatttttagtagagacagggtttcaccatcttggccaggctggtcttgaactcctgacctcgtgagccactgtgcctggctgggaaatgttttttaacatgatatgaagatctccactcgaattttatccctggaataaaataaatccatatcggcctggcttccttgctttaattaatgcaagcacataaaatgctttggttacccttgatactccattcactataagagacctttcccttttt

SEQ ID NO: 129450 - DNA, 1009 bp, Homo sapiens
ggctctttgaaataagtttttattctctttttaaaaattagtgttgtttatacagacaacatgactaaagtatgctttttccttattatttccccttgtcagcaaaatgacatttgtcccaatgcatgggttttgtagactattacattttaaattattttaaaatgtaactccatagaagttacctatttgatactaactgcagatgatttaaatgttcaaaagaacatgcttttttaagacactgctggctctacacttaaaaatattactcatcaaattaagtattctgatttaatcactgaggaaaaagtaatattctccacagaaagtggaacttcaagtgtaatatccaaatgtagttaaagccaatctgtgtttatgttcttcagtatggcgacatctacaacttccccattcatgccttcgacaaagccctggaacaacaggaggcagagagtgactcttcagatactgaggaaaaagatgatgatgatgatgatgaggaagtaagtcttgtttttgttttgccaaacctactagataccatttgtataaaactgagaaacagaatatcatcttcagtccgctaaccaaaaatgatatgtcttcttttttctttcatgtgattaattttggtttagcactggttgctctgttcttcaggctaaccaacaaaccattaacaattttagtcttaatttattggtcttctaaaattgttcctgcaaggtgacaaattataaagcctttcctgtctatatgtagtttttaaccataatgaggatgttttattgctaataatttaaatcaagaataagaatgatctggtagccctaaaatttttaaaattcagaagcattaaatttagaaagaactaaattttcattgcctagtgaaaagactgtggttctcattatgttattttgtacttacttagatgtctaatctgaatcttcattatgtattctgaacctaacagttatgttttatttataggatgtgggga

SEQ ID NO: 129451 - DNA, 2220 bp, Homo sapiens
tcgagaccagcctggccaacatagcaaaaccccgtgtctactaaaaatacaaaaattagctaggtatggtggtgcatgcctgtaatccctgctacttgggaggctgaggcagaagaatcgcttgaacctaggagatggaggttgcagtgagctgagagcgcaccactacactccagcctgggcaacagagcgagactccgtctccaaaaaaaaaaaaaaaaaaaattaaaattcagctggatgtggtggcggttgcctgtagtcccagctactcaggaagctgaggtgggaggattgttgactacagcagtttgaggctgcagtgagccatgactatgccactgcactcctgcttgggcaacagagcaagaccccgtctcaaaaaaaaaaaaaaaaaaaaattaaagaaagggacaatttctgaacacagacatagacaaatcaatgccctagtctgttctagattgaggggacaaggaagggagtttggagaaatctagtgttttccctcttcctttatcttttctctccccgtaataggatatggataaactggatgccagcagtgatgaagatcaggatggtaaatcctccagtgaggaggaggaagaaaaggcccttagtgcgaaacacaaaggcaaaatgcccttgagaggaccactgcagagaaaacgagcctatgtggaaatagaatacgagcaggagacagagcccgtggccaaagccaaaaccacgtgatttccctttcagcatttatacccaggactgaacatgcagaactgttttttttttttttttatcttaaacacatacacacctccagtttttgctcttttgtgttgtactgaacacaatatttgtgtttttattatttatgccacgtcagtggggcaagaaatctggagtgagtgaagaaagctaagttgtgaacaagagtgtttttatagcatatgtgttgaagtaacagcttgtgcccgagaaacttaacagatgagttcttgaatctgggatgagatgacggatgtaaatatttctaaattttaaatgctacattacttggtgtccttttttctcccaaactttatttagaaatggaaggagttcaattttttcttgttctactttccctattcttatggaggtaaaaggaaaggaaggaaggaaaaagcagctttcacttacaaagtttcgtgtaaaaatatctttttttcttaaataactccattcatacaaattgggatgggaagaaaatcctttcctcttgggaaagtaatacaagtcttaagttccattgtagggtgcgccttcagaaacctgctgcacttttctgatatagttcaccacttttctgtcttcacagctttggggaattttggccaggagaccctgaaacatgaaaccaaacaggctttgatatttttttttttttaattactttccccttttgcttgattcttcttccttggtatcatattcaaaggaggaaagaatggatgacacttagggacaggtcactaagcagaataggtattagttggttttttattatttttaaatttatatagctctcatgtattgaaggtgctactttaaaaactgtgttaatgtacttgcaaatctcctgctggctcatgaaacagcagaattccagccaaggcaaattcagttggatctagggcttgaaaactgcccaagattaaagagctaagatgaaatagtttgaataaactggtaaaataacaattcatactatctctacatatttttaggatatgaatttttttttcctgctgggtagattgtccagtgacttatggcatgaatttcttttcatgctaccttcaatcttcaactaaagatttctaaaaggggtaagaaatgaggcagtagtttattaaatacatagaagtacacagctattatatgctgtggctttgagaagttaacttttgtggaatatgaaaccaaaggaagaatttccatgtagataaattaagaatagggaaaaacatctacctaaaagatggttgtccctaaaaaactggaaacatctgaaatgctctatttatgttattattcctgggagcttatagcccattatttttactttttttttttaattcagaagactagaacagaacttaaattttacaaacttttgatcataatgcttttgcccatactgtctcgtccttagccccagtgacatgtgctgatcct

SEQ ID NO: 129452 - DNA, 1026 bp, Homo sapiens
aggcagaggttgcagtgaggtgcaatggaaccactgcactccagactgggtgacggagcgagactctgtctcaaaatataaaaaaaaataataaaaatttaaaaaaagcatactaatgtaggatatacttgcttggaaatcattccaactctggcttgaggtaggtgtcaggaactggaacccaaactgtggagtcagcagaagcatctcttgcatagctgaaaattgaattcagccagagaatctagtgccccaacaacatacagtagctattctgcaccgtattctctcacttccttataaatgtgcaaggaatccagagtaacatttccccatgacaacctttcccttagtcatattggtaactaggttgcatttgtttactatctttctccctacggaattataatctccaggataacggaaaaccacatctattatattctcccaaagtatgttcagtacctagtattaggtatacaaatattcaaagaatgaatggactggaagagaatgaatcaatggatgaataaaatcgaatcagattgtcaggtctttaaagagcagagaccaagattccaagaagggagagtgaataaatgtagggaggtagaaaaggaatatgtgtgtatgcgtatgagggggtgaagcatgggaaatggaaaacagagccgattataagttgaataacgagggctgagaggcacccaaaccataggaaaatgaggagtatttagatagagatgaaaacttttttctcccagtcacgcatctgtccataaatatgatttattgtacatttcacattgtattttcacattgtaagttaaattattttccacctttcattaaagtttttttagggttttttgtttattgtggtaaaaatacatataaattttccattttaaagtgtacagttcagtggcattaagtacagtcacaatattgtgcagtcactagcattgtccatttctggagctttaccaaggcgatgaaaacttttagaaaggttaatagttacaa

SEQ ID NO: 129453 - DNA, 1072 bp, Homo sapiens
tcaattttcagctatgcaagagatgcttctgctgactccacagtttgggttccagttcctgacacctacctcaagccagagttggaatgatttccaagcaagtatatcctacattagtatgctttttttaaatttttattatttttttttatattttgagacagagtctcgctccgtcacccagtctggagtgcagtggttccattgcacctcactgcaacctctgcctcctgggtccaagtgattctactgcttcagcctcctgagtagctgggactacaggtgcgcgccaccatgcccggctaagttttgtatatttagtaaagacggggtttcaccatattggccaggctggtcttgaactcctgaccttaggtgatccaccagccttgccctcccaaagtgctgggattacaggcgtgagccaccgcacctggcctctagattggtattctgatcactgctctgcagatgttaaatgatgtgctatgaagtactctattctcaattagatttaaagaacattaggattaacaaagttaagcaaatgttttattgcaacacttctaaatgacctttaatcttctaatatgcattctaaatctagagagaggtacaacctgtatggtttcccaacctatttgaccacagaatttttttttttttcctgtggggcatcaaagagtacctagatggagattctgcaaaacaccaatctaaaccattcttaagatatatagccaggcacagtggcccacgcctataatcccagcactttaggaggctgaggaggggaaatcacgaggtcaggagttcgagaccagcctggccaacatggtgaaacaccatctctactaaaaattttttaaaaattagccaggcatggtggagggcacctgtaatcccagctactcaggaggctaaggcaggagaatcacttgaatccaggaggcagaggttgcagtgagctgagatcgcgccattgcactccggcctgggtgacagagcaatactccatctcaaaaacaaaaacaaaaacaaaaggctgggcatggtggctcacgcctgtaac

SEQ ID NO: 129454 - DNA, 1678 bp, Homo sapiens
agtcccaactagttaggtggctgaggcacgagaatcgcttgagcctgagaagcggaggttgcagtgagccaagattgcaccactgtccttcagcctaggtgacagagtgactctgtctcacaaaaaaaaaaaaaaaaaaaaaaaaatgtgtaaatatcatgtatcactaagtcacttagacttagtgacatagtaacagtagacttagattcctaaaatctggattaaagtcccagctctgccatttttccgattttataaattagcaaagaatggtcctgaggagaatgtattgatttgagactgtcagatggagattaagaatgtaaaaaagtttgaaaatgtaaagtaatgtgcagttcatatatgattactagtatcttagaattctctggtatggaccctaaggacggtagattaatgaagttctagagaagtcagtgagtattgtaaatgcaaatggatgaactatgcaccgtccttccattccttcctcctaggctgtgctcctgtgtctgctggatttattccccatcctggagaaaaccctgcactggaaaggagatggagctcgacccaccacccattgtgatgaggtcctgcggctgatcctgacccacatggagccagagcaccgccttcttttacgcaggacctacgcaagaaacctgccggctttcgtgaacaggtgaggccctgggcttttatttattattattttatacagacaggatcttgctatgttgcttgagctgctctcgagctcctggcctcaagcaatcctcccacctcagcctcccaaagtactgggattacaggcatgagccactgcactggcgtcatattttctctttcatctttaggttggggatcctaactgtccggcacttaaagaggctggagagagtcatcattggttatctggaggtttatgatggacctgaggaggaagctagactgaagatattggaaaccctaaaacttctcatgcaacatacttggcccaggtaatagcagccttaaggtgcaaaactcagccgattttctcttgagaacttgcttggatgtatttaatacattcagtacaaagtattaaatgtatactatgtatttgaatacctcccattttcacacacctataggattttaaactgagaaaatggcattagaaagataaaatatactatagttacttgaggtgctcatagttgactcttttaccaggtatcagttccagattctgacagttaaatcgcttctctttgaaactctagtatatcttttttgttttttttttttttttttttgaaatggagtctcacactgtcgcccaggctggagtccagtggcgcgatctctgcccactgcaacctctgcctcctgggttcaagtgattctcctacctcagtctcccaagtagctgggattacaggcgcccaccgccaggcccggctaattttttgtattttcagtagagatggggtttcactatgttggccaggctggtcttgaactcctgaccttgtaatccacccgccttggcctcccaaagtgctggggttacaggcgtgagccaccatgcccagccttttgtttttgtttttgtttttgagatggagtattgctctgtcacccaggccggagtgcaatggcgcgatctcagctcactgcaacctct

SEQ ID NO: 129455 - DNA, 1012 bp, Homo sapiens
gtgctggggttacaggtgtgagtcaccatgcttggctctagggtagtcactaggagatacatggttgtaggtggtggggggatggataggtggaagataaaggttactttgttcagtttatgtaggtccattgcagccttcaattccaagtctctgtaagggctgttttcttaccctggtatggaaagcataccccacccagaggaatcttttatcacttgctgcatgcagaaagagacaagtcagctcaccctttctgaatctacagtttctgcaatattttcaactcgaaacaatcatgcatattttgggatggcatgttcttcatgcttcatacccataatccaatttcaaagatagtcaacatgtgccaatcttgggaaactattcttttaatttgacgatttgtctggttgcagccagctgctgatttgctccagtataacagagcccaggtcctataccatgccatttccaaccacctgtacacaccagagcaccacctcattcaggtaatagtatgatttcttcataactgggtctggattctctgaatttgagtagaaggttgcattgtgtgagtagtagtaattgagagacattttcctgccttggaaagtgaggatgataactaaaagcgttgccaagttaaaaatatctcagcaccaagcaggcctccacattcctgagtctccacagataagacagtgttttttattcatctgagtcaattgtatattactttgggctgggcatggtggctcacgcctgtaatcccagcactttgggaggctgagggaggcagatcacctgaggtcaggagttcgagaccagcctggctgacatgccaaaaccccatctctactaaaaatacaaaaaaattagccgggcatgatgttgtgcatctgtagtccctactactcaggaggctgaggcacaagaatcatttgaacccgggtggcggaggttgcagtgagctgaggtcacgtcactgcactccagcctgggtgac

SEQ ID NO: 129456 - DNA, 1005 bp, Homo sapiens
agctctggttataattgactccttctcattggataggctgtagacccaaagccctggatgattatttggtgtaagttatggaagttattttaatccagatcttagaatgtatgatatagaatcaagagttatcttatgtgcgatgtattttttttttcaaagacatgaaaatactctgtttagcttgaagtagttttttttttttttttttttgctacttatcaccatgtcacttaatgtaattctatgtattcacttagggaatcctggaagaataaccctgccatcaaacatgttttctcatggactctgcaacaggtcactcggccctggctgagccagcatctggaaagggtacttcccgcatcattggtcatttcagatgactatcagactgagaacaaaatcctgggtgtacactgtctccatcacattgtgcttaatgtggtaagcaacctctggcttgtcatctgtgttgacaggacagactgagtcattcctggctgttcttcatttctagtaatgctaagtcattcaactttacttatttgtattttctccttatatttttcctctatccacctggtagaagttgtatcctataggtaatgtaataactaaaatgataattatagaagaaacaggaaggcatgggtcattatcaaactgaataaccagatgttgagaactggtcaacagttgattttctttctttctttttttttttttttttttttgagagggagtctcactctatcacccaggctagagtgcagtggtgtgatcttgtcccactgcaacctccacctcttaggtttaagcaattctccgcctctgcctcccgagtagctgggattacaggtgcgtgccaccatgcccaactaatttttgtatttttagtagagatggggtttcaccatcttggccaggccggtcttcaactcctgaccttgtgatccacctgcctcagcctcagcctcccaaagtgctgggattacaggcgtg

SEQ ID NO: 129457 - DNA, 1051 bp, Homo sapiens
aaggcccagaaacgttgtgatttgctataaatgacataactggatagtggcaaattggaggtcataactgagatgttcgggctcagttgtccaatgctctttccagcccttaggacgactgcctaggaaaattggaaattctgtcccacttacttggagttaataattacaaaatgtggccgggcgaggtggctcactcctgtagtcccagcactttgggaggccgaggcgggtggatcacttaaggtcaggagttcgagaccagcctggccaacattgtgaaaccccatctctactaaaaatacaaaaattagctgggcatggtggtggacgcctgtaatccaaactactcgggaggctgaggcagtagaatcgcttgaaaccaggaggcagagattgcagtgagctgagatcgggccactgcactccaatctgggcaacagagcaagacatcgtctcaaaaaaaattacaaattactagaatttggatgggggatttagagaggatttaaacttatggtttgaatttagacttggggatcttgaatctcattactgcttgttagagaaggatgactatcagctaagaaagccatgtttaggataaaaagtgaaaagcacctttagattactgttagctgaagttctttcaatgagtttccacttgctactttgttagcactggagtaatgagagaaaaagtatctgtaactgtcattttaccaggaacacggaattaaaaggcttgattttgagtttcgtgcttctatttgttgctctgagtaggaccagattagacagttatctgaatctgtttgtttctaatataaagataatatacttggcggagtgtggtggctgacacctgtaatcccagtactttgggaggccaaggctgtcagatcacttgaggccaggaattcaggaccagcctgggcaacatggtgaaaccccgtctctactacaaatataaaaattatccgggtatggtggtgcaagtgtgtaatcccatctactcgggaggctgaagcaggagaatcgcttgagcctg

SEQ ID NO: 129458 - DNA, 1024 bp, Homo sapiens
cattttcccgagcctggatctttattgctttacgaccatacgtcgtgaaataagaaggtgttgcggcagtactggcggaagctagccttgcgttttgcggcagcaatatgagctaggtccggatcctgttagacaccggcgggcgcgagccgttgcaggtacctgggggtggttaagttggtgacatggctcagaagtttatttctttaaatttttaagttttttttctttttagtcttcagaaaggcaacagtagtcttttaacgtcactgttaaaagtgtaagactcttttactccctgagagtcccctttccctttcttgcgtcctttcctctttattcttttttttttttttttttttactgagacggagtctcactctgtcgcccaggctggagtgcagtggcgcgatctcggctcactgcaaactccgcctcccgggttcaccctttctctttattcttatcccggtcagactcgccccctcctccaagacatctctctgttttattttatttgattttagttctctttgggtgatcgctccttccctcttcaacggatccctccccgcctccatcctcgttctgtgggagagaccagccttctggtgctgcagtcaggaatggagcttgacagcgctctggaagccccatcgcaggaagactctaatttgtccgaggagttgtctcactccgcctttggacaggccttctccaagattttacactgtcttgcccgcccggaggcacgacgaggcaatgtaaaagatgcagttcttaaagacctcggtgatctaatagaagccacagaatttgataggttatttgaggggactggtgcacggctccgcggaatgccggagacactggggcaggtagcaaaagccctggagaagtatgcagccccctccaaggaggaggaaggtggaggtgatgggcactccgaagcggccgagaaagcagcccaagttgggttactgtttcttaaactgttagggaaagttgagactgctaagaattc

SEQ ID NO: 129459 - DNA, 1876 bp, Homo sapiens
gcactccagcctgggcaacaagagtgaaactccatctcaaaaaaaaaaaaaaacataactgatcacatataccatgccctcatcctacctctagttggtattaagtgccacatcaccaaatgtattgggcaagaaaggattgaaaaccattcttctaggacagtaatttccagtgcagtggaaacttctgtgataataggaatgttctatatccatgccattcaatatggaaaccatgtggctgttgagcacttgaaatgtggtgagtgtaactagggactgaatttataatttcatctaattttggttaatttaaatttaaacagccacatatggttaatgactaccatgccatcaatatagttttgtaaaggatggctaaaaagtttctctgcctggtagaacagactaggctagagcttagttttcttgtctggggttgaatgagtgagatggttccccagttcctcacacacctgctcttttctctctgcagcagacctgcgcagtctgtctggaagacttcaaggggaaggatgagttaggcgtgctcccgtgccaacacgcctttcaccgcaagtacgtgggaatgtgtccagggtgcccgtcgaaggagaaataatcagggagcatcttctggaaacttccagtctctgccactttctatttgccccttatccgtgatgccccaggtcctacgtgaacaccgagcaaagcccagagggattaggttgggacaggggtagggatattcttcttttttttttgagttggagttttgcttttgttgcctaggctggagtgcaatggtgcgatctcagctcactgcaacctctgcctcccaggttcaagcgattctcctgcctcagcctcccaagtagctgggattacaggtgtccaccgccatgcctggctaatttttgtatttttagtatagatggggtttcaccatgttggccaggctggtctcgaactcctgacctcaggtgatccacctgcctcagcctcccaaagtgctgggattacagttgtgagccaccacgggatattcttgttttgagagacaactggagcagcgtggtctgtctggttagagattaccattcctcatttgttctcaggtgtctggtgaaatggctggaagttcgctgtgtctgccccatgtgtaacaagcccattgctagtccctcagaggccacgcagaacattgggattctattggatgagctggtgtgagtgctgccgctacaccgagacctggagaagacctcttgcctcatggatgtctggtccctctgcacagctccaaccaacaggactgtagggtgatgacgatcactttcccagtgatgagaagggtggtctaggactgggcttctaccctcagtgcaagaccagtgccagatgtgcccccacttcctgcctcctgaagccttcttccctgctactccatgctggtggcctcacccatcaagaccactgtctcctggtactggactatctacctgccttgtccctgttctgggggaaggtgtccaccccgatcaagaacatggagaaagtcctctttcaaggctcccattaggaggatgagctgccttgacccagaagggatgagacgggctcttacctctctacaaccttccctccccttcccactccttccggagtaaggttagaagggaaggaaggaaagatcaaggaaccaagcgcctccacgggaggcgagggaggctctgtatgaaacagaagagcagggacataaaggaaaatgtcagtgtttacatgggacctatggaaacaaaggctggcgggcgccagctgactccagagtaagagagggcccttcccctgccaggacccacggtgctatcca

SEQ ID NO: 129460 - DNA, 1022 bp, Homo sapiens
cttagtcctttatcaacccttgttggcttgcataggtccaaagtatgccctgtggtgtgtatgggacaagcacccctccctgccctcggaagaatgcccaagcagccagccagcctctcctgctttgaattgttccatttaacctgctttctctaatttttttctctttctcccagcaaactgcggaaccaggcacagagtgagcgatacggatataaggaggtaaagtgctgcgtgtttcccagaagcttccttctctgcctgacctgataggaagaggcaaggagggcaggctcaggttctcctgggcaggaatccccctggcctcacctctgggtctccctgaggctaaaccccttcagtgtctgaagtccggcttgccccaggcagtccaggggactcccttcattggttgatactacctggctggccccagtggttggttcttctttggacatcatgcctcctctttcttttcaggtggtgcttaaaggtgatgccaagaagttacaattatatggggtaagtgtgccaggaaagtgtgcaggagggccccagcaggtgaggcagacagcaccttgctccagttctctgcctggacgcttttcagaaaactgcttagtccatgccttcatatctcctttggccaaataatggagacacatctcagcaagtaattaatatgtggaattgattacacctggaacagcctcaggcagaagacatgaagggatcacagaagggtttagataagtagtgccccacagccccaggagtcccacaatacataatttttaccaggaggatggtcgtaccctttcatgccatagacagaattcagctaactttccctatgttcagcccctacatcctggttgttatcataggaaatgaggtccttttacttttgtatataccccatcttaacagactagatctgactagtgtgttcattcctgtggctctgccatttctctcccaccccactcccacccatacaccagttccttgagtcccctcaa

SEQ ID NO: 129461 - DNA, 1038 bp, Homo sapiens
tacctgggattacaggcatgtgccaccatggccggctaattttgtatttttagtagagagggggtttctccatgttgttcagactggtcttgaacttttgacctcaggtgatctgcccacctcagcctcccaaagtgctgggattacaggcgtgagccactgcgcccagcctactttaattttttttttgagagagggtctcactccgacaaccatgctggagtgcagtggcacgatcagggctcactgcggcctccaactcccaggctgaagggatcctcctgcctcagcctcccagcatagctggaaccacaggtgtgtgcaaccatacctggctactggctaatttttaattaattaattaattaatctactttttggggatagggtttcactacattgcctatgctggtcttgaactcctgggctcaagcagtcctcccaccacggactctcaaaatgctggaattacctgcaggagccaccttgtctggccctctttgcacttcttagaaaagtgactgagagatcctgtcctttgactcctgtgaagaagcaacccttccctcaccccttcagaaactacctggagcccctctttcctggggctggtattctctgtccttatacagttttaaagaaaaacttactacagtgtcagcttttgaccagtagactattttgccatttctttaatagtaacacaagcaaatgaaccatctcctcttgactatgctcttcccaccgacctctttatcacgtgaaataccaagctcactgattcaatcagtgggagataaaggggaagcctttatcaggcaggataagttggtggggataaactgatcagaggacttgcggggaccatcgtgcttgtggagtgcacagatatcctctgtaatagctctgaccaggttctgcaagttcccagaactggaaaccaaaggaggtttcagctcataaaaggtgcctggaagaactaaggaaacggggggttagaccctcttgtaacatcaaatagtgcgggggaaggaggtg

SEQ ID NO: 129462 - DNA, 1231 bp, Homo sapiens
tgggaggaaaacccaagaaaatttgcattttgatgggggtgggggaagtttgagggctatcatatagaagatcctttcttttatgttttgggactcagttcaagaggagctgcagtgggctgactaacatcagcaaagacagcccgtatatccttgggctctgcaagcagttactccaagtcttgtctgcagactgtacagtggaacagccatccaaccccaactggggaaacttcattaaggcagtgcaaagtaatcagtttcagtcctggcctctggctggcttgaaggacaatcccttctcagctgtaggtggcactgttgtatctattgtaagaagcgctgtacttcggctagctacatcactgctatttaaaatggaggaaaaagagaaaaaaaataaaatccaactccctcttcctccttgtcccactccatctcctaacatgcactgtacaccctacctgggcaaacctcctccatgccacccagcggacattatatgttgtttaagcttatatgttttgtttaaaatcagtggttctcttaggccctttgcagtgtatgtgcaatttagctctgggatgtttcatctgaagctcaactgcctgagatgatacttgcttctccccattctcctcccctctaccctccctatttttcctttccctgctataactcacattcacatagtgatgggtggtattggaagacagactggggaatagtctgtgtcttggactctggaagaggcactggttagtaatagaaataaaaaccgcaggagctgagtggcagtgtgtgctggggagatggcaacttgaccgaaatgggagcgtgggaagagagccaactcttgcttctcccatttcattctttctggcagttcagaaaactggtttcccctgggttgacaggcttgggccaaatatgagaattaaattctgacatctagttagaggtagtgaggttgaggtggtggaagaagaaccactccttaggagtgcctcagcttccccagtgctgagatggaacgttgtactgacccattaggcaaagccttatggacaatattaaaatgatgtgtatgggaaaaaaaagtgataggtttaggagatgggagctaattctcaaaacattgtagtatataatgaaaagacagaaaaaatacaagaaaaataggtaatatttggatagcaacttaaactttgcaaagttctcccaccctcaa

SEQ ID NO: 129463 - DNA, 1082 bp, Homo sapiens
taaactttctcagtaatgaggattcatttgtctacctcaactgactgagcataattatggtctgaatggagctcattttaacctttaagaatctcaaatcttgtctttgtaaagttcaaaagagcttgctggtaccaggtggcatttagagagtaaaatcttttcttagtcatcagaatatataagttcctcctactatggtgtaaaggcgagtttttaaagacaccacagtgcaaaaggactgccagggtgaaaagccgagagtgaaatggtttcttcagatgatttagcaaatctctagagaaggatttgtcttaagaactcattgcttaagttcagcatagcggcactcgtgttctaagagactaaactgcctcaaaagggagagaaaataattgtctagccagattgtatttgtaacctgtttatccagcagatattggatgaagttcagcacctctggtgtgtggcctgtgagtgtggttgtgagtgtgcacatgtgtccagcctagaagacgacggcctgtggattgatgacaagcgtttatatcagcctgaagagaacctccaaatctcattgctgtgtgatatgccacgttttgtcctttggtggcagacttggataacaacatcaattcatcattttatttgtctcctaacacaggtgggctgacctgcagctttatgatgtaaaagtttgtgtttgtatttgaaatattgaaaatgtatttgaatcataggcaaccacaacccaagaacatttttgttggcaaaatgatttaatatatgcataaaatatttaaaaattttatcaattctaaaaaatatatttttctttgggaagccaaggcaggtggatcacctgaggttgggagtttgagaccagcctggccaacatggtgaaaccccgtctctcctaaaaatacaaaaaattggctgggcgtagtggcaggtgcctgtaatcccagctactcaggaggctgaggcaggagaattgcttgaacctgggaggtggaggttgtagtgagccaagatcgcaccactgcactctggcctgggtgacagagcaagacaacgtctca

SEQ ID NO: 129464 - DNA, 1049 bp, Homo sapiens
ttttcttttctctggggcaatatcggtgaaatcttttattcattttcttagttatttttgttttgtttgtgcacatttcagctccatgaagttatgcttattttaattgttttcattatttgtggaagcccggttgtattttgacaagcatggcttgccatctggcatacgtagaatctaatcttgtcttcaccatttactctctgtgtgacctggaggaaatcactgtggcagtttcctcatctgtaaaatgggcatagtcaagtttatctcctggggcttgaagtaacatatgtaaagtgccattgatttgcctttaacttcagttttgtttgtgtgccttaacttttatacacctatattgtaagtagtttttatttataattacattttttttctcatcacaccaagaccttctggaaacaaaatagtttaacatttctaagggattagggatgtatggccagataaatgggatatgtccatgtactgagtccattgtttggaagatggggtgggtagagatagaagatttccttgtggtttaatataggatcaattttttgttaatgattcatggaaattgaagatacaacgtgtttttttattggcaggttgtgaagatttcagtgtacatctatttaatcactcttcttaataaatttttgaaatcctcagaataaattgtcagtaaagaggtttacactgatttgtcccataataacatgataacagcagtaagcttgccctctgagtgttaaattgaatattgacatataatagatcaaagtttatatatgtggaagttgttttttttctcccccctaacatcagaattgcttctgggtcagcaagagttgactggaagttaattggttgaattagcacagctaataaataacccatcagagtgtcagactcagatgcgtagacaacggatgtcaaggagtcccatgtgatcggtgccagcactttccaacataggctgagcatttgtcagtgtacttcaggcactttcaagtcatcagcatggctgtacatattttgag

SEQ ID NO: 129465 - DNA, 1049 bp, Homo sapiens
attggaataaggtttccgaaatatgttatgatgggtgggagtgtggaattgcaagcaaagcaaagagtgtgaccaaactggcaacgttggaaactgatcatagactgtttgaggaatggcaggtcccctgataaaagcagtgccaggagagagttgctaagcctggaaagagccttgcaagagtattcaaagaataagggcttcgtttcacaggcagtgaggaactgtcgtcatccttaagctggacagtgatgtgttcagactgctgggtctattcttcctccgttctttccttcctttcttccctcttgatgatttccatgctttgtggaggttgtgttagagtaaaaataaaaaatacataaagcgtggcactgtcattctctgctagtggagatgcaaactgacacagctcttctggaggaaaaataggtgatacataacaagaccaacttttaactcaggatcttactttcagtaatttatgcaaaagatctacctgcaagaatatgaaaagacaagtggataagattatttactgtagtattcttggtaatagcaaaatattagatgttttgctattacctaaatattcacacctaagagaatggttgaataaatgatagtgcagctacacagtggagtacaatgcaactgtaaaatagagtgaggaaagttactgtgaattgattgctattgaataatgtccaggatatgctgtaaagtggaaaggcaaagtgcagaagggttactctgagatattccttacttaataaaataaaaaggatatatgaaaaataagcatgcacctgctaatttgtacaagagaaatactggaaagataaatcagaaaccagtgaaataaattacctataggaagtggatgaggaaggagtagaaggaagaggaccgaggtagtagagatgaggaagaacagcacttctcttatgccttagtttagcttggcctttaggaagtagagtagactgggcatggtggctcacgcctgtaatcccagcattttgagaagccaaggtgggcacatcacc

SEQ ID NO: 129466 - DNA, 1105 bp, Homo sapiens
ggccacacatgaaatacactaacactactgatagctgatgagctaaaaaagaaaaaaaaaattacaaaaaatctcatgttttaagaaagtttacgaatttttgttgggctctgttcaaagctgtcctgaactgcatgtggtccatgggccgcaggttggaccagcttggcctatcccataagataacttagaattcaagaacagaacttaactttgaggtcaataatgtctttgtagtgactcattactactttttactgattacaggtcatctagacaagagtccttatctgcctgatgttttctgatctagattttgtactttgttgaggggcctaggtgaggaggcattattagtctaagcagcagatattaagtattatacgacatggttcagacaactgctgtttgactggtactagttactaatgggacagtgagaagacctaaaagtttttctttggttaagtgaggagaggctcaagaaagagttagcagggatggacaggggaaaagggaagcctgagttagtggaaaataatttaaattgccttagatttaattgatagagtttgcaatagaaaggaaaggcaggcaatgcatggtcacttgcagtgaacctggtttaattaacctcgcatttccactagtgcagtcttttgggtaggtgaggggaaaatgctgtgggatagaattgaccttgccttcctacacatgcatatggaaatgccacgcaggaactttacagttaatattgattcaatgtcagaagcacaacattgattgcaatggaaaagactgttggggggaaacttctgaaattttcatttggaatgtgtgaaagtgcaagccctaattattggcatatgtggcgatattgagggtatgcactcaggcctgtgataatcgacttctcatttgctatagaggcaactttttcataccagtttgattatgctttatatatttcttactaagaagaaggaaatgcttgctatataaccaaaagagattcctattttaagccttttctatgtcacaatgtatgtgtgtgtgtgtgtgtgtgtgtgtgtgtgtgtgtatctgtaaatataatcttagaggt

SEQ ID NO: 129467 - DNA, 1052 bp, Homo sapiens
caataaatgcctcttaggtggaaaaaagactgtatttattgaaacaggcttgtaattggaagataaagatttggcttacatttatgcctcttttagctcttgctaccttttgttcatatcacctttccagactccattttcttcatctgtaaaataaaggggaaagggttcaatgaagtctaaggtctcttttaatcactggctaataaaaccagaagtggtgactagaaaaatagttcaaaactgctagctgatgcgctacagttatggggcaaatagctattgcattattccagctgatcttcagttcagccatcgtggtataattccatttagatccaatctagatacgtttttgcagggcctctatcatttttcagaatgtttgaaaaacaaaatacatttaggcttctaaccttgagtttggaaatctgaaatatacataagatgatatgaacgagcctgactttgattaccatagagtggcatagctgggggctgcaatgaaaaaacctataaaatttaactcgagatgaaccatgacaggcctccttaatgcgcggatgctttggctttcgagtgtattctttcactgtattatacaaaatgtggataaagtgataagtgggtttaaaaatgattgtataagtgaagtgcaccatctcactgtaaagtatttggccccagggagaccacaaatgtgatgcagcctcatttcctttcttttaagtgcttcctggggctgctcagggttgctttggatgggttggttggtttgttgtttgctaagctaagatcatattaagtcttgatttgttttttttggaaaactgttatccaaaggggaattttggagaagcagaaataaaggcagagagattaagagacaggaaaaagaggaagatgagtgagagatgagagattaattcacgaccctgtatagattattcgaaacagtttaaaagaacaggagagttatattggggggccattgggcttgcttgaagtccagtggttcgataaaaattaaaacacatgagttcatgagtatg

SEQ ID NO: 129468 - DNA, 1082 bp, Homo sapiens
cttccagaaaaatagaaactgagaaaaatcattgccagcaggtttgctctatatgaaatggtaaaattttccagcataatcctatacacaaaaaattgaaaaatgctagtaataaaaattatctgagaaatataaaacatattttactaattttataatctctttaaaaataagtgactgcttaggggaaacaaaataaaaagtgtaatggatttattacatgttggagaaaaatgcatgaaaacaacagcacaaggtataagagaggaaaaaatataatgttcaaaagtttttatactatttgggaagtgctataatataatttgaagataggctgttttgggagcaaaaacggaaatttccctctaccaacctaggtcctgcgatcaggggcctgcaaattaaatgacaatagacagattaacagaagaaaagacaaggtttatttacacaggcatgaaggagcatttgatgaagagtctcattgaacagctggaaagaggggtttatataccaactcatagaagaaagcaagggagaggaaaggacgtctatggaaaaatgatgggcttttaggaagactaatggcaggtctgatagtttgcgataatgcttgtctgtgcaatttttcatcccagtgctaggggttggcctccttactggttgtgaagctcccccaaggagggaatttatggcagtatcactctcagaaggctctgactttagtcagataagggaagctctgaaaggcttcttttgcttctgctacaactcaaaatatagttgcttccagtgcaataagtaaaaaatgtaaattgtgaatcacaaagcaacaattaaaaaaaatatatagctaataagccaatagtggaagtaaaatgaaatcacacagaacactaaattacttcaatagaaggtaggacaagaggaagaaagacacaaacaactgagcaaatagaaaatgagtagcaatatggtagccatggaaacacatgagtcataaaaaacttataaattagattttatcaaagcaaaaactattttgaaagatacagttaaaatttccaaatgcaaaccacaac

SEQ ID NO: 129469 - DNA, 1104 bp, Homo sapiens
ggcagaggttgcaccccagcccgggagacagacagagactctgtctcaaaaacaaaaacaaaaacaaaagtgatgaaaggataagacatgtggggaaatcaccttgctgctgtcctttgctttcatcattttgaatacagaaaagccttatattaaattttaacaaaattcaaaggctgaaataaggaagaaaaacgaggtccctttaacatgctatcatgtgctcttagatgacagaaagttttatgtaccctccttttcctttctaatcttgaaatttttggagtatccatcaaaataatgagaactaaggttttattttgctgatcaattttagatattatttgcgaactatatacctgaaatggtggaactgtttgctaacaagaggaaatacaccagttcctatgaagcactcaaaggaaagaagtaagtagtgttttaagtataatttctacagtttaagaaattctattagccatatatctcgttctagacatctattgtctggcttagctgtagaacccaaggtgaatatatcagcaacatcccgtattcactaaaaaggactgtgctaaactaaataccgtaagaaaatgatatttgctacttgacccaaaccactacatagatgctcataagaaaactaaatcaactaaaatgacagataatgttgtaattcactgtcaataaatattactgattatggcactatttgtacattcctttccactaacttctcctatagccattaccaattgtcttactcattttccttgtatgggtaacttatggctaactttacataatggatcggattaaagccatgattccaatttaaaataatttagttcagttgtcttagccaaagctcccctaaaccatcgggggctcatttacggatgaggatttgccagcatgagaagtttctaccctgtcttctatagcgcctcctagatgactgattttttttccttgccacagccatgtgttcccaggaggaaaatggagtggagttgtttttatattatttcttcttggattcatgttaccttagcttccattaggtttttttttcccatctaagacaaaaagaatgaaatg

SEQ ID NO: 129470 - DNA, 1008 bp, Homo sapiens
agcctttccctagtcaagggtctataaatggctcagccaaggggaatattccaacaatcccttgtgaagagatgtgccaactcactgagatttctatcctattgcagtgccatcggtaaagagaatgaaaaaatgtctgaagggaatctcctctcgtatatcagggcaggattctccgccaagggtatctgcaagcacttcgagcatatcaaacttcaccaccaggtaaaagctgcagagaaccctggtctcctatagtttttttgagaatcagtgggccatatatattgtatttaaaccagaatatttgctttataaactcctatactgaccaatggaattgttcctccccaaaatgagatcatctccaccttgcccatatcattaagctaatcaaatacacctctttcttccattgctcaaatcatctgtacccataataacccaaaagttagatacccaactttctttcacaccacctttcaggcactttagaaatgtaagttagagccaaattttagcagctccaaatagcttttctgttgttaatcaatcccctatttccaatacattcaagatgtgattgtcttagtttttgcatctgcaaaatatgggcaacaaatccctcctccctgcccttttccttgcagccttttagtacactaaaacctccactaaccagaaagaagagttggaggaggatgacctgcttagttgattttaattagaggggcaattcaaaagttctattattccaaactttaatgaaaatgactctgtaatatcttgacaacatttcagtttattagggataatataccaggaagatctttgatgattaaaaactgtgattatctaagggtaaatatattatcaaagagtcgttatactgtggcattacataatgttataaatattttgtacgtttttaatagtgattaaatgagattaggtatttaaagcactttgctgctgcagccagtatggaaaacaatatgcaagttcttc

SEQ ID NO: 129471 - DNA, 1042 bp, Homo sapiens
catgatccatcatttgatcagaaacacgaaactgtcagagctgtcataccaactggaagactattagggttgctgaaactcaccattttagcaattatgtcttattctgaactgtacgaaataaacatccgttgagcaggaagccaaacatattttcagtgggaggcaaatctttagaaaggtcaggaagttggttgcagattgagacatttgagaccaaacgatggaaatagcagaagttttattagatcatatttattaagaatgcagacaggttgccatgattgatatttcccttatgatacttgatatggaatatagttcagaataccaaccaggtcttttgttaagtttaggatgccttctagctttaaaattgctaaggaatttgaaatgtgagcctctaggaaagaaatatctggattgcaaaattcggggtatctttaaacttggtttcatttgcaaaagggtcaagtagaaatgatcaatttaagttattttgaacaaataggacatcctccccttcttccaatagtcaccatctttcttaatcaggagacagtttagtgccacagtttcttggagaaattgcctctctagctgtgcccattaatgcacttggccatgtatcttgtttctaattgtttagttctactcagaaaagcaattgttggactttagacatgttacattaaataccgttagaggcttcattattcaagttaaaactaatcggattagctagagacaattatttaatagatttggttaagattcatatcactctaggaaggctctccagacaagtagctttatttcccctcgcagggagatctctcttggaaggagggtacagtacagtatttcccagtatatgctaatttggtaaactttaattgttgaaatgtcagatgttacttatttatcctgttagacttcatcaatgcctgtttcatagaagattgccatttaacccagcaaaggactggcataaagaagaatgatatatccatttgaagtattctgagtctttgtgtgtcta

SEQ ID NO: 129472 - DNA, 1089 bp, Homo sapiens
agacctctcagcaaggcaatctttactttctgcagaaagggtgttcagtggcagatggaacaatggcaagagcacacttgaacaaaggaaaagcagacatatttatcccttatgcatttgggtcatccttactgctgggtcctgcatccattggctggagctggaactcacagtcttaaacttatacccaatttgctaataacctaaaacttttctaaataggtaagtgcaagaaagaatgaagaaggagaggaggttgcttacgaaaggtttaaggaagcaataacatttccacataaagaaggtgcataagctatgagttaagacttgcctgggtctgtccaggcatgcctgagtaagccaaagcaaataactgggcaaaagtgtaagaactaatagttgacaggaggctttagagtaaggagctattattcctggtgtctattattttatttttaaaccaagatgagctttgaagaggaacttttctgctttctacagagtacaccccagggtgttaaaggaatttcaaattgactgagactcatgagatcagtgtgtagccatttgtgaatgacttgcaaaaactcttccaaaggaaagccacataacccactgcctcccacactcctcctacccgggattttcaagggaagagctgcaaaatggctggatgtcaatatgcagatgcttaaatgcagaagaatctgagcacagttgatgaacttgctgcctcctggaggtccacagtgagaggcatcatgcctgaatttcaggaatgcttcaaggcacagtttgcaagtttaagggagcacggctgggcatatccactccctccctgacatcaatgccattcggcatgagattgtgttgccctgggctctgcctctttaagccgtggtaggggtctcatacaccccatcaagctcttagagagagaataccacttcagtggtagtttaacattaaacaaattggtaaagtgcaaggctcctaaagagttaagcagctcagccttcactgagctagggaggtactagaggaagtcaagtcaggttacttttctgagaaggtggctctgtcagagaa

SEQ ID NO: 129473 - DNA, 1010 bp, Homo sapiens
gctgccttcagatcttgtgttttgtgccatacccttcagcactgcttgttataaaaggaatgaagagttctcattgcaaaagtcatatgaaattgtaaataaagcatcacagacaacagagacacattcagacacaaattgtcctcccaccattgattcagttactgagacattgtattcaccagtctattcttaccagccgagaactaactccctctcttttcctaagcaaatagcatggaatcagagtagaacaaacagtattatatcatctcagatacctttaggtgacaatgcaaaagaaaatgaaaggaaaacttcagatgaggtttatgatgaggatccctttgcatattcagagccactatagacctgcccatattcttcacgtgctcttaacttgctgcttacaaatcatctcctgagatgctaactttgaacaaagaaaataagaatggaagcatgccatttttctgcccattgcttagtggttcatgaaggccacactgttttgggtgagacaaaagtctaatgccactggatcttgtgtgataaataaagaaatatatgatcaatgcttctgtaaggaaagttcattgctcctgagtagaaaacatgttaatttgagctgcattaaagaagtcctccagtacttgctggattccccaggtcaggaaatacaggtaatcaagataaaaatgagaattactcagacataggaaggaagtaaagagacccccttcagtcaagaatcttacattttcttttatcccagaacaggcaaatagtaaactagtatatatttccctctttccctccccatcgtatttttcgttattccattgtatttttatttcatttctttttataggagttgagaagcaccagatgaggagatgtgactggaattggaaaacaatttgtctataagacctgggcatatgcctggaacatagtagaggtttcataaaaatgaatgttagagtaccctgggatagggtgcctgagtg

SEQ ID NO: 129474 - DNA, 1315 bp, Homo sapiens
gcaggaaaggacgcaactgcagatcggtagccggaggccgccacggtaaaataagcgcctcgcagatgtccgcgccccggttacgttagacctgggaggcagaatccacgccctgcgctcacgggcccacgcacgcacagctgaactttgcagtcagtcaccatagttccagatcattcagcgttcaggatcccactcctccgcgtcctggtgcctgaacgcggttggacctaggagcctagaggctcgcagtttgggacattgcctttctctctgaccacgggcttggggatctgtcaggtgcaaagtgccaaagtatatgggggggagtgtggcttcaggcttgttcagagccctgtcctgtttagggccaaaggaataactgggaaggtggatgcgaggccaacgaatcctaccttgaaactctgctcgcctgctggctctgccactccagcatctgaaaggagtaaataatggtttcctttgaaactgcaggcaattaggagtgggagactctgaccagaattacatagccacaactgcctgtcatttggcatcctctgtaatttgggccaaagtactgcagctgcctctcttccctactactggtaggaaaggttcagtgacagcacattcgtgttcacaggaagacaaggctgtgttctgaaccctacccagctggcacgggttctcccttgagcaacggctgtatccggagccagtgcttcctcagtgcggtgggggctctaattttacagttaaagaaaggggaacgttgactgagaacgaggaggaagcgagttgtagatctagccttgtgttcacacgacaccaggctggatatgagtcactcgcagggagctcagcttggtgaggtcctctcgctgttgtggccttttctcctgcacgttggaccacacacattttcccgtgtcttttccctaggataaaggctcactgatggctcagttgggagcagttgtggctgtggcttccagtttcttttgtgcatctctcttctcagctgtgcacaagatagaagagggacatattggggtatattacaggtaaggcagagacagggagaagccggcaacttcctgttaaatagctccctttcctggtcattgctttcctagcagattctgctgaacatctctatttatatttccttgaataggggagccttttcagatggagctttttatgtcagtaaccacgggaaagagaatacacacacacacatatatatgtaaatttagaacttcacttagtagtccaagatgatgccatgggtggtgattaataaatgtgt

SEQ ID NO: 129475 - DNA, 1335 bp, Homo sapiens
ttacgtcaatcaaagcaagccttaggatagtggttcctacaataaaggaacccattatgtcactgtttattttattggttttttttttaattctttgcctaatataaagcaaagaagcacttataagtcttgggttgctttctttttagtaacctccatgaccaagtgttttgctttatgtctttatgaactcttcttatatgtgctgttgtgatgcttgtttctggattgctaacagcaagttctaaaactctgattggaattcctctctcctttaattctttctccccatcatctgcttacatgttccccaaaaaggcttttaacttcatcatttacatataacttgattagaaaggtaactctattgccaaaacatatatttcaattatttataaagtacttcaaattattcttttggttggtcatgtcattggactccagcattagtgcaggtagttgataaccatattactggacttaactgccctaatggattgccacaagcccaacagatatgacaaagtaaaacagacttcttatcttttttttttttgagacagtctcgctgtgttgcccaggctggagtgcagtggtgagatcttggttcactgcaacctccgcctcccaggttcaagcaattctctgcctcagcctcctaagtagctgggattacaggtgcctgccaccacgcctggctaatttttgtatttttagtagagacgaggtttcaccatgttggccaggctggtcttgaactcctgacctaataatccactcacctcagcctcccaaagatcacaggcgtgagccaccgcgcctggccagactttctcttatctaagtatacccatggattctgctgtctttttcttttttttttttagacagagtctcactttgttgcccaagctggagtgcagtggcacaattatgtctcactacatcctcaacctcccaggctcaagcaattcttacatctcagcctcccaagtagctgggactataggcatacaaccaccacactcagctaatttttttccttttctttttttgtagagacagggtctcactatttgagacaggttggtctcaaactcctgagttcatgcaatcctctcacctcagccccgcaaagcgctgggactgcactagtgggttctgctgtctttattccatttagcctatgtgcctatttttctccttgcaaaagcatgaacaatagttttatgttttaccatcaggcttcctagaatattaggatctagctgagaggaagaaagggatctgtagccatggctgcagcacatgtcactctctattatatgtttatag

SEQ ID NO: 129476 - DNA, 1049 bp, Homo sapiens
atcgaaccaaagcacagaggggtaaaataccatgcccaagggcatatggcaagtaaggggtggaactggggttcaaaccaaggacactggctctagaagctatgttctaagtcactgcaccgtattatcaacaactaacctgacccctgtctacagtgaagggccaggtagaaccctactagagtacttcattcttacagaatattcctttgggagaagttcccttgtgaagttagggctcatgcttcctatgttgggcccaggtctccttggttactgtctcacactgatggaaggggactgtgctcactggcatatcccactctgcccttgtgtgcactcacagctgccctctgggggctctccagacaagctggcccaccaggacactcagctcgggtgaaaggtgaaattagtcaaactctgaaatgccagaaccgtaatcctcactatcatttattcagaggcagaaaaagtggcccaggtggctgagatcacctacgggcagaaggtgatggagaaggagactgagaagaagatttcagaaattgaaggtaagcagaagtggcagtcatgcctgagtcctcctcagaccccgccctgtggccagtgggttggggagccattgcctttgccctttaactgtgctcaaggatgtcatgatctctgtgcaacagcagcttttctccatgtggagacttgagttttgaggctattgtggccaggctagcatctgttttctacttcagagagcatttgttcattcagcaaatgtggctggagtgccagtatgtgcccaggattttgttaggcatgagaaaaaggaagtcccgtagaccctgctttcttggagttcccaggctagcagggccttggagcggtgggagtgtactctcagcagttggctctcccccttgccttagctacttctgctccaaagttggtcagtgccacggttttgggctcaaagtctgttctccaggtctatgcagatattaagccaggtttgaagaagacagattttcagcacctgtcagacaggagctgga

SEQ ID NO: 129477 - DNA, 1627 bp, Homo sapiens
ggaaacttttaacttttgcacctatgctccaagatctgagatgactgtctcttacagaaatgtaacaatgagaccacaaaaagtaggtaggggcataaatataggaaaattgaaggggcaccactcccctccttctctaatatggttcaacataagtcttccatactttttttttttttaacagctgaagctaacccctgaatatctgcagctgatgaagtacaaggccattgcttccaacagcaagatttactttggcaaagacattcctaacatgttcatggactctgcgggcagtgtgagcaagcagtttgaggggctagctgacaagctaagctttggcttagaagatgaacccttggagacggccactaaggagaattgaaaaaaacttgatatgactgcaaatgatacttaagcagatctttattttttaagatgaatcagaatgttcctccctccccgactaccttctctgactgtcttccagttactgtggtgaaaaagaagaaatgaacttaaatccactccctttctagggaaaggagggtggggactgatgatggggggttttatttcaggtaagcagtttatatgacttccaataagatttgtaaatcatgggcttgacctttgacctctagacactaattttatcctttgaggctggcttaattagggatgctgtcattaaggagagggagaaatgtagagtgttacctccaactcatttgatttcccttacttgggaaaatgcagtccagtgttctcacctctgcctccaaggtaggagatgtctgtgggtgaggctcagcaactgagcaaatatgtgcctgtgagtttgccagtagagctgtgaagaaacagctgcagagaacatttgaccttcctggcattcttgtctgcatgtgtgtgagttattttagaggtgtgctttcttgagccctcataaggaagtactggtgctaggttttgcaagattttgtatacactttgctccttgccctagggctcagagtggtggtttctgactacatttctagagtcagagcttgatcaccacaactcaattatttcggcatcttttcacctatgctgtgatttgttttttttttttcttctcaaaaattctgttcattggttccactcagcatcaagaagacagggacaaacaactcaagtgtcttaacagctgctggagtgggatccttgttatctcttagccactgcaggacctgcctgacaggttatgtgtgcacctcgagatgaagtgtctttctattattgtagagattctgtagtgaagaggtctgacaccatgtgtggaggaggaggaacgatcagtcaagagatgtcctggtcttaatgcctgtggcttgtgctgggagtgggtctgacttagtgataaaaggactctattcactaagtagcctgtgtttttaaatccagggctgcaggcagcaacgcaagtcaggctgaacattcagtctccagagacagctgtgtggagcaaatcagagttcatgcccaagtccccaggttggaatggctgtgccaaaatccattcaaagggttttctttttcattactaggtcagaacattttgagtcaccttgggagattcagg

SEQ ID NO: 129478 - DNA, 1187 bp, Homo sapiens
caagtcctgctgcagctgccccaccccaagtttctatcatttcctctttaaacaaaaaatatgttatcctacacattagtgtcaatccaatggttgtctcttatctgtctaaatagcaaaatcatgaaaatcagctgttttatttgcataggacaactaacctgtctgtgtaactttgtttttattttaactcttactagaaaatctaatcttaaaacatttgaattctaaacatgtaaaatgtgacagcctgcaattttgtagacagtgaagtaatggctgctatttataaatggaacatctatcaaaataagtaactgtttataaaattcagtttttgtagggttttccaaggaaaaatcaccttggttgaatgtttctcactcattaaactttgcagaagtgattcatattcagtactgtttttaatcactttttaaaatataaggaccgaatgcaaggaaaccaaagtttattaataatttttatataactaaaataaaatagatgtggagggatctgtgatcatataaaaagggagggttactgaaagaattttagcaatatattgattcaggaaaaggagctgttttataaatgatcattcactgttcctatggttctatgtatctttcaaaccgatacctttactatttaaagagcgtaaatagtgaaagtaagatggtcatacttactgactttatctatttaagtttgatggagataaactatatcttggctagtggctactgtgtctgtgaatgtaaccagtacttctttaagctctattcagtagggttccagccactgcttttttgttgtttctagccactgttttttttttcttgtttccttataaaacaggtaataaccaatcattttgtgtttgtatttccattcctttttatttctgcctttgtgtagactgatgattaagtaggcaaactacttctactttcaaagagccccaagggcttaatgaccccatttgtaactgagaaatgattcttgttttagtaatcattctataaatgatactgctggattgattgccgtgggttgatagctggaggaattgttttggacaatactaacatgtgaatttatgtcttagttttatttgcagtcttgctaagtaaaatgagtctttgtatctacttttttattaaagtgaaatttagcaatag

SEQ ID NO: 129479 - DNA, 1032 bp, Homo sapiens
taggtaacagagcaagacttcatcccaaaaaaaaaaaaaaaaaaaaaaacaagaatcatagtaaaataaaattaagaaagacatggagatcttgagtaactgaacttatttcccttaaggtataaaaatttaaataacctgtatatattttgtaacagctttattagggaggtaagtgacttacaatacattgcacatatttaaagtatagaattcgacgagttttgatgtatgtttgcacctgtgaaaccatcacaacaaacagtgagcatatctatcacccctaaaagtttcctcctgtcccttggtaatccctctcttacctgtcccacttctcttcctcaagaaccacttacctgcttttgtcactgttaatgtacgtgagtttacattttttagagttttatccaaagggaatcatgaagtatgtactcttttttgtctgacttctttcattcagtgtagtgattcatcatgttcatacctgtatcaaaggttcaattctttttatcattcagtagtattccattgtataagtatattacaatttgtttatccattcacctgttgatgaatgttgggttgcttctgatttttgactgttgcaaataagttgctatgaatatttgtgtacgagcctttgtatggatatatttccctttttcttggaataaatatataggaatagaatggctgaatcacaagttaagtgttatgtttaactttttataactgcaataaaacaaacataaaatttactgtcttgatcttttatttacttttttttttttttttttttttttgagatggagtctcgctctgtcgcccaagctggagtgcagtggcgtgatcccggctcactgcaacctccaccgcccgagttcaagcgattctcctgcctcagccttccgagtagctaggattacaggcacatgccaccacacctggctaattttttacgtttttagtagagacaaggtttcatcatattggccaggctggtctcgaactcctgaccttgtgatccacccg

SEQ ID NO: 129480 - DNA, 1029 bp, Homo sapiens
ttaaagacatgagccactgcacccggcctgggattgtgtctttcatctggaaacccccaaaggtcaccatcactcctacaaggagtattttaaatttttaagacctaagattatataaatactcttagatcttaaaaaaattacttgatgttgcattgggagagaatggaagataattactgtgagtgggccaggtgcggtggcttacacctgtaatcccagcacttgggaaggctgaggcaggtggatcacctgaggtcagaaattcgataccagcctagccaacatgatgaaacttcatctctaccatacatacaaaaattagccaggcatgatggtgtgcacccatagccccagctgctcgggatgctgaggcaggaggatccctcgaacccaggaggtgaatattgcagtgatccgagatcgcgccactgcactccagcctgggcgacagagttagactccatctcaaaaaaaaataaataaataaaaaattatggtgagcaccagtcaatgaatatctttatggggcttggattaacagtgtaacatagtgtgaatagaagcatgggctttgaaatcagacagaccttgggtttcagctacactactttccagtattgtaaccttggataagttacctaatctctctgtacttcagtttccttttttggcaatggtatcatgagaatgcttacttcagagggtgtggttaggactgaatatgataatccaggcaacattgttagcacagaaccctacacatgttgttagctattcgttaagaataaatgtatacagatcaggcatttgattgcaaccatcaaagcaccagtattcaccaaatcttagtatgcaggaacacagtagaggcatctgttttctagataacgtcctagagtcagactacctgggtttaaatcccaattatcaatagaaatctgaaatcaactataggtcaagtctttattgtatcatttcttgataattagctataatatgccctatttaaagactgaagtaaatgtt

SEQ ID NO: 129481 - DNA, 1035 bp, Homo sapiens
atttaacatgtactttatactaaattttttgcaactccattaaattaataaaactataaaaattcttgatttagaaaagtaattctcaggttcatctggcattttggcaatgcaaatcttcctggtatcccaaaaaagcaagattttttcttttccatgtctcctagctgttttcagctgaaatcctgagatggaggaaagagaatccaactgatagttcttttcttgagaaatttagaacctgaccagaagcagagcaacatagaaaaccccaagtataaagttactctttaggacttgaggctctttcaagaggttctcttgttgggggtcacctcttctgtcgtaaggaagggaggaaaatggagccttcctctggccatttacccttgcagtatacctgttttctgtttcttttcttgaaggtaaacatggccttccaccttcagagaccatagccatcgtggagcacataaacgccaagtgtcctaacctggagtttgtggggctgatgaccataggaagctttgggcatgatcttagtcaaggaccaaatccagacttccaggtactggggggtcggggagattgctcgtgtgctaaagaagcagggtgctggagtgctattgcagggctggctgcagtggggattgcagagtcatcccagacactgcctgttgagtgttctagccctcttttgaactcttctcagaaggaaaagggaagaacaggtttccaaagccccacaaacctttttcaactcaacttgaacttggctaaaacatagtctttagagaatatgagatttcttcctctccagtgactaatagttttctcgaaagtgggatagtttgcaaaaaaccctttcagtaacgtctggcaattttggcaggccttgaaatcataaggaatacataaccgttgtcagagaagttcagattcagacacttttgggcatcgttagagaaggcaggagtaaaataggtgtcatctctttctgtcagctgttattgtccctccgggaggagctgtgta

SEQ ID NO: 129482 - DNA, 1008 bp, Homo sapiens
ccgtattggccaggctggtctcgaactcctgacctcaggtaatccacccacctaggcctcccaaagtgatgggattacaggcatgagccactgcacccgtccgaggcttaatcttatgtgtagattcaccaacaatcttatatgtacatcaacagctgtaaatatcaactgatacaggtgtgctagattggcaacgcaaatacatgattttctgaaatagcaaataacttgataaagtttcaaaaatcaaaatataaacttgcattcctggaaaattgtatttcttaaaacagtgcaaaaatacattgcattgataagtaaaatggaatttgatcagataattataaggatatttttttcatctacctgaccgtggcacattggagaggtaggtgggctgtgctgtgtggctgcgtctcacactggacgtctaatgtccttgaccccctccgagctgagtgccagccacactctccaaccactggaaatccagagaaacccaacttgtttcctatatatgccctcagaggcaattttacctctgaggagaacaatcatcctgaagccatcttcagctgtgttattattcatagaaggctctgtttttgtttttttttgttttttttgagatggagtttcgctcttgttgcccaggctggagtgcaatggcgcaacctctgctcaccgcaacctccacctcctgggttcaagcaattctcctgcttcagcctcccgagtagctgggattacaggcatgtgccactatgcccggctaattttgtatttttaatagagacagggtttctccatgttggtcaggctggtctcaaacccctgatctcgtgatctgcccacctcggcctcccaaaatgctgggattacaggcgtgagccaccacgccccgtccatagaaggctcttgagagccagaatgggggcacagcttcagcactggctccattttattattttaaacctggtcctcgataccttctcttttttcccacag

SEQ ID NO: 129483 - DNA, 1024 bp, Homo sapiens
catgatgctgccaaatgtacttttgtaaacttaaacattatgattcctgtattatttcagtgagagctacagtgtgatatttcagagtctattaaataaaaatgtgagtttgaattacaccatctgtgccaattacaaagcaattaaaagatttattttttatgatctggtgtagtgactgaatataacaggtgggggcattggaaccgacgggaagcagctatgctggtgccttggcattgtgccagcctggctttggaggagggcttccctggggtcacagacgcagccaaagctacaccatgggtgagagggattctgaacttctaagggcaagaaaaaggacatttcaagaattacaaaaatagttacccctcactgcaagagacttttgaattgcctctagatggcgacattggctaacctgagggacaagcactggctctccactgtcagtagtttaccttatgagggactcctggttactcagtctggtggaggccagagaggacatgacgctctcaagtgatagtgtgacttgcagagcctcaggggttcgataccagctagcctgggcaacacggtgaaatcttgtctgtaccaaaaataccccgcccaaaaattagctgggcatggtggcacatgcctgtggacccagctactccagaggctgaggtgggaggatcgcttgagcctgggaggaagaagtcacggtgagctgagatcgcaccactgcactgcagcttgggtgacaaggtgagaccccatctcaaaacaaaacaaaaacagcgaataaggaggaaagccagggaaggctcaatcagatctagataagggaaggacaccaaagtgtgtctagggtgtccccagcaggatgggatattttgcagagagaaaattgagccaggttgtgagtttgtctttcgttacgcatgatgggtggcaggttgggtttcttccagattttcatgaaagccagttcctggagtttggacggcttgctctcctggattgggcccacctg

SEQ ID NO: 129484 - DNA, 1054 bp, Homo sapiens
gtgggaactctgcttgcttctctcccacaaaatgggaccccagccgggagagagttctggaatggactcggtgtgccccctctctctggccagatttcaaactctgaagtagagaacaggagactccagggactggccctccttcctgtgaaaagcttgacattaggagtgggagaagggcgtgggagggagggaagaaagaagccgaagatgcctggccaggccagccagggctctggggcagagctagtgtgtggttgggcaggacatctacctggctggcccccgtgaggttttagggtcagaggacggagcaggttgaggaggcgtctgtcttgtgggggttgaagagggccgaggctgaccctatgtctgtgttggatggagctgtgggtccaaggctccctccttccctgcccaattgtggccactttgcctgctttcctcccaggggacagcctagaatggtgggaacatttttctgcccattggatgaagctgtgtgtgtgtgtgtgtgtgtgtgtgtgtgcatgggcctgcgtgcatgttcatccccatcagcagtgctgtaacacccagctttctacctgcccataaaaatgccagacccagccaggcacagtggctcatccctataatcccagcactttgggaggctgaggcaagtcgatttctttagtttagaagttcaagactagcctgggtaacatagtgagatcctcacctctagaaaaacttttttctttctttatttatttttatttttaatttttgtttttgagacagagtcttgctctgctgcccaggctggagtacagtggcatgatttatcttggcttactgcaacctccacctcccaggttcaagcgattctcctgcctcagcctccagagtagctgggattacaggtgcgtgccaccacacctggctaatttttgtttttagtagagatgggatttcaccatgttggctaggctggtcttgaactcctggcctcaagtgatccacccaccttggcctcccaaaaagctgggattataggcatgagccaccg

SEQ ID NO: 129485 - DNA, 1150 bp, Homo sapiens
agacttaaaggacaagtaaggtggcctgaggaaggtgaaagccctgtgtccgcaaccgcgtgggctgtgggagtgtgtgggttgaggcgggtgggtgaggggtctgtggagcccagggcctgctccgggagcccctctcccactgggaacgcctcctcctagtcctctctccatcccgcccgcctccctcctccctcctcccttcgcctggcttctgttccctccatctgcatttctgtgttcttgtccctgagcccccgccagcctgagtcctcaccatggagcatgacatcactgctcatccagcactcagggtgggccaccacagagggctcacattttccaccatcatccgcacccaccccctccagggtcccccattagactgaggctgtccttggcatctcaccgcatgcccccagcccagcactgtgccctgcctggcaggtgcctagtacacaccctgtcactgctgctgctgctgagtcccggctgagcccacctccctgacaccctgtgtgtgtctgtgtggacgtccctctcccgctgtaggtggctgtggcgtgggaaacctgacagagccagtggccgtttcgctgcggcactgggctgagggagccgaacctgtggccgcttggtggagccaggaggggcccggggaggctgggggctggacctcggagggctgccagctccgctccagccagcccaatgtcagcgccctgcactgccagcacttgggcaatgtggccgtgctcatggtgggtgtgaggaggggtgacaagtcgggggggcagggacacgggctgggtggaaaatgggggtgggtgtactctgaccatttgggaccatggagaaatacagaaaggactgcagccctaattgggccccatgagtggtgggatgtggggaaatggccctttggcctctcctacctctccatctttcaggagacagggaggtccggcctccatgcctatatccagatagttggatctgatggatctggaactcccgatggatctggaactccctagcctggccttcacatcctgcactttctgagaccagatttttttttttttttttttttagacggagtctggctttgtcaccaggctggagtgcagtggcatgatctcggctcact

SEQ ID NO: 129486 - DNA, 1065 bp, Homo sapiens
ttcaagaccagcctggccaacatggtgaaaccccgtctctactaaaaatacaaaaattagctgggcctggtggtgcacacctgtaatcccagctactcgggaggctgaggcaggagaatcacttaaacctggaaggaggaggtttcagtgagccaagatggcgccactgcacttcagcctgggcaactgagccagactctgtctcagaaaataataaaataaataaaacaaatagggatggttctgagagaggcagcaattcagtataaggtttgggtttgatcagacgtatgtttgaggtagcctctaagagcctggataaaacttgggcttggccctgaatcaaaccagcctgcaaaaactagtgggctgaaatgtgacttctttacacaaatgtttttgtgtctttagaatgactataccaagtgtcactcctgtctatgcagaaaggtacataatttgtgcatctgatatctgaggcaagtttagcagatctaagtaagtcctagcagaattttctaggagttgcacgatagctcctttgacccctctaactcttgccgtgggtttttcctaggtctccggcgagtgagagacctttgtcgagttctgcagttgccaccaacatttgaggataccgcggttgcctactaccaacaggcatatcggcactctggcatccgagcggccaggctgcaaaagaaggaggtgttggttgggtgctgcgtcttaatcacctgccgacagcataactggcccctaacaatgggggccatctgcacgctgttgtatgcagatttggatgtgttttctagcacttacatgcagatagtgaagctcctgggactggatgtgccatctctgtgcttggcagaactggtgaagacctattgcagcaggtacgtccctggtgggagacagtaggatgggatgggatgggtccttagacctgaatcctttgacctttggccatctctttttttttttcttggagtcttgctcttatcacccaggctggagtgcagtggcacgatctcagctcactgcaacctccgcctccggggt

SEQ ID NO: 129487 - DNA, 1040 bp, Homo sapiens
tcggcctcccacagtgctgggattacaggcgtgagccaccgcgcccggctagcgttccttttttaacttcttaaggtactgccccacgtgtaaagacgttctcccctggtgaatgacttgtttttgtgtattttctttgtctctcgtgatgcatctgcactgacctgcagattttattttgtcctttttgcagactggaagtgtctccagaggcgcaacccacagccaggcttccttcccctactgactccccttcctctcttcctcctcttccttctagctctggccaggcatctgtcccctctgaattgggacatggtgcagacacacagtcctctgagagtccttctgtcttctcctctctctcatctcccatagcagctcccatttccacatccactccaattgaaagctggcctctcgtagacaggggccaggccaagtctgaaggaccacccttgctccctaaggcagagttgcaaactgagagtttaacaccggttccaaattctggttcttctgccctgggatcacttttcaaacagccatcctttccagcaaataaagggacagaagattctctgatgggcaggacccgtgagacaggcacagagaagaacaccagcagccttgagttggaggagtctctcccagagcagcctgaaacagggcgacaagaggaagaacttccgagattcccctgcaaaaaacaagactacagcccatcatctggagaagcccaggaagtaccgtttgccctttcactcagcagtgatggagctgtgagccctgttggggagcttgcagcaggaggagacagagacttggagagtcaggctgggtctcttgtggagagcaaagccagggatgcagctgaagaagtggcgccccctcttcccatgggagcatcagtcccttccattgattccatgatgcggaagctggaagagatgggtctgaacctccgcaaggaccagaagaaaaccaagaagcgtgtgtcattttctgagcagctcttcacggaagaggcagtggcgggg

SEQ ID NO: 129488 - DNA, 1016 bp, Homo sapiens
gagtgatgaagggccatgttcttatatctattaaaactcaagagggaatttggttgcatatgaaaggacttaggtattataaagggttagatacttggaagaactgcaagtttaataagatgctgaaataagttgccaacagaaatgttggttattaaaaaaaagaaaaaagcaagggctagatagttgtttttctgggagagttggatgcagaaaaacgacatagatgaccacagaggtccataatccacaaattataagcaatgggtgtttgtttttatacctttaggtttcctaagaacatttagattttgcttaataggttggaaaattcaagtaatgttattactgattacatttttcttttcttggaatttcccttaaagataatattgagccttactggaaacctccccaggtctttcgaagccacagtcccctcccactctagtgtaggaaactgagatagctcagtgctcaagcctgaattctctgtaggttctagaataaacaaccctaaactgcttataacagaggaatgaaatgactaaaaaggatgagagtccttcagagttgttctggtgacatggaagatattccctcatggtttttttttgttggtattgtttatgatttcatttgtaagacattcagttagtatggagaaagttctacctgctttttttccatcttcttgtttctaaagtttatcctttttttttggagacagggtctcactctttcccaggctggagtgcagtgacatgatcacagctcactgcagcctcgacctcctgggttcaagcaatcctcccagctcagcttcccgagtagctgggactacaggggtgtgccaccataccgagctaatttattttttggttttgtttttgtagagatgggatctcactatgttacaggctgtgcttgaactccagggctcaagcagtcctcctgctgtagcctcctgaagtgctgggattacaggtgtgcgccaccttgctcagcctcatcca

SEQ ID NO: 129489 - DNA, 1030 bp, Homo sapiens
taagggtgagggctggagcaggaagggatgggagaggccctgggtgcctgcagacctgctgatctgcaggattcggcagggtgcttctctcctgcccatgtggcctttttactccattcattcatcaacatttactaaggacctgatgtgtaccaatggcggtggctatgccaagggttgccttaggggacagagtgataggacatttgttttgcacccaggccaatgagttatatgaactcttccagattgcttggggagataagagagcatcaggggcttgcaactctggcaaaatctgcctgggagcctccctggtttgcttaaatgaatatgagatcaaacctccctcccactcataatcatcccagagcctctggcactctgttggagacctttgaaggtaagaagagtggactggcaatgagggaggtttgagggcaagggggacctcacaccctcctttctcattgtccttccttggtaggaagcagagtctaaaagaagttgtagagaacatcatgctaaccaaggaaaaagtgaaggagaaactccagctcctgggaacccctgggtcctggggtcacatcaccgagcagagtgggacccacggctatcttggactcaactgtaagggtctagggggctggtgtcccccctttctgacctttggcctgtatttgagcattaaacttcactgactaggtgaccagttcctagcttcactccagattttgattctgtcctctggaaaatgggctgctttaaagacacttctggacccccagaagtaccgacactccctatccttcataaaccagcctgggtgcccggtgcagtggctcatgcctgtaatcccaacactttgagaggccgaggcgggtgggtcacctgaggtcaggagttcgagaccagcctggccaacatggtgaaaccccgtctctactaaaaaataaaatatgaaaattagccgtgcatggtggtgcatcctgtaatcatagctacttgggaggttgaggcaggagaatcg

SEQ ID NO: 129490 - DNA, 1082 bp, Homo sapiens
caagaagctatgcatggaccccgacatactcctcaatgtggtggaggtagaggggccccgctcagaaactcctccctagagctgacttacagcctaatgttcctctcctccccacacctcttaagtcatccaagaccttttccaggtttgaatttgcctggcccttcaatggtaactaacatggaggagcacttcacccccaaatgccctggggccgccactcctgggtgggggtgaagcctgatgagaccgtctgtacctgcagcagatcccacatggctgtgtccttgtgatggggaacattatcgactgcaagttgacaccaagtgggtgggcaaagttgatgtccatgataaaggtaaacccaatctcccacccgaccttcctgtctttgactctctgctctctcctccatctgtctcattctttttttgttctcctttctcctacagagcaagcagatattcccattttttgatattccctgtcaaggtttatacaccagtgacttggaagaagatactagaatcttacaatactttgtgtctcaaggctttgagttcttctgcagccagtctctgtccaagaattttggcatttatggtatggtacaggcagaagaagggagggtctgttgctgaagtggtgctgcgctcacagcacagtgatgtttttgatatctcatccttgggagggagccaaggactctagggagagcactatagaagcagaagtggggagcactgagctagaatttggttctgttactaaatctagtaacagaacccaacccagcttggcttggatcatttcaccccctcaggcctctgtttcctcaactataagatgagagggtggggctggcatggtgggtgacacctgtaatcccagttgacacctcctaatccctcctttgggaggtcaaggttaggtgatcacttgaggccaggaattcaagaccagcctgggcaacacaccgagacccggtctctacaaacaattaaaaaaattagtcgggcatggtggtacacaccagtagtcctacccacccggggggctgaggcaggaggattgcttaagcc

SEQ ID NO: 129491 - DNA, 1013 bp, Homo sapiens
gaatcgcttgaactcgagaggaggaggttgcactgagctgagattgcaccactgcactccagcctgggtgacagagcgagactgtggctcaaaaaacaaacaaacaacaacgaaaaagaatttggaggccaggcttaatggctaatgtctaattccagcattttgggacttggaggcaagaggatcacttgaccccaggagtttgagacagcctgggcaacatagtgaaaccccatctctcccaaaaattagaaaaattagctgggcctgacggtgcatacatatagtcctagctattccagaggctaaggcctgatcctgggaagtttgaggctgcagtgagccttggtcgcaccatggcactctagcctgggcgacagagtgacatcctgtctcaaataataacaataataataataataataataatttgtaatgaatgatgcagtgaacacttgctgactgtcttcccagaattccttctcccctctcccattcctaagagcacctggaatctcagggggaatctttctcggctggcaccaccctaggctctaggtggttggtttaaactgatggagtattccattctcagccatgttaagattagggatgggcgagggactcaactgaagccaaggagaaacaacaaaggggcccagggaattcaggaaaggaaaagtaaacgttttataaaggaaaaattttaaatatcaggacccctacaaacttcttttttttttttttttttttttttaagacagagtcttgctctgtcacccaggctggagtgcactggtgctatctgggcttactgcaacttctgtctcccaggttcaagcgattctcctgcctcagcctccctagtagctgggattacaggcacctgccaccacacccagctttttttgcattctgagtagagacggggtttcaccatattggccaggctggtctcgaactcctgacctcaagtgatctgcccacctctgcctcccaacatgctgggatta

SEQ ID NO: 129492 - DNA, 1011 bp, Homo sapiens
caatgaaattttttttttaaaactttgcctttgtttttctttattattccttgcaagttgttgtcaggaaaaaagaaatctgtttctttaaaaaaaatgaggtataggccgggtgcggtggctcatgcctgtaatctcagcactttgggaggccaaggcgggtggatcatttgaggtcaggagtttgagacaagcctggccaacatggagaaacccatctctgcaaaaaatacaaaaattagccaggcgtgatggtgcgcacctgtagtcccagctactcaggaggctgaggcaagagaattgcttgaatatgggaggcagaggttgcagtgagttgaaattgcaccactgcactccagcctgggtgacagagcaagactctgtctcaaaaaaaaaaagtataaaagttgtacaaaaagagtggatattattaatacagaagatattgtttaagaagatatttttcaaaagcacccctgcctgccagcatctccccccaggcttggtccactgcctggtatttttatggaagacatctggcaattccattccttggccattgccttagctcagaccttcatcgcttcttaactgaattaactaaaatagtctccacttggccttcttgcctaattctggttcccctccacaagcccccagagaatttttctgaaatataaatctgatcatgtcattccctttctcgaaatcatccagtggtgtcctaaaggttttggggtaagagtcagataggcccttaaaacgcctatcatttttatggacgaagcctacttccctaacttgatttcccaccactccctcaatatgcttttattccaaccatacttaaatgcactaaaaaaattctcatttttttttttttgtatctgtaccttcacacatggtaccctctgtcatccattcaaacacagactgtactttctgctcatctgtccaccccagcaatacttttttttttttttttttttttttgaggcaggggcccactct

SEQ ID NO: 129493 - DNA, 1091 bp, Homo sapiens
aggctgaggcaggagaatcgcttgaacccagggaggcagaggttgcagtgagccgagattgtgccactgcactctcaaaaaaaaaaaaaaaaaaaaaaaaagaatgagaagatttagaacagaaggtacttctggatctcaggacattatggtctattatagtagggggttcatgagaatgggaccctaaggaaccagaaaggggagagaaggtggcgtatactttgctagggctgccataacaaatgactacaaactgggtggcttaacacaggaggaactgattctctcacagtgctggagactaacagtccaaaatcaaggtggcagcagggctgtgctccctgtgaggcgggaggggaagatccttccttgcctcttctcttatcccggtgtttgctgacaatccttgggattgtttgactggagctgtatcactctaacttctcccccatcttcacaaggccttcccctgtctgtctgtgcccacatttctctcctcttataaggacatcggccattggatcagggctcaacctaatccagcatgacctcatttgaacctggttacatgtgcaaagaccccatttccaaataaggtcacattcacaagttctgggtgttaagacttcaacaaactttcaaggggacataattcaacccctaacagagggtatgatggggaaggggaagacagaattgctccagacctttccaagcttatcttattcctgctgcttcaaacccccatttctttttctttttcttttttttttctttttttttttttgagatggagccttgctctgtcgcccaggctggagtgcagtggtgtgattttggctcactgcaacctctgcctcctgagttcaagcaattctcctgcctcagcctcccgagtagctgggactacaggtgcatgctacaatgcccagctaatttttgtatttttagtagagatggggtttcaccatgttggccaggctggtcttgagctcctgacctcaggtgatcctccttccttggcctcccaaagtgctgggattataggcttgagccactgcatctggcccaaacccacatttctaagg

SEQ ID NO: 129494 - DNA, 1028 bp, Homo sapiens
ggagtttcttaggcctgaaggacaagaagcaacaactctgttgatcagaacctgtggaaaacctctggcctctgttcagaatgagtcccatgggattccccggctgtgacactctaccctccagaacctgacgactgggccatgtgacccaaggagggatccttaccaagtgggttttcaccatcctcttgctctctgtctgagagatgttttctaaaccccagccttgaacttcactcctccctcagtggtagtgtccaggtgccgtggagcagcaggctggctttggtaggggcacccatcacccggcttgcctgtgcagtcagtgagtgcttagggcaaagagagctcccctggttccattccttctgccacccaaaccctgatgagaccttagtgttctccaggctctgtggcccaggctgagagcagcagggtagaaaagaccaagatttggggttttatctctggttcccttattactgctctcaagcagtggcctctctcactttagccatggaatggctccgatctacctcacagcagtgtcagaaggacttcgccagggttttgggagctccagggttcataagaaggtgaaccattagaacagatcccttcttttccttttgcaatcagataaataaatatcactgaatgcagttcatcctcggccccctttccctccgtttgttttcttttcataatccacttactcccttcccttctactctgcgctggcttttgacagaggcagtaaattaggcctaatcctcactcttttcttcctaatcttcatcaaacaaaaaatgaaaagtctgtctggacgaaggggagtgagcttgagcctttgatatcttgctcccccacccttcctgaaactcttgaaatccagttgccattgagtagcaaagccacgctccccacaggacttggacagagggcccacagggggatgggctggctgtggccaggtttagggcagggggcatttgtcccctccatgctataatccagtggtgccttac

SEQ ID NO: 129495 - DNA, 1109 bp, Homo sapiens
aggcccctccagactataggcagctgcccctttaagcgtcgctactcctcccccaagagcggtggcaccgagggagttggggtggggggaggctgagcgctctggctgggacagctagagaagatggcccaggctggggaagtcgctctcatgccttgctgtcccctcccctgagccaggtgatttgggagaccccctccttccttctttccctaccgccccacgcgcgacccggggatggctccgtggcctcacgagaacagctctcttgccccatggccggacctccccaccctggcgcccaataccgccaacaccagtgggctgccaggggttccgtgggaggcggccctagccggggccctgctggcgctggcggtgctggccaccgtgggaggcaacctgctggtcatcgtggccatcgcctggactccgagactccagaccatgaccaacgtgttcgtgacttcgctggccgcagccgacctggtgatgggactcctggtggtgccgccggcggccaccttggcgctgactggccactggccgttgggcgccactggctgcgagctgtggacctcggtggacgtgctgtgtgtgaccgccagcatcgaaaccctgtgcgccctggccgtggaccgctacctggctgtgaccaacccgctgcgttacggcgcactggtcaccaagcgctgcgcccggacagctgtggtcctggtgtgggtcgtgtcggccgcggtgtcgtttgcgcccatcatgagccagtggtggcgcgtaggggccgacgccgaggcgcagcgctgccactccaacccgcgctgctgtgccttcgcctccaacatgccctacgtgctgctgtcctcctccgtctccttctaccttcctcttctcgtgatgctcttcgtctacgcgcgggttttcgtggtggctacgcgccagctgcgcttgctgcgcggggagctgggccgctttccgcccgaggagtctccgccggcgccgtcgcgctctctggccccggccccggtggggacgtgcgctccgcccgaaggggtgcccgcctgcggccggcggcccgcgcgcctcctgcctctccgggaacaccgggccct

SEQ ID NO: 129496 - DNA, 1210 bp, Homo sapiens
ttgcagtgaatcgagatcgcaccactgcactccagcctgggtgacaaagactctgtctcaaaaaaaaaaaagaaagaaagaaagaaaaagaaaatgagacacttttgtatatctatctggaaggatcacagatacatagtcaaattaaaataagcaaggtgcagaacagtgggtatatatgactgctatttgtatagaaaagaaaggataaaagaatatatatatttgtattgacttgtatctatataaaatatgagccgagggataaaccagagactaatggtagttacctgctagggagatgaaaactgggatgaaggcaagtctctattatatgcatttgttatattttgatggttgaataatgtgcacgtataatctattcaaaatattaagttataaaacacaaaatcacaaaagagacccaatagtctatagactaaggtggcaaaagagggagcccttccccctgccatctgcttgggcgggggaaaaccagactgaggaatgagagcagggatgagttggcagaggaggaagaagccaagtgtctcaacattgatggatttgctcataaaaccatccctaaccggagtcagaaatttctcttcttacagtgtcgtttggttattggcctaatcattccccaaactcaggcacactcaggtggtttgagaaatcctgtcttttttgaaaatgttaaacatttttacacacttcttccaaattacaaggtcacccctaaggcattgacatcattgaggttgcttcactttccggcacccctttcccttccccctccaatgctgatgtcctggaaaaaaattgctgaatggcatgcattgattttggagattactttttgggaatcttatgatatccctttgagataactggcaacaacactctggggtgctgcaaaaccctacttgggagtgactgccttgctggtcaacaggaagccacagccaagactctgtgcccagtggggcctgcaccactctgtcatgacttgagtgggggcagtaagaggtggaaggggccagaggctgcctcttcactttcacccccatggatttccatggatccaaaggcctgcttggggttcttcatgggcatagaagtcacttgcttgggagcccaagacaaaccctgctcatgggtgagcagctgggtccctgggagacgaggctggttctttttccttggg

SEQ ID NO: 129497 - DNA, 1119 bp, Homo sapiens
ggcagcctctggccccttccacctcttactgcccccactcaagtcatgacagagtggtgcaggccccactgggcacagagtcttggctgtggcttcctgttgaccagcaaggcagtcactcccaagtagggttttgcagcaccccagagtgttgttgccagttatctcaaagggatatcataagattcccaaaaagtaatctccaaaatcaatgcatgccattcagcaatttttttccaggacatcagcattggagggggaagggaaaggggtgccggaaagtgaagcaacctcaatgatgtcaatgccttaggggtgaccttgtaatttggaagaagtgtgtaaaaatgtttaacattttcaaaaaagacaggatttctcaaaccacctgagtgtgcctgagtttggggaatgattaggccaataaccaaacgacactgtaagaagagaaatttctgactccggttagggatggttttatgagcaaatccatcaatgttgagacacttggcttcttcctcctctgccaactcatccctgctctcattcctcagtctggttttcccccgcccaagcagatggcagggggaagggctccctcttttgccaccttagtctatagactattgggtctcttttgtgattttgtgttttataacttaatattttgaatagattatacgtgcacattattcaaccatcaaaatataacaaatgcatataatagagacttgccttcatcccagttttcatctccctagcaggtaactaccattagtctctggtttatccctcggctcatattttatatagatacaagtcaatacaaatatatatattcttttatcctttcttttctatacaaatagcagtcatatatacccactgttctgcaccttgcttattttaatttgactatgtatctgtgatccttccagatagatatacaaaagtgtctcattttctttttctttctttctttcttttttttttttgagacagagtctttgtcacccaggctggagtgcagtggtgcgatctcgattcactgcaacctccacttcccaggttcaagcgattctcctgcctcagcctcccaagtagctgggactacaggcg

SEQ ID NO: 129498 - DNA, 1036 bp, Homo sapiens
ccgcacccagcctgggcctcaggttttcaattctgtaaagtgttggtgctggatttgaccgttaagactgtttttagcgcttatgctctgccacctccaccctatgcccctagactatttgtgacgaaagaagaaacagcaaacaccaaaccagctgctcagaggccacatatacacgcatgatttcataaaaatgaatggatggttgctgtgggcaatggagaggagagacagggtaaaggggtagcaaaaacttccacctagtttttgctccattccaagaactttaaagccagaagggtggattatgaatgttagaatagaactgcctgttacgcatgtagtcttagacagggtataaggctgcgatcacctgaactctttttggcttctttagtccacctcacatgaacatatacagacacacatatacatgcacccaatcatgatgttcacaggagagagtactcttccctgctgttagaacttctgctcatcaggcggctgctgccacttctggctctgccagacacatattctaaatcacagagctattctccctggcacataacccccgagcaccaacatgtaaacagcagcctgagggcctgaactcagtgcattcagaggcccacagacgctgcctgcttccaagggcacagaacaaaggtcatctgggggctgagggccagcgcagtgctctctctgggcaatgtacacttctatcccgagttggatgacctctccggcccaggcagtactaattcccctcgggccagtcattaggacgacttcccagaacagtaggccagctgtctccacccctctgctgaccatcaaaaatgaaggtgagagtataattgggtacatccccagggaagaccatttggcagtatctttcaaatttgcaaatgcatagaccttataacatagcaaaatctatttgtagaatatactcacatacaggtgaaatgacatgtgtttaagttattcattgcaacatcatctgttagtaaagataagaagtaagctcgat

SEQ ID NO: 129499 - DNA, 1190 bp, Homo sapiens
aaaaaaatcctgcgtcactgctttctctttccccctctggcttgatccctctcttacctcctggaaggaagcctaagcatttgggcctgggttgtaggtgggactcgtgacctctcccagcctctggggagcagcttctccaatagtcagggatctcaatgaccttccttccttccttccttccttccttccttccttccttccttccttccttccttccttccttcctttcttccttccttccttcgtgccacttgcaaaagttcaatgattattcagaaactggaagaaggatttctcttcctacctcaggagagaaagaagcatttcttggtcccttcttccatttatgaccaggagctaaaagagaaggcactgctagaacacactccctgtccacccctgtctccccaggcataaggctttcattccaggccagtccttaggcaccagaatgcctttggtttccgcataaaggagatcccttctgtctccccttcaagtcctctggatctgaccttgggaaacaaatcaggtgtgtgcagagttggctgtgccacattacagaatacaagaaaagtcttagcttaggggcttcttttcagttctgatagtttttatctctctgccttctggttagatggtgggccattgccatggtgggggcctggagaaggcagactggcaggtggcaccagccacagcctggctgggagtgaaggaagttgttttggaaaagggaccaactccttggatgcctgtgtacctgttagaaatgaacctttactgcacactttccacaagatgaaaaaaaaaaaaaaagaaacaaacctttactgtgttataatggacaagcctccatttcctctctgggcctcaggttttcttttctttattttttattttatttatttatttattttttgagtcagagtctcgctctgccacctaggctggagtgcagtggcctgatctaggctcactgcatcctccgcctcctggattcaagcgattctcaagcctccacatcctgagtagctgggattataggcgcccaccaccacgcctggctaatatttgtagttttgtagagacagggtttcaccatgttggccaagctggtctcgaactcctgacttcaagtgatcttcctgcctcggcctcccaaagtgctgggattacaggcgtga

SEQ ID NO: 129500 - DNA, 1031 bp, Homo sapiens
cctcagcctcccaaagtgctgggattacagatgcgagccacaatgcccagccccaatcgtttgttaacattcaactccaattcctcctcttcgtgaagtcttttctgaccatgccctctgggagtggtttctctttcgctggcatcccaccttcactggcactcacttccctcctctaccctagtcatttggcagttacttcttatgtttaagcctctccctctagagtggaatctgaaggtggccattgtgtctgacacctcttggtatgttccagcacctggccctagcctggtgcctagcacatagctgtgtcccgtacttgctgactgatggatgggtaattgacgcatcagggcaggcattctttctcagtccttgtttaatgacattgagacttgaagagcttgctatccagagacttgttccctctgagcaagcaggggttgtgctgctgggtttaatttatgttgctctgcctttcatgctttcaaaggactttcccacaacagactggggacctaaaggtttgtgccactagcaccagggctcagagatgagtggtgacagatgcagccaagtgtgccggcccttgacctggttccgcttctgcaccagggttggagctttctgcagccatggggtctggcgcttcattcccagcttattcccatgtggagtacagtctctgggctttcacgtggaggtgtgggcttgcatctgtgagtggggggacccacccactgggtgtacatgactatgtatatggatgtgatgactcttggtgaggggcaggtgagctgggcatggtggctcacccctgtaatcccagcacttcgggaggccgaggcagtcagatcacttgaggtcaggagttcaagaccagcctggcctggttctactaaaaatataaaaattagccaggcatgttggtgggcgtctgtgatcccagctactcaggaggctgaagcaggagaatcgcttgaagccaggaagtggaggctgcagtgtgctgaggcctcaccactgca

SEQ ID NO: 129501 - DNA, 1115 bp, Homo sapiens
tcatgagcgctccaccctaatgatctcatctaaacctccttacctcccaaaggccctacctcccaatcccattacattggggttagggcttcaacacgtgaatttggggaagacacgaacattcaatccattacagacaggaaccttgaggactgttgcctggggcgggtccacactgcgcttcggagtggtgacactggccggcctccggccctcgggaaggactccagggtaactgccttccttttcccttctgcggactccaacggaaccctggactcagtcttctagcctcactggatctcacaaaaagcaaccctctcagtatggacatatttgaaaactcaaagccgatggtgcagtgttaattccatgagttttgtggataaaaagttctgggttcaaagtccactaacttcctatgcaccctttacaaatcactctgaaattccatttttttttccacgagtgaaatggaggaagcactacttccccatgtaaaacctaaggcgtcatgttgggaaccgtggtggactcacagggaatgcccagcgccgttgagcagccgcctcctggttcccaggctgggcttctgccaacaggccctcagtttcctttattggagacacaaaatgtgacatttattaagtgtcccagcgcactggggaccagttctgcccatggactcgcctctgtccctaacctctgggttggcatgtacatgagaaaacatgcgggtcaacaaaaaagaaagacatgggggtgtgatgggaaggggtagccggaatgtcctcgaaagccaccccagagcgtgggaagtgctgggggagccccagggcgctcccatggggtgaacgctgcgccgcagctccctctagtggcactcttggtgagactgtagggtttgatttgtgaatatatatatatatattttttagacagaatctggctctgtcgcccaggctggagtgcagtggcgtgatctcggctcactgcaacctctgcctccagggttcaagcaattctcccgcctcagcctccctagtagcgggattacaggcatatgccactatgccaggctaatttttgtatttttagtagagatggggtttcac

SEQ ID NO: 129502 - DNA, 2349 bp, Homo sapiens
gaggggcagtcgctgcggggcggcgccagcgcccgtgcggaagagcccgtgagcagacgggagtgggtcggggggcggcgggggatcccacgtggaagcagcgtcctggagctgggtggggctgcggcgcggactacaaatcccaggggcgtggggcgggagaggcggaaggggcgtcctggggcggggcggcacggggcgaggcggagcgaggctggaggcgcgggagggcagcgagaggttcgcgggtgcagcgcacaggagaccatgtccgggggcagcagctgcagccagaccccaagccgggccatccccgccactcgccgggtggtgctcggcgacggcgtgcagctcccgcccggggactacagcacgacccccggcggcacgctcttcagcaccaccccgggaggtaggcgcgggcttggcgacgccgcttgccggctcctgggcgggcgggaggatcgggaatcgcggattggaccgggtgtccaggctcaagggcgccgtgattggaaagaacggaaaaggggcatcggagagacagcgagggtcatggaagtggccgcccgcttcccctctgagtgcgtcttccagacccgagttacaaactgccccgtttgtttcctctttctgttaggtgtcagacagctgacacctaacaaacacgcacgcctccaggacagccacatgccgagctgtgctgccccttgtgggtgttgggggcgctcccgaagcgggagagggcggagttagggtggcccacgatccaggagaggcctggcctggtgtttttatgggatgggtattatctgttgggataaacgattcctgcagggccctttttccttcccgaagcacgccgagttttgtgttggactcgcgcgctctgactgaggttcggatctgggggtgcttgcctgctccagcagcgcctcccgggcacctgtggcacgttccccatttacgcgagtgggatctccgcgggggggaccctggcgccacggccagggctgtgcagaaaaacacgttcttctgtccggggagaggaggaggcaccgtgtgacctccctgggagaggatgaggaagaggaagctgagctggcacgggtgggggggccagcctcgggctgccctcaggaacctggcattccctcccagccccggagccccagcgcacagacgctgatgaaacctacgcgcctgtttgcatgatgaaataaatcctcgtggctctctcctcccctctcattgtcgcactgcccccacccctttttgctcctctcccttcattctcctccacgctgctttccatactactagaaaacgcgacagatcctggcgcttggctaggtggcgggcgggggccacatgcttattttctcaggcagctgtcccaccagcagcgagcgcggccagatccgaggtcctctgctgtttgatccaaaacatacactgttagaacggttagggatcttgtccagccctgccgtcttattctacagagcccggcattgaggccccagagcttgaacacgtgtctgttgcccattgtcacaccgttttcccagattggacaagaaatagcaaccaggcagagaagggagaaatgcttccttttctattagaaatgagccaaggaaaagctcgcaggggctcttgttgccattcccgactcatcctctttcccttgctgggtcttttgtagtccatgctgttctcctttgtctctgtcacaatggtctaccaggacaattcctgacaattttggagttctttcaaatgagggtgtaagtgtctgctggatttgttcagggtgggccctgaggccggcctgaaggcgcaggtagcccttttttgcactctttattgctggattgttgggtcaaattggaagccaggatactgtttataggcacttctggcccgggtaccaaggttcacacctgtaatgccagcattttggggagccaaggcaggagaattgcttgaggccaggagttcaagaccagcctgggcaacatagtgagactccatctctacaaagaaacaaacaaaacaacaacaaaatgttgtcctagctactacagaggctgaggccagaggatcgcttgagcccaggagttggaggctgtagtgagctatgattgaccactgcactccagcctgggtgacagagcgagaccctatctctaaaataaataataaatataaaatataggaacttcaaatccacttttcactttgggttgggaagtggggagtgggcagggggctgacagaccacagcaaatccccttccctttgaaggtctttagcagtagggggagtggggaagggacttctgca

SEQ ID NO: 129503 - DNA, 1248 bp, Homo sapiens
agctgggactataggcacgtgccaccatgccctgctaatttttttatttttttgtagaggcagggtctctatgtattacccaggctggcctcaaactcctgggctcaagcagtcctcccacctcagcctcccaaactgctgggattgtaggcatgagtcacctcacctggcctccagtttgctttccatggtcattaaccatttgcacactgaggctctgctctgaggttagctgtccagagtacttaagataatttaattgccgaagggagtgtcatgtatgaatatttgagtctgtggagtcttaaaaatatccagcgacaccataaacagctcattagccagcagaacctttgagtgggtcagaaagaaactttccctcatcaatctccacattcccagctccgtgttgcatgtttgactctgaagcctatatacaggcttggatggcagttgtgccaaagacccgtacctggataaggtgaatccgaggtgagcaggtagggctgcaggtgttaatggcaccctgtttggttaagcaaacaaggtctgtgcccaggaagcttaccttggagcagctcccaagtctttggacatgaaacaggcagtgctgggaagaaggggatgtaggctgggcaccaaagccagagcacagcccatgtcctgaggccttagtcacatggagggaagaaattattaaggatgggttaaaagagcttggacattaatgcagtgagggagaaacgatggaccctcttctcacatttacctgagcttccttttaaagtgtttgaaggagctgggtgcggtggctcactcctgtaatcccagctattaggaaggctgagacaggaaaattacttgaggccaggagttcaagaccagcctgagcaacatagtgagactctgtcggtataaattaaataaataaaattttttaaagtgttggaagcattccacactgtgtcccttattaaagatttggtggggggttcctggtgtagagcactccaaaatccctccaatccccagactcctttttattattattattattttgagacagagtttcgctcttgttgcccaggctggagtgcagtggtgcaatcttggcacactgcaacctacgcctcctgggttcaagtgattctcctgcctcagcctcccaagtagctgggattacaggcatgtgccaccacacccggctaatttttgtatttttattagagacagggtttcaccatgtta

SEQ ID NO: 129504 - DNA, 1456 bp, Homo sapiens
cagagtcttgctctgtcacccaagctggagtgcaatggtgcgattttggctcactgcaacctctgcctgggttcaagcaatcctcctgcctcagcctcccaagtagctgggattacaggcgtctgccaccacgcccagctaatttttgtatgtttaatagagacagggtttcaccatgttggtcaggctggtctcaaactcctgacctcaagtgatccacctgccttggcctcccagtgtgctgggattacaggcgtgagcttccccacccggcctacacctggctaatttttaacttcttttgtagagatgggatcgtgctttgttacccatgctggtcttgaacccccccattgctttatatattgaaagcaaactactgtcaccacaaagcatgccttgaaaaaaaaatatcattcctatatttggtgcacatttggagtttaaaatcctgaaggatactggctaacaaacatgctgaagtttatgatggttcttggtttccgtgggcctaaaaaggagggaggacaccctcaccctgtcccttccaagtgtctctcctgagttgcttacctgtcctctgatttatccctgctttgactgataattggttgctggtatggatggaactgaataaatggtgaaattatgtcacctggaccctgcaggtcatgataataactagaattgtatggggcttacattgtgtcagccactgttcaaatccacacagtaatcctatgaagttggcactaccatcatcatcatcatcattgtcgtcgccaatctggagaagcagaaactgaggcacaaagattttaagtcataacttgcccagagtcatgagagctagcaaatggaatgacagagctgggtttccaaaggatttcaggtagaatgagcctcagttattgtccccagatagttcaagaccgaaccttgaactctacccccagcacacaacgggctggatcccagctacacaaatggtttgaggtgtaggggtgctcctctcttcttcccttgccctgctgggaggcagggttctgggtttccctgctctgcatctctgggttggcaatcaaggtcagccttagctcacctccctcacccctcgggcactggagaactggggtgagatggatgtttctctgggccgggggtttagggtcaggctgcttggaagcaggaagatggaggacttgggatctgtgtcccttggtgatctcctcttacgcctgtctgtggacttcacacacttggctgtaatcacttgtttacgggtctttctcgactaaattacataaggtttggatctaggcactttcactacatctgacttttttaaatccctagcacctcgcatggtgctagtacaaagtagaggttcagtgagtaagtaaatgagaccagcacacctactttcaggaaaaaaggattgagcaaagaccggcaa

SEQ ID NO: 129505 - DNA, 1416 bp, Homo sapiens
gctgaggccggcgtcatgcttgtacagcctgcagaaccgcgagccagttaaacctcttttcttggctgggcacggtggctcgcacctgtaatcccagcactttgggaggctgaggagggtggatcatctgagatcaggagttcgagaccagcctggccaacatggcaaaaccccgggtctactaaaaatacaaaaattagctgggtgtggtggtgggtgcctataatcccagctactcttttgggaggcttaggtaggagaatcgcttgaacccaggaggcggaggttgcagtgagccgaaattgggccactgcactccagcctcggagacagagtgagactccatctcaaaaaaaaaaaacaaaaaaacaaaaaaaaacttattttctttataaattacccaacctcaggtatttctttatagcaatgaaagaatggcctcatataccaagcattcacccattgttgacctggccctctgtcccctctctccccaggtgaagagtcacagtttgagatggacatttaaagcaccagccatcgtgtggagcactaccaaggggcccctcagggccttcctgggaggagtcccaccagccaggccttatgaaagtgatcatactgggcaggcgttggcgtggggtcggacaccccagccctttctccctcactcagggcacctgccccctcctcttcgtgaacaccagcagatacctccttgtgcctccactgatgcaggagctgccaccccaaggggagtgacccctgccagcacaccctgcagccaagggccaggaagtggacaagaacgaacccttccttccgaatgatcagcagttccagcccctcgctgctgggggcgcaaccaccccttccttaggttgatgtgcttgggaaagctccctccccctccttccccaagagaggaaataaaagccaccttcgccctagggccaagagttgggccccgtctgagcttttttcaactctgtttggtaactaacaccagctgctatctgtacagtgctgctgctttttttttttttttttttttgagacggagtttcactcttgtggcccaggctggagtgcaatggcgcaatctcagctgattgcaacctccacctcctgggttcaagcaattctcctgcctcagcctcccgagtagctgggattacaggtgcccgccaccatgcccagctagtatttttttgtatttttgtagagacagggtttcaccatgttggccaggctggtctcgaactcttgacctcaggtgatccacccgccttggcctcccaaagtgctgggattacaggtgtaagccaccgtgcccagccttgtacagtgcttctaaagcgtgggcctgtccttatttgattctgactctgatcctgtgggtaagtagaacaactg

SEQ ID NO: 129506 - DNA, 1542 bp, Homo sapiens
tcgtgcagctgctgaatggcacatgggactggatttgagtcctgctactcttttttttttttttttccgagacgaagtcttgctctgtctcccaggctggagtgcagtggcacagtcctagctcactgcagcctcaaactcctaggttcaagcaatcctcctgcttcagcctcctgagtagctgggactacaagttcacaccaccacctggctaagttttttgtgagtagagataaggtcttgctatgttgcccaggctggtcttgaactcctggtctcaagtgatcctcccacctcagcgttccaaattgttgggatgacagatgtgagccaccacgcccagcccataccctggtattcttgatctcttgtttttcagtagcaaggcagctgcctcgcttctgtgctttctcccccttctctcaaccccaagcctgtcgagtttggcaccttcccgtcagggcccattccatgcaagagtcaaagggaagagcccctgccttggccagtgtggcatctgatctgcgggcactcgacctttgccaattgatcgctttgtgtgagctgtcatgtgtggcacaaacacagacaagctctctgccttgaaaatttcattgaaatgtaagatttgcccgaaagtaaaggtagcataggctgggcacagtggttcaagcctgtaatcccaggattttgggaggctgaggtgggaggattgattgaggccaggagtgggagaccagtctgggcaacgcagtaagaccccgtctctacagaaaattttttaagtagccagacatggtggtgcacacctgtggtcctagccactcaggaggctgaggtgggaggaacacttgagcccaggagttcaaagctgtggtgagccacgattgtgccactgcactccagtgacagagtagaggcttcatggaggtgatgctacagctggaccctgggaatgagtgggttgggggaggcaggggcccagtgttgccaagctcagatggtcttggggagctggggtgttcagggaagagacatagtagcctgctttggtcagagcaggcagtttgtatgggtgagaatgactttaacaaatggccaaagaagggtgaggtttctgaaggtcttgaatggtaactaggcagagatctttgctgagaagcaataggaatttcttattacagggtatgctggtgggtggatggcctatgaacaagaggcagtggctggcatttacttaacaagctccgagcacatagcacttgtccacctgctgtttggagagcagcagaccttcagtggccaagttgcttgcttggccttttctatagctgggttgcagcccccttccctcacaaggactgaaagcagctgagtccaggtgcatggtgatgtgtggcaggcctggcctttggcacgttgcctccaagcacgcagcaaagtctgtccgtatggatggaaaagagaggctagggatgggccaccactggtgcaaagaataatgaaagcttcaagtaggctcaaaggagagattgggtcagc

SEQ ID NO: 129507 - DNA, 1784 bp, Homo sapiens
gcgcagcctccaaaacctatgctcttagtgccacactgtgaatagaactgaagtctgggctgttctgactctgagctataggcaactgggatactggttggagatgtcagaacaggcagtgacaggtgagtgtcaaggtaaagcaggtagaggagagacctggagccaggaagtcattcaggtgtttggtgagttgcttagaattcatgggtttggggaagtgaggtagtgaaaacaaaggagtataaggttgatagccttttctcatttactcaagggctatttgttgagtgcctactgtgtgccaggcactgttttaagcactaggggtagagtggataacacaaagccctgccttcaaggagcagaccttccaatgatgcagcagccatgtgtgcactctgctttcattgcagacatcacaaacctgacctcctcgaaataaggtgcagaattgagcatgaccaacacttcctctccgcaagcagaggacatgtgctccttgctgtgggacaatcagtcctgcatggaggaacaagcaccccagtaacagcatagacggagataactgaataaagccctgttttttcgtcagcaggaaaaggcaaggaacccgctttctgccggttaaccggggggaaagtgcaacccttaaggattaggttttgctgagtttaacacactccagagagtatgctgcagggagagtagggaagagaagggctcttgggccacagcaaagtgaaggtgaatccctccaacccccagctgcaaatcagaggccgtttcctatgcaaaacagcataggaagacgtttttctaaggaggagccttaaatccgtccttgtttgttccttggtcttgggttctgcgcggaatgatgttgcaagcctcgtctttgtgctgccgcctgctggtagagttcattaaagcaaggaaggctgggtacgtctaggaaatggttattgcactccgttaggtgaagaaaagtgaggatgccatatgtattcaagacttaagcacatttctccacattttttctatcgagatcatgcaactgtatcctcattgtctgaaaggaatacttaggaagaagttttccagacacagtgggcaggattgtgttgtggggcagaaccagacatagtatagaatctgcctgcgatgcccagacttggtttgggacaagctagttatagccctgcttcctcccttcgaccaagcgcagccatgcacatggtcatactgccctttgatcctcgacccatctctctggccagcagccgccagctgactctatctgccaaggaattccagccaggaacactgtttactcttgtctggcatttctcaacccgagcttctaccatgaggttgcatttgaacattttcctaggtactgcactaccttccaaaaacagtcaggactctgggctgttcaaaacttcttccttagcctctataggataggtttcagatttgcataggaatcctggatattcaggttatcctccaactcctgggacagtttcagcttttttttttttttttttttttttgacacggagttccgctcttgtctcccaggctggagtgcaatggcacaatctcggctcactgcaacctccgcctcccaggttcaagcaattctcctgcctcagcctcccaaatagctgggattacaggtgcctgccaccacacctggctaattttcgcatttttagtagagatgaggtttcaccatgtcggccaggctggcctcgaactccagacctcaggtgatc

SEQ ID NO: 129508 - DNA, 2197 bp, Homo sapiens
aacccaggccccgccgccaatggctcgccctgcctctgcgccgcttggcccgtcccctctcaagcatatctcggataacgccccttccgcacctttcacgggcggtgggagctgaggctcctgtcgttatctctgatccttgcaccctggcaggaagctggtagctcacactttaacgggaggccttcacatattccagaaaagaaaccactttgcagtgccagactggaagaagtaacggtcactctgaaaacagggtgggagagctgcctctctttgaacctctcccaggaccaactctaacccaggtagatttgactgtaaaggccggttaggcttccctgtgctccgtgggtccgcgactgtctgacatgtccaccttctcagtatcctgacagtaccttgggcatccagtctgagatcaggcttagctgaaaaagctgcaggagtatgaagttcggctgtaatttgatcatcatttttgggaataggcattttgaggtttgtcttgagaattcttacttgagcgctttcattatcttatagggaggcaaacttggtcgatgtaagcggtggcttggagacagaatcatctaatggaaaagatacactagtaagtatttttagttgtttgcaagacaaaatagggtttgttttagttatttcttcttcttcttttttttttttttttgttgcgacggagccttgctctgtcgcccaggctggaatgcagtggcgcgatctcggctcactgcaacctcctccccccgggttccagcgattctcctgcctcagcctcccgagtatctgggattacaggcatctgccaacacacctggcttcttttttttgtctttttagtagagacggggtttcaccatgttggccaggctggtctcgaactcctaacctcagttgattctcccgcctcagcctcccagagtgttgggattacaggcgtgagccaccgcgcccggccttgtttttacatttttaagcgaatcaaaaatacattcaggccaggcacggtggctcatgcctgtaatcccagcactttgggaggctgagacctcaggatcacttgagaccagcctgggcaacatagggagacccccgtctcttaaaaaaataaaataaagtaaaatacattcaagtcaactgatttgagtctcgaactgctctgacacaggaaggtgctggggatacatcagaggtgatggatactcaggcgggctccgtggatgaagagaatggccgacagttgggtgaggtagagctgcaatgtgggatttgtacaaaatggttcacggctgacacatttggcatagatacctcgtgagtacttttcatagtttttgtgagaattgctcggtaaaataaatctgaacatgctcaacagttactttgtgggcaaaataaatgcaaagtatttcctatgtctcctaacccctattcagcaagtaggatgttgaatcaggagttgttttaattcccttagcatgttatctgcttactgagggcacagctctggtagatacaatggtgggtattgcccctccttttgagttgacaacctggtttggagacaaaaaaaaatgcaattacaaagtgttatataaacaaatttagaacaatataaaccttgtgttggtgttttggatttttcagaaaggatatatgtggataaagcctgttgtccaaaatttgagatgacccatgctctttatgcctgaaccatcctttttttcctttctcattgctgctgactcactcctttaggtatattgtctactctcctcagcaaacctatttccaatcatgtacctcttctagtgaattaaaatcatattgtgattgagaatgaaagacttttttccttatactgactgtctgttggaataattgtactgctcgctctctgtaatgttctttatggtttgtattatgctaatacatttataaaagactatctaaacataaggctgcattatcgtgaaattaatccaccttgggtgagattgtgaagaaatacatatatgtgtgtgtgtgtgtgtgtgtgtgtgtgtgtgtgtgtatatgtatatatatatacatatatatatgttttcttgtttttttcttgcgactgggtctcgctctgctgcccaggctggagtgcaatggcaggatcacagctttctgcagcctcgaacttctg

SEQ ID NO: 129509 - DNA, 1049 bp, Homo sapiens
ctatgttgcccaggctggtctcaagtgatcctgaggtctcagcctcccaaagtgctgggattacaggcatgagccaccgtgcctggcctgaatgtatttttgattcgcttaaaaatgtaaaaacaaggccgggcgcggtggctcacgcctgtaatcccaacactctgggaggctgaggcgggagaatcaactgaggttaggagttcgagaccagcctggccaacatggtgaaaccccgtctctactaaaaagacaaaaaaaagaagccaggtgtgttggcagatgcctgtaatcccagatactcgggaggctgaggcaggagaatcgctggaacccggggggaggaggttgcagtgagccgagatcgcgccactgcattccagcctgggcgacagagcaaggctccgtcgcaacaaaaaaaaaaaaaaaagaagaagaagaaataactaaaacaaaccctattttgtcttgcaaacaactaaaaatacttactagtgtatcttttccattagatgattctgtctccaagccaccgcttacatcgaccaagtttgcctccctataagataatgaaagcgctcaagtaagaattctcaagacaaacctcaaaatgcctattcccaaaaatgatgatcaaattacagccgaacttcatactcctgcagctttttcagctaagcctgatctcagactggatgcccaaggtactgtcaggatactgagaaggtggacatgtcagacagtcgcggacccacggagcacagggaagcctaaccggcctttacagtcaaatctacctgggttagagttggtcctgggagaggttcaaagagaggcagctctcccaccctgttttcagagtgaccgttacttcttccagtctggcactgcaaagtggtttcttttctggaatatgtgaaggcctcccgttaaagtgtgagctaccagcttcctgccagggtgcaaggatcagagataacgacaggagcctcagctcccaccgcccgtgaaaggtgcggaaggggcgttatccgagatatgcttgagag

SEQ ID NO: 129510 - DNA, 1482 bp, Homo sapiens
taccagtgagaaccttctagatgctgaattgtccagtataacggataaggtcttattaactttcgtgacagaaaaatccaggtatttataaaaatatgagccctgttttggttttgacaacctttttacattttaagactatgttaacatattaacattttaatttacctgtcactgaggggaatggattcatgttaacttctcataaagaggcgtacagcctgtgcagcatggcgaaaccctgactccataaaaaaatacgaaaattagctgggcatggtggctaatgcctatagtcccagctacttggggggctgaagtgggagaatcaacctgagccagggaacgtcaagtctgcagtgagctatgattgcaccactgcactccagcctgagtggtagagtgagagcctgtctttaaaaaaagaaaaagaagtgtgtgtgttcacaagttcactaattcgtataatttggctcttcggcagatcctgtctacctttcatgaccaactacagttttcattgcaacgtctgccatcacagtgggaatacctatttcctccggaagcaagcaagtaagaacaaactctggagtatttgaagatgattatccactggaaaagaaaagggatctgggcgtagcagaatcaggagacctttgcctagtagctggtataaattcagttggggtttagctctgaataattgcaattgcccatttcaggtcacatgatgactccattttgctgctataattgttattttctggaccacttatcgagtattcccttggtagtagagatgtagtactacagataactgtttcttcctttttgtttttgatagacttgaaggaaatgtgccttagtgctttggccaacctgacatggcagtcccgaacacaggatgaacatccgaagacaatgttctccaaagataaggtagaggtggaactaatgtgattgcagttatattgaagagttaggtggaacttctaaatatactccctaacaagtactttcttcccagtttttattgaatatatgacagtggattcagtgattaccttgttctctttttttttcaagatggaatgcagtgatgcgatctcagctcagtgcaccctctgcctcctgggtcccagagattctcctgcctccgcttcccgagtagctgggattacaggcatgcgccaccacgcccagctaattttttgtatttttagtagagacaggatttcaccgtgttggccaggctcatctccaactgacctcatgatccactggcttcggcctcccaaagtgctgggattacaggcgtgagccaccgcacctggactgttgtgttttttttgagagagggtctctgtcacccaggctggagtgcagtggtgtgatcatggctcactgcagccttgacctcctgggctaaagcaatttgccttcctcggcctctcaaagtgctgggattacaggtgtgagcca

SEQ ID NO: 129511 - DNA, 1057 bp, Homo sapiens
cacctaggaattgacttttagagttagtggttgattattaattccatacttttaagtataaaatgttcattaatagtaaaacactacttctttttagagtaaagaaagagatgtattcttggtaaaggaacacccagatccaggcagtaaagatccagaagaagattaccccaaatttggacttttggatcaggtacattaatatgttttacattttctttttgattttaagccactcggggataggtaatcaggttctgtttacatttgtatatttgccacataacacactgccattatatgcacatagcatggtggactccaaaaaaatagtgactgatatgagagtactcaccttcaaccaagagaccagtgttgtatagtgtttttgttgtgggtcttccccaaaatgttatgaatttcttcaaatcacttttttttttaactttagtttcctcgcttgtaacatgtaaaaatgctatttcaaattacttctaatcttcctgccatcttaaattttgctcttaaaaactttctttgttgtgaaaagaatttgttttgaagaatttgtgttgcatatctaacataacaggcaaacgaaaattgctgttttttgttcaacagcagggttcacatttggcaagtcagaatgtcaaatcttaaagctgtgtctttacatgtttgatttgccagctttgaaaatgcaagattcagcccggtgcagtggctcatgcctgtaatcctagcacttttggaggctgaggcaggaggattgcttgagtccaggcattcaagaccagcctggacaatacaacaagacctgtctctcaaaaaagaaaatgcaagatttcacatagaaatttagatttctgtcttgtaaaatgaaaacatctgactgcatggggcctgaattcccacaggagctgagtgaatggggcttaggcactctggtttgccctgtgccctctcctgcctctacccaagttgattgattaattgccatttatcgccattctgaaactattctgatccttacacttggcctacctcacacata

SEQ ID NO: 129512 - DNA, 1453 bp, Homo sapiens
tactaaaaaatacaaaactttagctgggtatggcagcaggcacctctaatcccagctactcaggaggctgaggcaagagaatcacttgaacctggtaggcagaggttgcagtaagccgatatcgcgccactgcactccagcctgggtgacaagagtgaaactctctcaaaaaaaaaataataataattagccaggcgtgttggtgtgtgcctataatcccagctactcgggagggtaaaccaagagaatcgcttgaacctggaaggcagaagttgcagtaagccgagatcgcgccactgtactacagactgggcaatagagtaaggccccatctcagaaaaaaaagaattgtcaattttagttcccattctgttagaatttctcttgttttatgagcatccagattgactgacttacgtagactccttttttaattggatgtatttttgcaggaccttagtaacattggtcctgcttatgacaaccaaaaacagagcagtgctgtgtctactagtgggaatttaaatggtaagtgtttacatatctcattgctgaaatatttggaagctattgaatccagttgtgcctagaactggccattctttgggttgacccttaacctggatacttactaaaatgcttttatagttcaaactcaatttttaggaactagccaaggatttggcagatggtaatagaggagaactttttgtcactttacaacagtttggtcttgagtgagacaggtttagcataagacaaggaaccatttcaaggtcagatttgctgtgtttatatctgtatccttataactaacattaaatttagaaagattcatctcctctccactctttttctgcaattcagctgttacttttaacagatttcctgtgcccatcttctaatttttcttgccctgaaacttcagctcattcacatgatagcatttctatattaaccacccattgcagcttgttcttctgttaacccatctaatagcgggaaaacccctcgttactaatggttatttaataagagttggggtggctgagagatatttagctgttcatctgatatatgggatcattaacctgtcttttggagtggtcgcgtcttaaatatctgatcatttctactgttactaatattttaaggtgggttggaaatagctagtgtgttatctttttacaacatattttcccgttttaattgttaaaatttgacaaatacatggtgccacttctgttcttacaggtggagccacttttggaggtgaattcctccactgtcttctttcagcctctcagacttaagtattttgtggtttggaaaatgctttttgctgagctatggtagaagctaaaaactacataatttgaagcattatgaaaatggcggcaatagcacttaatatgaaacagtagttgagtttaatgttagtatttaagagctt

SEQ ID NO: 129513 - DNA, 3763 bp, Homo sapiens
ccaggagtttgagaccagcctggccaccatggcaaagccccatctctactaaaaatacaaaaaattagccaagtgtggtggcaggcgcctgtaatcccagctactcaggaggctgaggcaggagaatcgtttgaacccaggaggcagaggttgcagtgagccgagatcgtgccactgcactccagcttgggcaacagagcaagactctgtctcaaaaaaacaaaaatttaattgttttttgattatggttacttaaactagagatgatgacattgcagcagtttaacattaaacttttatgaaaaataggaataacatctgaggtgttcaccaaaggaaattctgcataaaaagtctggtcctgtatatgcagaatatgagccaccttcaatgtcttgatcctttttattgcagcagaactgctagtaattcccaagcttgccccaaattaagatttagtactctgcagttgtttacgtaaaggtgttttcctgcagttcagggacatttcctggaagagggaaaaataaaactaattgagaggaatttgaactggacaaaaatttcaaagtacctatttcagaaatacacaaggtaatcttccttgtggctttagtatgtagctaaattttttgtataaaatatgtaaattgtctattcctatttattgcttttagttccacaagccaggttaatctaacctgaattttagtgcattggcacaatcttaataaatgttgtatttgacgaatgggtatggaactaaaaattgcctagcaaatcgaaagccttctttcttatttgtgtcatgtgcaaccacgatggagatctagcagtactggagagaaacacctttttagtacttctgtttccgttttccatgttggatgtattttgtcttgttggatattcaggttcaatgctttagcagatactgtgcttttatgatgtttatggactgtattgtgtagttcaagcaagtgaacatcgacttacagtgaggatattctctctttatgggtgtttgtattaatttggatgaaaaaaaatgtgcccatacagttgttttcattctttttagctgtgggtgtttgggatctgaatgagtgagaatgcatttgtgtcacaccctgagaaagtataccaatagttgcagtttattaggaacaaaggttgaaaactgtaacccaaccatcatagtgctggattcatttgagtttattgccagaacccagtgttcccaggctatgagatgctcagtagattctttgaaaactagggtgaaatccaatatgcctttggaaggaaatcctcctgtggtgttacacaaatgcacattgggtgtgttggtccctatggaatttcagtatccacatggtgtttcccttgtggctcattgaaagcaatctgccttctcttcaaagggggaattgcagcaggaagcagcggaaaaggacgaggagccaagcgcaaacagcaggatggagggaccacagggaccaccaagaaggcccggaggtggggagagtgcccaccctgcccccctcactatttaagtattatttggtgctgggaaagtccagcagagggaagagagttcaagggtcggaggttaaaaagcctgtccattttttctaaaccttgagcactttgagggacaaaataaccccaggttggaggccaggcgcagtggctcatgcgtgtaatcccagcactttgggaggtcaaggagggtggatcacttgaggccaggagtttgagaccagcctggccaacatggcgaaaccccatctccactaaaaatacaaaattaggcaggtgtagtggtgagcgcctgtaatcccagctacttgggaggctgaggcaggagaatcgcttgaacctgggaggcgggtggcagtgagccaagatcatgccactgcactccatcctgggcaacagaatgagactccgtctcaaaaacaaaacaaaaaacaaaaataataaccccaggccgggcacggtgggtcatgcctgtaatcccagcactttgggaggctgagacaggtgaatcacctgaggtcaggagtttgagaccatcctggacaatgtggtgaaaccccatctctactgaaacaaaaaacaaaaaaattagctgggcctgggggcacgtgcctataatcccagctactcgggaggctgaggtgggagaattgcttgaacccaggaggcagaggttgtagtgagctgagatcgcgctatcgcactccagcctgggccacgagaacgaaactgtctcaaaaaaacaaaacaaacccaagtttaagtgtcatgttttacatttaagtgtacatacatttgttagtacaaaatttatagtagtaacaagtatagtgtcttctggtgataagcctggggaacctagggagtgaagttctgttaaggcgacttgagaaaggataggtggggagggagtgaaaccagtgttgaatgttagctcctttagctccttaactttctgcttctcccttctcatgccttttcccttccctttgtctaaagctgaggtgatgaaatccaggttgcttatttatttatatatttttgtgagatggagttttgctctatcacccaggctggagtgcagtgatggaatctcggctcactgcacaagttatttacttagattagcaagatagcaagtgcttatgtctctgagcttctgttcattactttataataatcagtatactaaagactatcaccctaatcacccccattcctctcctcccttccccccccccccccccccgcataatgtaccagctcagtttcatagacatcaattcatgtttaaagaccactgggaagatatccacaatctacaagtaatttcaccaaaactaccttgctcaataaagctaatccttttcacttccttgttttgcctgaagagggcagagttacttatttgagtaatgagaagtatttgctgtgaagttgcatgtattctagctgaaataaaccagaggcctttcttacacagttgaatgcatttgagctaaagggggttttagttttttgatgttattttttcctttctgcagtgaccctttgttttctgctcagcgccttccccctcatggctacccattggaacacccgtttaacaaagatggctatcggtatattctagctgagcctgatccgcacgcccctgaccccgagaagctggaacttgactgctgggcaggaaaacctattcctggagacctctacagagcctgcttgtatgaacgggttttgttagccctacatgatcgaggtatgtaaagtattggagatcatatggatgcagggttactttgaactgccatcattagccttgtcagtctagaattaggtgtacatctcagtctgttgccactgcctcacccccatctctgtctagattcatccagaatgtgcaagaaattctgttccttcctataagctccagccgttttatttatatatatatatatatatatatatatatatatatatatatatatggttttttaaaactttctattttgaactaattttaaacttgcagtaaagttgccaaaaataagttttctttctcatcaagcttttcctaatgataatatcttagaaaaccatagtacagttatcaaaactgggaaattaacattggtaaatattatcaacacaactagagaaagacctttcaattttaccagtttttccactcacacttaattatttctctttagtctat

SEQ ID NO: 129514 - DNA, 1798 bp, Homo sapiens
gattgcttgaacttgggaggcggaggttgcagtgagccaagatcgtgccactgtactccagcctgggctacagaacaagactctgtctcaaaaaaaaaaaaaaaaaaagataagccaggtgcggtggctcatgcctgtaattccaacactttgggagaccaaggcgggcagatcacgaggtcaggagttcgagaccagcctgaccaacatggtgaaaccctgtctctactaaaaatacaaaaatgagctgggcgtggtggcacgcgcctgtaatcccagctactcgggaggctgaggcaggaaaattgcttgaacccgggaggtggaggttgcagtgagccgagattgcaccactgccctccagcctgggcgacagagcgggactccatctcaaaaaaaaaaagataatcacatgtaataaaaactaagtaacctaacaactttctcttttttgttgctttctcattccttgccagtatcttatgctgagatttttaaactcctcaactaatatttcaaacacctgacctgatatttgtgatttttaaattgttttattggactaatgtttttgtggcaattgtccccaagaacctcaaataagttgcaggccttcttttaatctctgtcaccgcagctccccagttaaagatctcagatgaccggctgactgtggttggagagaagggctactctatggtgagggcctctcatggagtacggaaaggtgcctggtattttgaaatcactgtggatgagatgccaccagataccgctgccagactgggttggtcccagcccctaggtaagctggggccttaatatggacatcacagcagatagagaggatagaccatctggccaagggctaaggcttcaaggctgttgggtttaccagattgtgggcatagaattcagttcctgagggttgagctggtttgctattcccgggatatttttgtaattctttgcttgtgagaaagtttttaagcaattttacaaaattgaccaaaaaacataaaaagaaataggatctttttccttcagcaaactagatttgacttgcaatcttctgacttcctgtgtatgtttttattgggacaggaaaccttcaagctcctttaggttatgataaatttagctattcttggcggagcaaaaagggaaccaagttccaccagtccattggcaaacactactcttctggctatggacagggagacgtcctgggattttatattaatcttcctgaagacacagagacagccaagtcattgccagacacatacaaagataaggtgagtttgtcctctcccggcagattcctggctttgaaggcctgtggcagccagtgcttatcactggcttgtgtgatctcttaggaactgagccacagctcacgttttttcctaacctgttgctatgacattttcagaataacagtaacaatcggtgcacaaatagtcatccattcattcttctacccatctatcatttgtctttttttagtgcactacagagaaaatgacagacatcaggacactttcccactaagtacttcaggatacataagctagaattcagcctgtttaattcattcttttgatacaaaatgtatataaaatgaagtacacaaattttaagtgtacattcactgagttttgagtttgacctaaactgttgaaatgtaggatccactaggcatgatggttcacgcctataatcccaacaatttgggaagccaagctgggaggactgcttgagcccacgagttcaagaccagcctgggtaacatcac

SEQ ID NO: 129515 - DNA, 1058 bp, Homo sapiens
aggagagaggattacttgaggccaggagttgaagactagcttgggcaacatagtgagacctcatctctacaaaatttttttttttttttaaagtaagctggccttccatggactccttgggaccacacctgtttaagcgtgcttgtttatcaattcctttccccgagtcagttctcacttctgctttttcactttgaagttctctaagactcttatgtcacatctctgaatcctcatgttcctcctttctctcccagaattacactgaatatcctctcttgaccacttcaattcttcagaaaaggctgccttctcttcccacaagagggggctttctggttattgcatctttagatctaataattatttctctttagtatttctttcctaaaaacagctgaaactcgtttctttatttcacctccatctccttctattagtgtcctgggtggcctcacagcattagcatttttatgaaaaaaatgtttccagcttaactttcttcctctacatcccacttccctttttatttttggtgcttgtggctggcccagatgtgccagcctttctctgactgtgctatgaccttgggcagacatgtttccagcaaccccggaagtggaggcagagaaagttctgaaggacactgagtgagacgttacagctcctagtgcccctgggccacaccacaaggtctactctcccactccaggttccctccctttggacttgatacctcctctgataaagaataaagacactggacttgcttcctcagtctcttgtagatttcccaacaggccactatttttttttttttttcattgatcattcttgggtgtttctcacagagggggatttggcagggtcacaggacaacagtggagggaaggtcagcatacaaacaagtgaacaaaggtctctggttttcctaggcagaggaccctgcggccttccgcagtgtttgtgtccctgggtacttgagattagggagtggtgatgactcttaacgagcatgctgccttcaagcatctgtttaacaaagcacatcttgcacc

SEQ ID NO: 129516 - DNA, 1329 bp, Homo sapiens
agccccggactttgagaccagtctgggcaatacagtgagatctgtctctataaaaaaattttaaaaattagctggatatggtggtgtatgcctgtagtcccagctgcttgggaggctgatgtgggaggatcacttgagccaaggaggttgaggctgcagtgagccaagatcacaccactgcactccagcctgagtcacagagtgagaccctgtctcaaaaaagaaaaaaaagcctgaatagtgcatattaacatgctttgaaaaatcgaaagtattataaaaattgaagatgttgttattacacaagttatgcactgttcttgggtgagtgactagcagtctggcagcagcacttctaacatattttcctagagagttctttttttgtttgttcttttttacagttctgaagtaaaaccatggtttttgtttcagataatattttataaaaatggtgtcaatcaaggtgtggcttacaaagatatttttgagggggtttacttcccagccatctcactgtacaagagctgcacggtacgtacatgtttccatcccatgagcaaaacttgagggaagcagatgaatgggttgtgatgacaaagttactgagtgctggaacgaaatccaagcagcctcagagtggcatgcgcatgtgttgttaccattactgtttagtccagaaacagtttgggcatcttagggagtatttgctggatagaaaaaggtcctgcagtttgtgtgcgccatacttttcccttgagcacgtggtgtggtgttaccgttcagtaggaaggatataaatacacatacacaaatcctcctgggatgtcatgataacccaccattattagtcattgttgcttacaatgatttttttttttttttttttttttttttgagacagtgtctcactctgttgcataggctcaccatagccttgacctcctgggcacaagtgatcctcccacctcagcctcctgagtaggtggggtgtgctaattttttggtttttgtttttgtagaggcaggatctcactacattgccctggctggtctcaaagtcatgggctcaagcagttctcccagctcagcctcccaaagtgctgggattacagagaggcatgaggtaccacatctggcaagttttttttttttttaaatatgatccaaacatgaagaagggtactatcattagggcctgttggttttaaaaatatataggtagataggtagatagatacagatatatagaaaagttggggctgggtgcactggctcacgcttgtaatcccagcactttgggaggccaaggtgggtggatcacttgag

SEQ ID NO: 129517 - DNA, 2864 bp, Homo sapiens
cacacctgtaatcccagcactttgggaggccgaggcgggccgatcatgaggtcaggagatcgagaccatcctggctaacacggtgaaacctcatctctctaaaaatacaaaaaaaaaaaaaaaagaaaaaaaaaagctgggcctggtggcgggagcctgtattctcagctactcaggaggccgaggcaggagaatggcgtgaacccaggaagtggagcttgcagtgagccgagattgtgccactgcactccaacctgggcaacagagcgagactctgtctcaaaaagaaataaaaaattagccaggcttggtggcacgcgcctgtcgtcccagctactcaggaggctgaggcaggagaattgcttgaacctgggaggtggaggttgcagtgagccaagatcatgccactgcactccagcctggtgacagagcaagactccgtctcaaaaaagaaagaaaaagttaatgcatgaagatttccatgtacttttagtctgtcagtaggcaccattgaagcaggtaaaaaaaaaaaaggaaatctttaaacagtgtaaaccaaaactatctgagacagatctcaatcaatttagaagtttattttgccaaagttaaggacctgcctgtaagaaaaaaacagaatcacagaaacagtctgtggtctgtgcctttctccaaggatgaatttgagggcttaaaagttttaaaaagaaaaagggctggacggagtggctcacggcagtaatcccaacactttgggaggccaatataagagaatcagttgagcccaggacctcgagaccagcctgggcaacatagcaaaaccccctttctacaaaaaaatacaaaaaattagccaggcgtggtggtacatgcctgcagtcccagctacttgggaagctgaggtgggaggatcccctgagcccaggaggtcaagggtgcagtgagccgtgatcgcattgttgcgctgcagcctggacaacagagtcagagcctgtctcaaaaaaaataaaaagtaaaataaaggggaaatgcgggctggaggggaaagtaggagggtatggtcatccacatgttgcaagagaaaaggagcagataggggaaagtcaattatgtattcatctcatgcccggtaaatcggcacttcacataaggtaaggtgaacataaagtagctgcctgtggggatatttaacgttttatctgtaggtgtctgcttagcaacaaaaggaaaggcagtttcttgcatgactcagctttcagcttaattttttccttttgacagagcaaattgggatcctgaatttttatttttctttgacaacagaaatcaacacagatctcttttagttacctaattcttgatggacatcaggatgttgaccacttttagtaatatttaatatatatcttatttgttccatttatcccccgagtattgtagccacatttaaagtgaaaatttcctgtgtcaaattaacttttccaatattttttgtccattttttccatgtctgcttgaattgaattcgctccaggtttccattaactttggaccatgcttcaagtatcctccgaaggatctcacttaccgccctgtgagtaacattacaaatggctgcatgtgtcctcagcatctccgtggctgctgtagtcaccgtgttctgtttctcattcctcctgcagatgagtgacatgggctggggcgccgtggtagagcacaccctggctgacgtcttgtatcacgtggagacagaagtggatgggaggcgcagtcccccatgggaaccctgaccaggtccctcttttctgtcaaggactttctgggaataatactgggggttttgtttttgtttttgaactgtctcaaatgttctcccaaagatgctaaaaacacagcctctccttttagcaagttaaaaggctgggtaggactgcgggagactgcctgcctttcaccattttctccccacttccagtgactgctcttattttgtgtaccataagccaacaaccgctgactccaggattgcataagccccctgtgaaatcggtgctgtactgcataccctgccagctgtgacttgttatcctactatattttctaaggagtgaataatattgtccgagtaactaacttatttaaaagacatttccttctgtgggcattgactgtatcccacctgttttccaaggaaatggtaacctgtttctgagaacacctgaaatcaatggctatacattccaaaccaatctaaacgctatttccttttggtgtgggtttggttttgttcattttgaaatacacttttgaacactgagatccgtaaaactactagatctctggaagtgtaattgtgaaagaaacttgcttgcagctttaacaaaatgagaaacttcccaaataaaacttgttttgaagtttatgtgacactttgcttcccttcagattgggtgcctcttggtgacagtgttcagaaatgtaagcagcacgaggaagggagctggcactgggaggaagagccgggtttctgagttgtgttttggctgctttcctattgctcccattcttgccaatcagccaccccctttcctgtgaaaatctgccaccttgaggagaggaacaagagtttaaaagggctaatgatctccctcccggtcttcccttggaacatggatgttgatatatgtgcgggtggtttcctgtcttgcttatcttcctttgccctgagctgatggctaaagggcagttttcggactattaaagactgaaatgtaagaatgagccttctaggctgggcgcggtggctcacgcctgtaatcccaacactttgggaggccgaggcaggtggatcacgaggtcagggg

SEQ ID NO: 129518 - DNA, 1069 bp, Homo sapiens
tgtggctcttctgaatatcttatcattttcctgtttaagagagttcccacacttcaagacaatattggtattttaacatagtagcattgattaatatatttgtctcccgatgaatcacccagacactttgatttggccactgcatatctctgaacaggaaagcctatacaggtcgagtgtgattggaggctgaggctcagccctagacacctattaatgcgtgaactagtcttcaagggcagacctggttataaagcttctagatcatcggagtttgaggtactccaagaaaatgagggtggtgttatttagaggaagctgaatgttaactctttgtaatataaattaccacatataagttgtatacacactctccatctaaattataaaattagctttttgtatatattttcacaaatcaaaggttacaggtaatgatgttcttctcaaacttcaaaagtgtgtgtgtgttttaatacagttcatttgaagggctcagagaatatctactcttcacagcgtcctatataaaatagtttctgtaatcagatcaacagtgataacttgttttattccagtgtaaaattaaacaagtgggaaaatatctccacagaaaccagaaagacacaattacatagtttgaaggaggcaattagaatccagcaaaccagtgggtttgttaaaagcctatttcttgactgtcagcctgttctcttgaaactacaatatatgttgctttaaggtatctttaaacaagtaactattttctcttagctggtagtggatgataattccattttagaaatacttctctacaactatcctctctcaactctgaggctcctagataaacaataattttatccatgtcaaaaataaactaagaaacaatccgaataaattataataaatacctttactagttgtaaaattttaatacctcaggaaataccacagtgttcccactaatgctattttttaattttttaatttagtttgtcataatttggtttcatcaactcctttgttttttccttctttttttttttttgagatgaggtctcactat

SEQ ID NO: 129519 - DNA, 1598 bp, Homo sapiens
gctcattttgtatttttagtagagatggggtttctccatgttagtcaggctggtctcctgccctcaggtgattgcctgccttggcctcccaaagtgctgagattacaggcgggagccacctcacataaattctcttgactcctgggaaagggaatttgctttcaccatattaccccttcttccagccacttctcccagaatactaaacttttagcctgtttaagcagagaagttgccagccccaaacaaagttgacagctgtggaattatcttactactaattggcatcataaataacagaaatgttaactaatattgtttatcctctcatatttggcactgcctttccttttaattaggtaaataaacagttataatcttcatcttccagggcccattaatcagctattgcttatagaattctttaagaactcatttaggttatgattatggaaattaaatttttatgaaagatcctggtaacagagtctaaattattgaattgcataatttcccagtagttcctttccttttaatgagccttaatttagtttgactaattaaaagctttgtccagaactcctctagtgtgaagttgtaatctactagcatagatttttttttttttttttttgagatggagtctcactctgtcgcccacgctggagcgcagtggcacaatctcggcccactacaacctccgcctccggggttcaagtgattcccctgcctcagcctcccaagtagctacgactacaggtttgcgccaccacacccagctaattttttgtattttagtagagacggggtttcaccatgttggccaggatggtctcgatctcctgaccttgtgatccgcctacctcagcctcccaaaatgctgggattacaggcgtgagccactgcacccagctgcatagatttttttaacagtacaatattaaaacaaagactgatgtttgtgtgaattatgattctttattctgactggtgcctatgaaagcaatagggaaacatgtctactaatgagttttgtctttttccacagagaaagcttggactatatttctggaaggcacccactgtggggtgctgcttgttctgtggtgttgctgtgcagcggccgggaggagcagagggctgcaggagaccctctgagattctgctttgtgcacatgtactgccagcgcatggcattcttgagcccataaagcaagacttctcaggccctgtggttagcatcccccacacccatatcagccactagcattttaaagatggttttaggtgggtacataagggcccagaaaaaaagttttacaattattttaggggcctgaaccctcatgtcatagctaatcagtgaatgaagttaccttttaatccaagagcctcatccctgttttcttggtactaaaaactttcaccaatctgaatcctagtgtcatactctaaacacgaaccccacccatcccactgtcaccagatggagatcttagacttgcaggcttccagtagggattctcctgatgagcgtgtgtaccagtgcagctgggcacagttgggaacagcaggctggtcttcaacacctggcttca

SEQ ID NO: 129520 - DNA, 1957 bp, Homo sapiens
ctggctgcttacaccagtaccatagataacacgtttctacggtaccttgtcttttctgagtctcatcagggaagtgccctttgcaaagggtaattatttggcagttggcacagttaccagctcatcagaataaaggctgcttgtagctggagcagcccctgcggcctcttgtgccctttagttgctggattactgggatgtcagggaaaggattcaggctggtggctgggctggggccttgggaaattcaggaggctgtggtgtactgagtggtatggattatttcaatattttagtctacattacagctgttcctgagcgtaccaggtgaacctcagccctgccccatgcttcagaaaattattaaggttcttaaactttctgggagggtcatgacaagctgtctggctgtccaagtagggcctatcttgtctttgtccctcctttggtaaataagtatcttcttttgtagaaggaagccatgggtgcaccaagggttggtttcttggagctggggatgcagtccacatgcttgggtgcacacctgcaggcctgtgttagaagaggggggtttggagcctgctgcccgtattacctgatgacacccttctgctcaggcatgttcccgaagtctgtggccatgccagccagcacacaggtggagcctcggcgcttggcacagcgcacgctcacaaagtcacggggccccaccaggtttcctgctgcctcggcagccagctcgtgagtaatgaatgtatcttttccgatcttctgcaggacctaccaggccatggggaaccagaatcacgactcagcctgtgttgggctaagcaccccccacagctaggggtcctctctttgatacagcattcacactgggctctcctgggcccctgccacctgcacctggactttgctcaccttgatctccttgacattggggttccactcccccattgcttccatgcgctccacgagctcttcatagagcctctccatgggctggtccaccacgacctccagccggaacaccttgcccacatctgggaccactttactcatcactttgtccccattgtcctgtcagagaaaggagcccccagaaggtggttagacaaaaatattcttggccgggcatggtggttcacgcctataatcccagcactttgggaggccaaggtgggtggatcacaaggtcaggagttcgagaccagcctggccaagatggtgaaaccccgtctctactaaaactacaaaattagccagacatggtggcaggcgcctgtaatcccagctacttgggaagctgaggcaggagaattgcttgaacctgcacggcagaggttgcagtgagtggagattgcaccactgcactccagcctgggcgacagagttgtctcaaaaaaaaaaattttatatatatatatatattcttagtctaggtcccataggcaatacaaggcaagatggggaggggaacagcaaaggaactccaagttgagcacgaggaagcctggaactgtcctaagatagagtcggtaatcattgttgccatggccttgtgcatctgctgacaactggaggaagttacctgctgccactggaccctttttaagatttttttcttgttttttttttttgagaccgtctcactctgttgtccaggctggagtgcagtggcacaatcacgggtcattgcagcctcaacctcctaggctcaagaaattctcctgcctcggcctcccaagtagctgagactacaggcaagcagcattacacctagctaatttttaaattttttgtagagatgtgatctccctgtgttgcccaggctggtctcaaactcctaggctcaagcaattctccagtctcggcctccaggcgtaagccactgcacccagccccactggaccctttgtcttggtggtgaatgatggtggtatgggtaggtccaact

SEQ ID NO: 129521 - DNA, 1051 bp, Homo sapiens
cagaggttgcagtgagccaagataaagccactgtactccagcctgggtgacagagcaagactccgtctcaaaacaaaaacaaaaacaaaaaaacaaaaattagccaggcatagtggcaggcacctgtaatcccagctactcaggaggctgaggcagaattgcttgaacttgggaggtagaggttgcagtgatctgagatcacaccattgcattccagcctggatgacagagcgcgagactctgttgcaaaaaaaaaaaaaggaaaaaaagaaaagacagggcgttggggtgttcaccctagtctttgcactttaggggccctgtcaggctgagcaaggccccacgaggcctctgcatttcccactcacccttacccaggcgcagcacgtgctgggctctgactctgacggaatctcttccctttacagtgaccttgaggctgcttttaagccagattcactgggcaagaatattgggagtggaaaaactcacactggaactgcccctggcccaggccctgctccctgtgggagggagttctgtgtcctgccaccacctcacagaggcagaggggagccctaaaaatggggagcagtgccggggccccatgcactctcgctgtctccccaacaccagacagggtgaaagggacaggatctgctcagagccaggcctggcacttggagcccatatagaacaggggagtcacccccctggcccccgatttccaccccggtgatgcagtcggggaatcctgtgagcagaggctgcctagaggtacccggccccttcctcaaaacctcctccaggaaaccttcctagaccatcctggtcttctggaatgctggctcctcccaccacacccttactgtcagtatcacttgaggggcttagttctggtcctgatttgttgaatggtttgtatgtgtttgcttgtctcttctgtggaattatctccccaaggcaggtgctgggtccactttcccccttaaaagctgtccccaccctcagcactcacctccagcagagacacaggggactcttgctcctt

SEQ ID NO: 129522 - DNA, 1039 bp, Homo sapiens
tgaatccgggagacagagggtgcagtgagccgagatcgcaccattgcactccagcctgggctacagaatgagactctgtcttaaaaaaaaaaaaaaaaattagccgggcgtggtggcaggtgcctgtaatcccagctactcgggaggctgaggcaggaaaattgctggaacccagcaggtggaggttgcagtgagccgagatcatgccactgcactccagtctgggtgacagagtgagactcagtctcaagaaaaaaaaaaaaaagcaccccgtccccatctgtaactttccagcttttcaccctaccaagtattgccatctgacatatattttacctgtttactgtctgctcccctccctcactagaatgtaaacccttaaggatggatttctatctgtcttgttcactcttgtatccccagcatctagaatgatgcctaatgtgcattaagtctcagtatgtatttgttgaaggatggatggatggatggatggatggatggatggatggatggatggatggatggatggatgaaagcatgaagtaagttcaggctggcttaccaatatgcttcagagaccagtacgaccccaaaaggtgaagacagttgcgaccactgagcggccaggagtaggataattagtagtgatcagtccttacattgaatatggagatgttcccctactgtggaggcagcctttagtgcaggccatagcccttcaggtgtgaagggtttggaggtaattggtggtaaaaaaattctgagacccggtgtggtggctcatgcctgtaatcccagcatcttgggaggccaaggtgggcggatcacctgaggtcaggagttcaagaccagcctgaccaatatgatgaaaccccgtctctactaaaaacacaaaaattagttgggcatggtggcacatgcctgtaatcccagctactcaggaggctgagacaggagaatcgcttgaacctgggaggcagaggttgcagtgagccgagatcacgccattacactctagcctgggcaacaagagtga

SEQ ID NO: 129523 - DNA, 1030 bp, Homo sapiens
taaaaaaaaaaaaaagtctaaggccacattgcctcaataacctccctcttggattctctgcagtgggggagatagctgtctataagcagccctaatttttttttttaaggaaattaatcgtggactaatagaaaattaatcctgactaatatgggattttggatcacataaagctctgttatacaaatacttattactgcctataatcccagcactttgagaggccaaggcaggcagatcatgaggtcaggtttcgagaccagcctgaccaacgtggtgaaaccctgtctctacttaaaatacaaaaattagccaggcgtggtggcacgtgcctgtaatcacagctactcaggaggctgaggcaggataatcgcttgaacccaggaggtagaggttgcagtgagctcagattgcgccactgcacttcagcctgggtgacagagagactccatcttgaaaaatatatacatatactgatcactattaacctcattgtaagtatgtatcctatagtagtgttgtcaggcatttctttgaaaaacttaccggtccctaggagaaggatatttcagttcctgtcacagttatgaaaaataatctgagcctgatagaggaatccatttgccttgagatctgtgctttctattcttggtcttcaggtgaagttttcaaacctgtctcttttgtaggacttggaaaaggagagtgacacacccctccagcaagtatccattgaagaaattctagaagaacaaagggtggaacagcagaccaagctggaagcagagaagttgaaagtgcaggccctgaaggaccgaggtctttccattcctcgagcagatactcttgatgagtactaatcttttgcccagaggctgttggctcttgaagagtaggggctgtcactgagtgaaagtgacatcctggccacctcacgcatttgatcacagactgtagagttttgaaaagtcacttttatttttaattattttacatatgcaacatgaagaaatcgtgtaggtgggttttt

SEQ ID NO: 129524 - DNA, 1089 bp, Homo sapiens
cagcactttggaaggccgaggtgggcggatcacaaggccaggagttcaagaccagcctggccaatgtggtgatccctgtctctgctaaaaatacagaattagccgggagtggtggcaggcacctgtagtcccagctactccggaatctgaggcaggagaattgcttgaaccagtaggcagaggttgcagtgagctgagatggcgccactgcagtccagcctgggtgacagagcgagactcggtctcaaaaaataaataaataaaaataattagaaagcttggaaatcatgtttacctaaatcttttcaaaataactgattattgagttatgggcctttacccagtagtttaaactaaatatctttggtttttccctatacacttacagcaaacttagtgctacatcagactgtggagcgtattcatgtgggcaaaaaatacggtgatattcctcgagggatttttgtggtcagaggagaaaatgtggtcctactaggagaaatagtaagtgaaaactattaagctgctgtagatcttcatattcatgctagttagacttctttttttgtcttttcaaaagagaataaaaatattctccacatttatctggcttctcctaggcaactaccaaattaatttagggaagctacagagaatactttgtttcagtgccttaacaaatgtgttcattaatatatttgtttaatagcagaaaattgacaaagcttgatttatatatgctggggaaggtgtgtcttacatacgttggaatattttgcagtcatttaaacaattggttacaagtggtttttcatggcataaagctaatgcacagtatttcagggaagtacatattgcctgtacagtacaatgtgatatccatattagtaaagggggaaagggaaagagtagctataggaaaagcttttccgttacctatcccgagaatggagttcagtcttacttggatccttagctcacagccagggagagggtattttggtatctgtgccagaaagaccagctggcaggtgaaaggttaaatcagattttctgaggtattgttgctgtaggtcttcgtgtgtgcag

SEQ ID NO: 129525 - DNA, 1071 bp, Homo sapiens
ggcagagtcactgtgtttttcctctgttctgcatctagaaagtactttaggcatggaatgaaagaaattttgctgggtgcgctagtaactggcttattttcattcttcagtgtcagctcaaagtcacctcttcagagaggctttcccttgccacccttccttctgtaaccacttctctcccttcatcatactgccttgctagtttattattccattgtcctaatcacaataggttattttcttatttatttgtcctcctccaacatgaatataaattcataaggttggtgactttctaagtctcattctctactgtatgtctagaccccagaacagcacatgccccctcagtaaacattgaatttctgctctagcttattattagtcttcattttaaatgcctgaagcattgtgtttttatttaaagccttctatggttacaaacaaaatgtgagatagaagctcatcttttgaggacaaaataattctacaaataagataatagtcatctagattaaatttgtcaatttacagatataaaaactgacatgacatgagatggtttaagtgtcaaacataagggtctttggctaggcgccatggttcacgcctgtaatcccagcactttgggaggtggaggtggatggatcatctgaagtcaggagtttgagaccagcctagctaacatggtgatacaccatctctactaaaaatatgaaaattagccaggcatggtggcaaactcctgtagtcccagctactaaggaggccgatgcaggaggatcgcttgaacctgggaggcagaggttgtagtaagccgagattgtgccactgcactgcagcctgggtgacagagtgagactctgtctcaaaaaaaaaaaaaaagaaaaaaggaaaaaaaaaaaaccaacataagggtctagagccagctagtcaggcttcctggtgccacgccctgtccttttcccactctgccacactgctctgattcttttcactactgatgttatctaaatccgcgttgctgtgctgcttttttcagttttccaatgaacttgaacttcacattaa

SEQ ID NO: 129526 - DNA, 1052 bp, Homo sapiens
tgttgcactaattaaattagtagtcttgaggattagttattggagaaggatagaggtgatctaatgtctctgattttgctaatcatcttgatgtagtagaattcctttatatagcatttggtgtggtggcattgtcgaaacagataagaacagctttttactaggtaataattgttttgtcatagagcatttgatttaccatgtactgaataattagcagttttatagttggggtcctattcccttttttcttttattttttgtttttaagagacggggtctctcttgaccatactagactcaatcacctgagctcaagcgatccacccacctcagcctccgcagtagtgggacaagaagcgtgtgccactgtgcccagcttattgctttttgtctattgcttttttttttaatccttataacctgcctctatcaatctatcttaaaatgatgtatgaatgttattaagagtgaatttatttttctttttttcttaggagcagccaccatatcctagctacaattctaactattggaattctactgcgagatctagggctccttacccaagtacatatcctgtaagaccagaattgcaaggccaggtatggtttaaaaacagagactttctgaactttttcttaatgaatagatttattttcaaaacctgtgcagattttagagcagtgatgagtgtgtgttttttttctttgctttaatgggctccatcaatctcatcttaatgtttttagctcagagataaggaaatatctaggcaaatatacctatagcttgaggcataataaattattttccaggacccagaaggaacaaacataaaatatacttatttttgaaaactttactgattacagacatttaatttaaaatattttaaaattataaaaagtacagaaaatatatacattttaaatctagcatgcagggctgggtgcagtggctcacagctgtaatcccagcactttgggagaccaaggcaggcagatcacctgaggttaggagttcaagaccagcctggccaacatggtgaa

SEQ ID NO: 129527 - DNA, 1954 bp, Homo sapiens
ctgccacagggcaggttccagccattataactcaaaaattctgtgccttttgtctgacagggcactcccttttatcttcttaggactgtgtttttttgcaaatgattaaggagaggggtccaattttattgttagggaatcttttcatgtacctttctggtcaagtgaaagatgtgggctaacaaatttgatgttgatgcattcccattaaaacagctcttttcctctttttgctctcccactccaaggattcttcatacccctatagccaatcagatcaaagcatgaaccggcacaactttccttgcagtgtccatcagtacgaatcctcggggacagtgaacaatgatgattcagatcttttggattcccaagtccagtatagtgctgagcctcagctgtatggtaatgccaccagtgaccatcccaacaatcaagatcaaagtagcagtcttcctgaagaatgtgtaccttcagatgaaagtactcctccgagtattaaaaaaatcatacatgtgctggagaaggtccagtatcttgaacaagaagtagaagaatttgtaggaaaaaagacagacaaagcatactggcttctggaagaaatgctaaccaaggaacttttggaactggattcagttgaaactgggggccaggactctgtacggcaggccagaaaagaggctgtttgtaagattcaggccatactggaaaaattagaaaaaaaaggattatgaaaggatttagaacaaagtggaagcctgttactaacttgaccaaagaacacttgatttggttaattaccctctttttgaaatgcctgttgatgacaagaagcaatacattccagctttcctttgattttatacttgaaaaactggcaaaggaatggaagaatattttagtcatgagttgttttcagttttcagacgaatgaatgtaataggaaactatggagttaccaatattgccaagtagactcactccttaaaaaatttatggatatctacaagctgcttcttaccagcaggagggaaacacacttcacacaacaggcttatcagaaacctaccagatgaaactggatataatctgagacaaacaggatgtgtttttttaaacatctggatatcttgtcacatttttgtacattgtgactgctttcaacatatacttcatgtgtaattatagcttagactttagccttcttggacttctgttttgttttgttatttgcagtttacaaatatagtattattctctacttcttggtacattttgtagtaatatgtttaatataattattcaagagactatattgacagccagatagtatggcagttctgaaaaaatttatatcttttcaccacttgaatatactgcaatgtgtagtgagtaaattgtctccctttttctatagatcattaggttagagtttttttcttcttttttttttttttttttttttaccacttctgctgttcatggtagtagtggaaggtaaatttggaaatggcattgacataaaatgaaaatgtttacggacacttttcttttttgcttttttattgtatttggataaagatccacttaaaagttatctgttttttcctgttttttttttttttccccaaagtgtagttatgttttcactattgctgcttctatagagggcattgtgatagagagttacagatgaaacattaaatgccacagtgagtagaaataattactacaaaaagtaataaatatgattacttggtaatatcattctccatctaaaatactagtttcacctgtgagcagatttcagctcagtttatagttaaaaacaatgagggtaaaatgggattcatgctcagggaatgaatcagccatagttagagtgggaaattattattttcttcatttaaaggtagattttatgtttatttccctaaattgcataagataaaat

SEQ ID NO: 129528 - DNA, 1231 bp, Homo sapiens
tctgcacccaccttgcccttatgttaacatcttacgtaacaatagaacatttgtcaaaattaagaaattaaccttgatataatactaactaaagtagaaagtttaaaaagtagagattttagtcttttcactaatgtccttttactgttccaagacccagccttgcatttagctatcatgcctacgtcctgtcttccagtctgtgacagtgtatcataacaggggatacctgatgttgtaatgtatttctggtgttgttaaccttgatcactatgctaaggtggtgtctgctaggattcgctactgtaaacttactgtgttttccttgtaattattgaatatttgctggagatacccggagactatgcaaatgtcccgtttctgcttaaacttttgctcattttactatccattggcagatcttgcttgtggcagttactactgtggtgttctaatggtgattttctatttctctcaatccttctacatttattattggaattcttctgtaaggaagagttgtcagttctggatttatatttttaactataataagatattcaggataagtatagatttagaacttaaagatgttaaatcatgttaaaattattccaaataccaatatcaaagaaaactaagttggtaatctatctcagaaaatatatgaacttaagaaggaaaatagtatttatgatttgtagaattggttcaacttttgacttaatactgactttggactgaattcaaagttttcttgaaatttcacatctggactttttaaagtgtctacatttatattactttggggatcattttgtcaaagtcttgaataaagttacccagtcctggcatgataaacacaactatgtttttttttttttataataaccctctgttgttccaagtatgaatgccaatgaaactgtttaaacaaataagccctaatgaagtatacaggggttggattatatgtgtctccacatgttggtgcagaattcttttaaatgcttttaaaaatggggttctgaaaacagtttttcagttggttaatgtaaataataccattaaagctaggcaggttaaaaaaattttgaagaatgtagattaaataggcataaaaaagtttttgggggatggatagttgatggagcttttcttttacaactttacttttttttacttatttttttaaaaaagtaaggagtttacctcaattcgtagaagttac

SEQ ID NO: 129529 - DNA, 1003 bp, Homo sapiens
aggcctgggtgtggtggctcatgcctgtaatcccagcactttgggaggccaaagtgggaggatcgcttgagcccaggagtttgagaccagcctgggcaacatagtaagaccctgtctctacaaataaaaaaattcgcaggatgtggtggtgcacacctgtgatctcagctacttggaaggctgaggtaggaggatcatctgagcctgggaggtcgaagctgcagtgagtggtgaaagtttgaaaatcactgtcagagcccaaagccctggtcttgttattgtatagtcagcgtcagagacaactgtgaagttttcttcactctggatgcctaggtgttaatctgggattgaggacttctgcctctaaaaacaatgattccagctttggatataagatccagttgtttatgacccctacattcttggttttgctctttaaacaacttactggccattagcgttatcttctgcactaggagcatggggtcagcaagctactacctgagatcaaattaaacccctgcctgcactttactgggacacagccacactcatcagtttacatctcctctctggttgctttagtgctgcaacaggagaagtgattagttgtgacagagccttatggcctacagaacctaaagaatttatctggccctttacagaaaaaaagttcgctgcctcttgcactagaacattgaaagggaaaaagtagagattgttttacattttacctgttaaggcttgtctggtaaaaggctgatatacaaccacaaacaacagccagtaacattaagtgtgtttttattatttattatttaagacagagtctcgctctgtcgcccaggctgcagtgcagtggcaagatctcagccactgcaagctccgcctcccgggttcacaccattctcctgcctcagcctcttgagtagctgggactacaggagcccaccaccaagcctggctaattttttgtatttttagcagaaacagggtttcaccg

SEQ ID NO: 129530 - DNA, 1241 bp, Homo sapiens
ttaagattccattagttgtgtaatggtaggggcctggagcccaaaaccttggcgttactaggacagggcatgacccagctgacttggagtaaattttctgcctttaactacatttagattggaaattagggtaaaatgtttttgttgcaatctagtttcgagcatgtggtcctgtgattctgggtttgttttataacttatggactgagtaaaattacccagtttactgagagaattgagaactctgtgcaatggttgatctaatagaagcattttatttaaagcttccacccatccagttgctaatttatgttatttctcttttaaattatgtagattttgttgttgttgttgttgcagaaatggctccgtaaaatgattagttttgtgcgtgtgtgtgtgcgaacagttacacagttaagttcgttttcctgatagttttcttttgtctttagagagcgaaatgtcatcagtgcagtcacaacaggagcagttgtcccagtcagatccatctccgtcaccaaactcatgtagttcctttgagctaatagacatggatgctggcagcttgtatgaaccagtttctccccattggttttattgtaagataatagattctaaggagacatggattcctttcaactctgaggattcacagcagctggaagaggcatatagctctggtaggtgaaaattatgacttggaatagacaaagactctcccctcttcaaactataatataatggtccttatagtgagtgctatgaaaaccaaattttagatttttccagttacataatttcttacagcattttatatagaacttctgcactaatacctagccaatcaataatattcaagaatttggtctgtattttgaaaacagtatctattattatttctgcatagttacccaataatttttttttccttagagttgggggcctaattatattgtctaggctggtcttgaactcctaggttcaagcaatctttctgactgggcctcccaaagtgctgggattacaggcgtgttacaccctgtgcccagccccccagtaatatctttaatgttctagcttatgttttactttgttttataaagaatgtgtaaggctgggcacagtggctcacacctgtaatcccagcactttgggaggccaaggcgagcagatcacttgaggtcagagtttgagattagcctggccagcaatggtgaaaccccttctctactaaaaat

SEQ ID NO: 129531 - DNA, 1050 bp, Homo sapiens
ctgaggcaggagaattgctcaaacccgggaggcggaggttacagtgagccaagattgtgccactggactccagcctgggtgatagagtgagacttgtctcaaaaaaaaaaaaagaaaagaaaagaaaaaagtatgtatagagtggggtgcagaagaatgaactctctaacttgtcacttgtcttttcttcttttataaaacaagaatgattctatttatactgaatcatcatgatggttattaatttaccttatggttcctcaagcaaattcagaaaaatcacattatataatttttttaaggggcactgctatctttccccagaaaaagaacaaaactgggtagtatttttttcatatttcattaaaatcaggaatggttttgacggtttgtaaagtaggtagtgaaaaagatatgaattaaattccattttgtttggtgtttagtcaagtaggaacttttcattcatgtgtttcataacattatttagagtataactgagaattgtatgttgggagatttattttgaaatatgtacttcttttccccttttcaatccttgaaaggaaaaggttgtaatgggagagttgttcctactgatgggggcagatatgatgttcatttgggggagaggatgcggtatgctgtatactgggatgaactggcatcggaagtgagacgatgtacgtggttttacaagggggacaaagacaataagtatgttccctactcggagagcttcagccaagttttagaggtattcttttgactctttttttacttattctttctttctcttatttaataatcttttctttcctttgtaatttattttgtgaaatttccagaaagactttggttctgtctgcatcacattataaaacataataaagcatttctatttacaagcaagtttcaggataaagtagtcttattttcagattttttttttttttttgagacggagtctcgctctgttgcccaggctggagtgcagtggtgcgatcttggctcactgcaacctccacctccccggttcaagtgattctc

SEQ ID NO: 129532 - DNA, 1078 bp, Homo sapiens
ggaatctcccaacagagaaattattattttacacaatccaaaggtaaaacaaagcatttctcttgtcgggataaaaagttaattgcgctattagggagaactcaattggtttcttttgctaagcactctgtgtaggataacctttgtcaaattttatattgaattcacagttatgaaacttaaaaacttgtagccactactgttatttacccaactcagcttatacaaaataattttcttatggaaaattatgccactgtagaataagaaaatcactgacatattatgtgagcatgtcttccatgtagaaagggactattgacagatctgttagcctaatatattttcacggttctcatttcaagccatacgagttgtatatcaaaactccagttcagattttactgtgtggtttgaaagacatgattctacacttaaaactgcattgtatagagatgattgtattgcagaatatttttattgctctgatctgttctgtttaagcttatggtgcattaccagccagttgcagggtctgatgattggggttcaacacccacggagcagggtcgaccaagaactgtgaagagaggagttgagaacatctctgttgacattcattgtggtaatgttaatcgtttattttttcttacctttggatgtatttgtttactccttaaattgtgacctttttctgtggatttagattacctcaaggcttaaaaatcatctttaatcatatgggtttattccaagttgagattagcatcacttcgtctactaagaatcttaatagatgtaaaaatatcttttaaaacatatggtaggatgggtaaaatttggcaatactatccaggaagtcactaagtacagatgaactgatttagtcctaattccaagaagtgtgattccacctacttgactagaaatttatacctggtaataactccttgtccttgaagattttcaactaaggaaaactgtttttcagcaggacctgattatgcactgctatctaggtagggtcacttatggttttataatatatttaattggattataatattccttttttctt

SEQ ID NO: 129533 - DNA, 2153 bp, Homo sapiens
catggtggcacatgcctgcaattccagctatttgggaggctggggcaggagaatcgcttgaacctgggaggcagaggttacagtgagctgagatcgtgccactgccctccagcctgggcaatagagcgagagtctgtctcaaaaaaaaaaaaaaagaaaagtctctttaatttattttcttgattaccacttacctctctgtctacatctgttgttttcttgcagtttatttatggaagaaatgggtttgacttgagggttttttatactctgaattttgcttatcacattcctctggcttcattacacatgttcctttgtcctctttttgttttttcctataaatcgacaattgtttgttataaaatgtttaagcttgaaggcttaaaattggaagcagctattaagtgtatttaggtttcctgcttatattatttttccttttttcagagatctgcagcgaataaccctgcccagcattaaccgcctcaggcacttcaccaatgacacaattctggatgtcttcttctacaatagtcccacctactgtcagactattgtggacacagttgcttctgaaatgaaccgaatatacacactttttctacagaggaaccctgatttcaaagggggtgtatccattgctggtcatagtttaggtaacaaaatgagttctgtgtgaccagagaagactatcacattttaaagacacctgtttttgaagcacaatgtcttttatcagtatgaaattcagaggtctagaagtggtctgtggtcaggaaatttggaaggggttggaagggtggcggtaaattggaaagaaagactccttgctgtatagatttgcttacatatgtaattggcttatgccttttttgtataacagagagccatttagtgctaatgcttagaaattgtcccttcttctattttacttataggttcgcttatattgtttgatatcctaacaaatcagaaagattctttgggggatattgacagtgaaaaggtaatttagatgttcagctaggttttcttgtagttttccttagtaaggatttatagattttagacttattttttgtttttagctgagtttagtttcatgtcatgacattacatttacacttattttcattttaacagacttttaattatctctgtcattcttggatgatagaaggaagatagtaacatgcttctacaaataataattgttatattctaaaccatagttatcttattttcttttgtgaatatgcaccactggctgggcgcggtggctcatgcctgtaatctcagcactttgagaggctgagactggtggatcaccttaggtcaggagttcaagaccagcttggccaacatggtgaaaccccatctgtactaaaaatacaaaaattagctgggcatggtggtgtgtgcctgtaatcccagctacttgggaggctgaggcaagagaatcgcttgaacctgggaggtggaggttcagtgagctgagatcgtgccactgcactctagcctgggtgacagagtgagactccgtctcaaaaatatgcactgctgatctgttaatagagttatggaatcattgagctaaatgaagtttgcatatgaacaaatgaatgaattggctacaaattgatatgatttatagaaactctgttcgaaagtattggggacttgatgtttaaacattattttagtaaaaattcctataaccatgtatcatctgtaggattgatttggtacctatttctcctgttggaccatgagttcctccagagcagagcttttgtcttagactattttatttctatttctatttcttttttttctttctttttttttttttttttgagacagtctcttgctctgtcacccaggctggaatgcagtggcatgatctcggctcactgcaacctctgcctgcagggttcaaatgattctcctgcttcagcctccccagtagctgggacaggcgcatgccaccgtacccggctaatttttgtatctttagtagagacagggtgttggtcagactggtcttgaactcctgaccttgtgatccgcccacctcggcctcccaaagtgctgggattacagatgtgagccaccatgcccagcctagactgttttatttcttaagcact

SEQ ID NO: 129534 - DNA, 1020 bp, Homo sapiens
cctggctaatttttgtatttttaatagagacggtgtttcaccatattggccaggctggtctcaaactcctgaccttgtgatctgcccgccttggcctcccaaagtgctgggattacaggtgtgagccacccgcctggccgatctttggctctctttctagaaattaaacacattttcttttttacattcttttttttttcttttcctggaaatgaaatctcgctgtgttgcccggggtggagtatagtgggtggtctcggctcactgcaacctccaccttccaggttcaagcaattctcctgcttcatcctcttgagtagctgggattccaggtgtgcaccaccatgcccagctaactttttgtatttttagtagagacggggtttcactatgttggccaggctggtcttgaactcctgacctcagatgacccatgtgcctcagcctcccaaagtgctgcaccgctcctggcccttctttttttacatccttaaaagtattattagcttcagaagtcttctctcctctggaattctcctaccatttatttatttatttattttttgcttttttcttttcatgagagttttaccaatatctacttcacatcacataccataaaattcacccttttaaagtttacaatttaatggtttttagtatattcatagagttatgtaaccattaccactatccaatttcagcacatttccattgtcccttagggaaaccccatacccatttgctgtcactccccattgctccctgcccccagcctctgtcaaccactaatctactttctgtttctacagatttgcttattttggacattccatataaatggaatgtccttttgagccatgtgtctgacttctttcacttagcataatattctgaaggtttacctgtgttaacagtacttccacattcagtttttctggtcactgaatttctaactccatatcttattagttagtttttttctttttgagtcggagtgttgctctgtcgcccaggatg

SEQ ID NO: 129535 - DNA, 1753 bp, Homo sapiens
gatgtgaaattacaaagtctgtgtattcgactctggcattctctgtggttgccttccagttgtgactgcagctcttctcccactttcttccctagacggacattgagggatccttccccagaaaatccacctgtttgttgctgcaattttcctctcctcagctgcgtcatttcctgcatgttgcctgccacttactcaccactggggtctttggaagataatcttcctctttggaaatgaatggaaaagcaaaaggccctattacttttaaccactggcttcatataaacacttgccatttttttctgcatagctgggggtggtttgtgtctttaattctttgatgatagtttatagttgccacactttattgattagtacttgacagggtgtaaagcctattttgggtttgatttgttttgggtggggtagacatgtttttaaggaacttattgcttatctttagaaaatgttctagtttggaaacagattcttgagattcagaaggcattttggagtacacttatctcttgtttgtgttgaactgaaggctaagtctcagtggacatggaaaagacttttgggtgatttatttttgaacctgcatttctttcttatgtgtagtgtatgaagaaagactagaatgtagctttaaaaaagtgttgtttactctcttagaactgacagacttattgccagaaatcactgatgttcattgtttttgcaactgtttgagctgctgtaagagtctaaagttgacaagttagttcatgttaggtgcatctttataaagcaaagatgttgtatatcctaggcctcccttttatatttgatagaagttatttgctaatagcttctattcttacgttgaaaatagttgtaaaagctgatgaacctgaaattgtgtagcctctacaggctgctgaggttctaaataaaaccttttagtggtgcctttatggtgaaacagaatttgtcacctgccatttctacttgagctaaggtagtattgtgtatcctctttccttcttaggtatccataatccacaaagcatatttaaaaggctcttggcacgggcagcattggttgagcaggtaggtttggctagggggaaatgtttaacttgttctgaaagaaaaacttatgtctgtagggtccaagaaacagctattccagagtcagtgtcagctgagtctggaacatatgaagtgaggtttacttctaagaacacaagtgactgcacactaattttgtcaaggcatcttttcactactttgctgtagatttttcttcttcattggtcagtttgtcattgtctttgtagttctctttatgataatcctttatacttgctctcagattccacaggcctctgtttatagagtggcaaaggcaggcgagctgtggtttattgtttataaatttttttataaatgttatggtattcaaagccactgacatttaatatttactgaagccattccttagacagcagtggtctttatccctttctggaaagaaaaggaaaatgaagggtaattactgtcaccatggagattgtagaggtaaggttggggtataggtcaggcctggcctttctttgtcatctgcttatagtctagtgctaagtatgccactaagtttcagatatatggaatactttatttttttaaaggtatataaactctgagttattgagaattaagtattcactgtatattaaggggaagcttttgccaagttgtggtcttc

SEQ ID NO: 129536 - DNA, 1082 bp, Homo sapiens
ttcttctaccgctgcttccctgatgggctagcccattctgacttgatgtgtacaggggataaggacgtggtgaatgagggccgaaagagcttccccagtggacattcttcctgtatgaatatcatatggactctaccctatgcttgttttcacatcattgaatttaacctagaaagctagtagggatgggaaaatctgactactcttgtttctacaatttggaaaatccccccttctttagtaactccacagtttaacaagtctgagccttgactatttgggtaaatattacagaacagaaaggtagtttaccttcatgagatttgcacatttaattgttatattatttgcctagatcctgcaatcttgtactagcaataaaaatacctttaacgaagagtttctatgtgtcaggtactttgaagcattttcatttcttacctaattatagctcacaataatccaatgaggtggggactattgtatttatgagtcccatttatagatgaggaaactaaagcatcaacaagttgatacatatagctagtataccgaaaactatactcagataaaacattaactttggggcactaagtccttcatttttctttttgtttccctttccttcacaatgacttacactataagtatacacaaaaaaggattaaaacaccctcatggccgggtgtggtggctcatacctgtaatcccagcaattgggaggccaaggcatgcaggtcacttgaggccaggagttcaagaccaggctagccaacatggtgaaatcccaactctactaaaaataaaaaaattagctgggcatggtggcacacacatggagtcccagctactcgggaggctaaggcaggagaatcgcttgaacccgggtggtggaggttgcagtgagccgagatggtgccactgcactccagcctgggcgacagagcaagactgtctcaaaaaataaataaataaaaacatactcatgcttcctagcctcctatgtggggatgaatgaggtagcttcctttaaaagacaaaccacttaaaagtttttcttgttccagttgcatttgctggtc

SEQ ID NO: 129537 - DNA, 1050 bp, Homo sapiens
cctccctacgatcagttttattgtgttggtaaagacgccattcagagccagggcaaggctggcagctgcaaagcaaagccattagttgaaaggatctgtctaggaggaaaggtatggtcatggcctcgttatgagagcagccgtgctgtttctgagatggatagaatccaaccaggcctgggcacaaaaataattagggtcctcagtgatcactcttttgtagccgagaacttttgtactaggccaaagacatttctgaggtacaaataacccagtgcatttaggcacagggctgcctgccgtgtagcctgcgtaaccaagtccctgcagtgctattttcctctcccgcggggatagagttcctttaggaatgcagaactcagtggcctccacacaggctcaccgtggctgaatcccacaacgacctcctaggttcccagcacgaagaaaccggcccgaaagggctagcgctcacccaggcaggcttgtctgctgtctcttgtgtctgccttcttgagaaatttggccaggaagatcagagacagtggagagagaaatgcaataacctgaatcagaatgtcagaggttaaaaacaatccaaaaaaaagccacactcgtgctcctacaggaaagagggatgtgacacagcaggactcactggagctaacataaggtctctgagtgcgcgtaaccgggcgccaggcagcgccaccagtgaacagcagcgcccgtgcggctcgggccccggtacctcaggctgaggcacagagcgcccgggaaaacgttgtctcagcccaaagaggctcggacaccctcctctctcaatcaggatcttaaacactcgagccctaggaggcggaacccagcgcacagcagcggagtgggcagtgggtccctacaaaggccgtctcggggtggaaaacgcacaggtgcccgcgggaagccgggtcatggggagggaggaaagacgatctttctccacgcacaaacatcggcttggtggggaaatactccgcctccacgtaggggttccggtagagccacatctcc

SEQ ID NO: 129538 - DNA, 2711 bp, Homo sapiens
tacctagtaaccttatgaaggtagggagggtagatgctctaccacattccttcagctgtattgagtgttccatttgcttatcaatttagagctcttctatggaaagagggtgaaaatctgttttgtgcctcttttttttgtatgtaaatgtgcaattatactggattttctcttgtaaaaaacactacaattcttttactgaagctcctaaactgccatttgcctgactccagcaattaattctgcggtgactcattgggcttccagtacttctgttgattagatatggtcccaaaagaaagagcaaaatggaaaatgcgatccatgtcaccaaatataattgctacaagtaacatgaaatacagctcaccaaaacactaaactttgctcttgagcaattatatagtttgatgtccttttaaaaaataagaaaagctaggttttatcatactaaaattttattttgtatatgatgtttggttttttaaacttactaacataaggatttcctttaatattccaaatacagttcttgaaacagtatccaacatgaaatcttatctccttgcttttagacttagtgctatttactatctaaagacttttctatggtaagccagggtacatcctatatactacagataccttaggtttcagtatttttatgcagcttcttcattgtgtcacattttgttttcatatctgtaacagagctctgctgaaattaaaaaaaaattatgattaataggattgtttcaccatttcagaaatcagagtagaaaacaaaatagctgccaggtgcagtggctcacacctgtaatcccagcactttgggaggccgaggtgggcagatcatgaggtcaggagtttgagaccagcctgaccaacatggtgaaaccctgtctctgctaaaaatacaaaaaggagccgggcatggtggcacatacctgtagtcccagtttctcaggaggcagaggttgcagtgagccaagatcacatcactgcactccagcctgggtgacagagcgagactccatctcaaaaaaaaaaggtaaccatagttctgaagtctttggccatgaatgttctttaatggtctaaaaagcggttttagtcatgctggtgccaaggagttctcctcacacctccatagcgtcaatgttgacctatttgatatatttttaagttgcagattatagatgcagaaagagaaaattgtcctttatgtgtgcatgagtatacatgcactgtgcctgtgatacaccaatgaaatattccaaaagacattgctcactcatagtctgaagttggtatttgttaacttttaaatctatatgtggtcagagtgtaagtggctggtttttattcttgtccaacaatgaaataacttaaagcagcatgggctaatggtggtattttttttaaccacatgttaatttgttgaaggaagaagtgaacataagatttttgataatcagcctaaagcttcagaaactggatcagtaagagctaaagatgaaatcctgggaaactttctcaggcactgtgcaggggagggaggggctggaccgccactgctgcgagggaagaatcagaagagctgcctgtggctggctgagaagggcaaggtggatggctcttcattcctggaaggctgaagcagccagaggcagtgattcacctctttaatgtctaatcagggagagatacaggagtgaggtgggttttattttcatttttgttttaacaagttcccactcttatcttaattctcaaaaatgatctggcctcatctatagaactggctgagttggggaatcatttaaaatttgggattttctgtacaagtcaagaacatatgtgaaagctaaaaaagtaatggaggcagggggactgctcccagctcccttctgccatttacacaaaatatttgaaaacatgtctgtaaataacgttgtggaactgagatattgagtatctaatcatgtaaaggaccctcagatgggacaggctattggacaactttcctggttcatgaagtggaatttcctttttgagtagtttcttgcatggtgtattccaataggtcaaacccagacctactgtttgcaaacaggccatctgtagagaatacaatctctggactgcccaggacttgttgcttgtctttcatttcattttaaatacaaagctcttcctttagcattcaccttgaagtcaaggtgttggctgccacatgccatgtcctcttaacaagataagaaaacagtggctatggagccctcacagctgggaagctgacattctatacttccatatgagaaaaaggacattggaaagttgctttatttctgggcagcgtagactaaagttacttttcacaaggctgatgcatccagcctcccccagttgtccaagttggtgcagacatgaattgatgaatggaaacactttcctttggcctagggccacctagaattggtctctggttatttgtaaaacaaaaagtagaacttgcttccattttcagatggactagggaatactataattagacagctttgcaatgaattaacaaatactgaaaagttggaaatgtgtatatactgaaatctcaccaacttttacctggggtggggtaccaggagaaagggaaccccctttctcctggtaaagggtaaggggggggataatgtttaccacaggtacga

SEQ ID NO: 129539 - DNA, 1126 bp, Homo sapiens
caaacagataagcactggagaatatatcctacacagtagtccttccatcagacagctctccaagttttgtttctcatttttctttcttctttctggcctaagctctcatgtatcccctcctatactagttttgcttcctgcttggagcagaaaaggaaggctgacagcaaaacaacagagcagttatcagaactttgagatctctaatcagaaaataccattcctaaacctctggcccactaatcttctaaatagcattattccatggtctatttgtttctagaagcaaacttaaaaagcaactaaatcccactttatcctaattactttgacttgaaggtcatcaaataaaggagagaacttagtaaattacccaggcagcctcacatttcctgatctgtcagttgtcaaacaccagttggtagcaaaatgctgctgcctgtgatccttgactgagttggatgtttctgggagagacttaatttatgtaaaaggtacttttcttttctttctgaaggaccgtataattgatgccggcccaaaaggaaattattctcgcttcatgaaccacagttgtaatcccaactgtgaaacacaaaagtggacagtgaatggagatgttcgagtgggactatttgctctctgtgatattcctgcaggtaaaaaagtgactcgttccccatgctttcctccctaggaagaaagaatatcctatagagctaggacatggttcttcaaggcttgatgcccaagaacttatttaaataagaggaaggttatatttagaaaacgtattcaaataaaaggagagttatatttagaactgagtgttagctgccagtgagaggtaaaaatctataacctcaaaagggaatttagtgagaacttttatgtaagagcgggtctgacaggattctgtgtccgcagtcctgctgaacgaattctccaagttagctgctgtccatagagtgtaaccagatgttttagctgttgttttctttttaaaacatattaacagtaatgagcttgtgttaacagcagctggttccttagttgctgggatcttttgttgttgttttcactttgaaagatcattctgtttcaaattagacataaaagcctctga

SEQ ID NO: 129540 - DNA, 1055 bp, Homo sapiens
ttttatcaatagaaaagattaaatgttttaaagaccattggcttatgttcctaatgattttccacaatcagaaaacgtgatgcagtacttctttctcttcagctagggactaccaacagttctgtgatactaagagctatgagaagggctagtggaaatttgtggggtggggggtgggagggagaatggggagaatgggacagaaatctgataaaataagccaatacctttttgtttttcaagacatttattttcctctaaaatatattagtaagattggtaagtccttatagagaatattgacctagattgaatgagcagtgcttttgaggtgaaaaggttaatgattatgtaattataaacacaaaatgttgaatgtacaatatttgctcttattttaaaaggagcttatcactgtatgccttttagaacagcttaaataataaatagtggcaataccagatgcagacaggacgtggagaaagtggatctcatgaactgctggtgggaacataacgatggtatagcaactctggacaatagtttggcagtttccttaataaggaaacatacactcaccatatggtgcagcagacacactcctggccatttatccaggaaaatgaaaatctatgtccacacgaaaactttcaccagaatgttcatagcagctttatttgtaaagccaaaatctggaaacaatccaaatgttcttccatgggtgaatggctaaacaaatggcagaaacactactcagagatttaaaaagaacaacctgttgatatactcagcaccttgggtagatctcaagagaatctgcctgatttttttctttaaagccaatctcaaaaggttctgtactatatcattccattataaaacattcctttttttgtttttttggttttttgagacagagtcttgccttgctctgtcacccaggctggagggcagtggcgcgatctcggccctctgcagcctctacctcctgggtttcggcgattctccagcctcagcctcctgagtagctgggattacaggcatgtgccaccacg

SEQ ID NO: 129541 - DNA, 1047 bp, Homo sapiens
agattattctaggaatagtcttttttttttttttagacagggtctcactcttgcccaggctagaatgcagtggcatgatcacagctcactgcagccttgaactccagggctcaagtgatcctcttgcctcagcctcccgagtagctggggctacaggtgcccactatcatgcccagctaatttttgtactttttatagagatagggtttcaccatgttgcccaggctggtcttgaactcctgggttcaagcgatctgcccacctcagccttccaaagtgttgggattatagctctgagccaccaagcccagcctgagaatagtctttttaatcaagtgaagttcctttgcaacagaagagtagtaaagacttgccatgaaaagccttacaactgcttttgcaatgagttgccagcaagtttggctttctggtaagggtaaaatgaatttaaatctattacaaggcaaaaagctgctcttagggtcacttggagacttctgatcattgaagtagagcctcttccctgtggctacagcatgcacagagcatagtgttcagtgagttatatcctatttctttgttaccccatcctggtggtaaacagtaacttccagaaaataattctaaaaagaaaaatctcaggccagatgcaaagcattgggaaggcagcgtaaaactactatcccatcaattttcctttggtttttggtatttacatactttgtatcatcttattggcagcactggaagaagctgcaaaacgtttccaggaattgaaagcacaaagagaaagtaaagaagccctagagattgaaaaaaactcaagaaaaccccctccctacaaacacatcaaagtaagtctttatctctggcctgggattgccaaataaaataagaaacaaagtaagtctttactatgaaagcattgttatttaatagatgagacgaaatgcattactctttagtagttaaagaccctctttgacttgtgcaaacttttgctaattatcacagtcttctgtaaaacagagcttctgttggaagcat

SEQ ID NO: 129542 - DNA, 1061 bp, Homo sapiens
tagttaaccatggcactggattaaaatacaacgatgacttgctttctttcttacctctgaaggagaaaagaaagttgctacttacatgtttgaaaaacctctcaaatctactcagtcaaaagattttatgcttcaatttggtcatatgttaagagtttagcttctaaactgatacctcagtagcccatagtttaaaggagtaaagagtacatggatgcttttggtactactcagaagctctgagtttctggccactgaaaccctgaaaagtagctaaatacgttcacttgctattttaatccatcactgtagatatgactcagtccctttgttattttcccccaatttgaaacaaatttaatgtgctgaaaagataactttctcctttttctttctttttctctctcctcttttctcagttattaagactgtttatttgtttcaaggtggaagattgctctgctgtgaatcgtgcccagcttccttccacccggaatgcctaagcatagaaatgccagaaggctgctggaattgtaatgactgtaaagctggcaagaaactacattacaagcagattgtttgggtcaaattgggaaattacaggcaagtttttccaagaacaaagaggaagtattcaatcattgtgcagaccagtttcatactctggatacagagtgacttggagatagataggtagacagcatggacctacttccttaaaaaaaaaaaagaaaagaaccatgttttgaggctgggttcttaaggggttgggaaggttatgttcctaattcattattgaatttctttttctttttctttgggattggttggttgattgtttgtgaggcggtttggctctatcaccaaggctggagtgcagtggtatcgcagctcactgcaccctccacctgctggctgaagccatcctcccacctcagcccccaaagtagctgggattacaggttcacaccaccacccctggctagttttttgtatttttagtagagacaatgtttcgccatgttgcccacgctggtctcaaactcatgagtcaagcaatc

SEQ ID NO: 129543 - DNA, 1045 bp, Homo sapiens
ttgaaaaaattctttgtgttgcctgtttgatgtatctttgctctttgtcagacatctgaagtggcaactcatgactaaaagaaagtgagactaagcaagtcgattggaacatattagaagtattggagagagtactggcttttttgtctgttttctgcagtcagattatatcaccttattgataatactgcctacttccaaaacaaaaaaatgaacataggtttgacttactccataattattctgcctgagacattttaggaaatgctttattttcttgctggtacctatataaaattagattaattcaattgttgcttactttgttttcagtactcagtattaactttgacatgaattgaaattattttgagccctctgtttgcttaacttgaaccatatcttacttctcttgtatcctagttttcttgcatagcaccaaggtggaccattcacatttttttttatttcccttgtgtattttaagcatctttatcatgatgattttctctgatgattctggctctgtatttcctctgaaataagacttaaaattaagaactattccataatgttaaaaatggccagcctgacttttctaggtcagtactaataatcacatgtcctctaaagctgtttgcagacttttctccctgctggtcattcctttctgatggaaaaaaaaaatgaataatctcattttactttaaatttatagacaaattccctccctaagtgtagagcacttgggcatctgatctctaggttggtaaattgaatcaattaatctatactgagatgtagtcccagaaaaaaaatcttgatgattgaagtaaaagcttttaagcagaggaaatacagtgatttaattcatcatgggttgtatatggattttctttttgtttttatgttaatcagaagtttgaaaatttataggaagacaagattttctggaaaattggtagcaagccctcagaaggttggagcatgtgatttgataaagttgcatagagggctcttacccttttgcttatgagactttaaa

SEQ ID NO: 129544 - DNA, 2132 bp, Homo sapiens
tttttaaggagacataactgtaataaatccacacacagaaaggagcactttagtcatttctgtttgggtattagaaaacttagcttgttttgcttgtttcttgccttatacagaatttttccctccacatagattttctcttagttcttggttattgggtgtttaaaatcattaagctatttcttaaggactacaatgtctggaaatattttttgaaatgtttcagggtttgacatcactcctcttccacatgccacctaatcgtggagtcacaagaagtgtgcggacatttttcagtgtagtgcacattctttagcatctcctttcatcttagagggttgtgtaaaataagttacttaacattctatgcctttctttgtaatggtaattttaaatggataatgtaggctggagttttcttttcattttaacagtaaataatagcaatttattttgcatatgtaagtcaaactttactaaacattatctgaatgaattgccacagtttccctaagaagttatctctccatagtatacaggtgagaacactgaaacctagattaaataatttacctaatgacacacaagttgttaaatggagggactagtatttgtacttaatccttcttatttcaaagcccatattcctttacactactccatctccctctattaaatgtacaaagttcatttcaacattatataacttttttttttgagacagagttttgctcttgttgcccaggctggagtgcaatggtgcagtctcagctcactgcaacctctgccttctgggttcaagcgattctcctgcctcagcctcccaagtagctgggattacaggcatgtgccaccacgcctggctaattcttttgtatttttagtagagatggggtttttccatgttggtcaggctagtctcaaactcccgacctcagctgatccgcctgtctcggcctcccaaagtgctgggattacaggcgtgagccaccatgcccagcccatataacttttattagaagactctggctgagcaccatggctcatgcctgtaattccagcattttgagatgctgaggtgggaggattgcttgagcccaggaattcaagaccagcctgggcaacatagcaagacctcgtttctacaaaaaaatcaaaaacgtagccaggcatggggacaaatggctgtagtcctagctactcgggaggttgaggtggtaggatcactcgagcccaggaggttgaggctgcagtgagctgtgatctgccactggactccagcctgggtgacagagcgagaccctgtctcaaaaaaacaaaacaaaaagaagattgtcatattgttagtaatttcaagttccattctgttatttaggtcagagatatttcttgaattcgtctcagtgtagagtatgaagacaatgcccacagaaaaaagtaaatggtaatttccctccccttcaaaatgatctcttaaataaaactgctgccgtaatttgtattgtaaatcctacatcattatacactgatccagtaaccaagatagaggatagagaaatgtcccctggtctcacagttgcctaggtttaggagtggcttatagctacatcatgaattaactgggggaggggtaagggaaagaagagggaaccacaggtagctttagtgttttcctccaagtagcatagctgtaattggtagatcaaaaagattgtttttattaacgcttaagttggtaatccttttatattgtggcagggaaaaaatgaaaatgtttgcattacctcagtaaagttcaggaaattatggctcctttaaaatcatgtaccaggcctggcacagtggctcatgcctgtaatcccaacattttggaagaccaaggtgggaggattacttaaggctagaagttagagaccagcctgggcacaaaagctattatagaccccatctctacaaaaaaatttaaaaattagcctggtgtggtggcatgtatctgtagtcccagctactcgggaggctgaggccagaggatcgctagagcccagaaattcaaaggtgcaatgagccatgatcacaccactaccctccagtctgagtgacagagcaagactctgtctcaaaaaatatatata

SEQ ID NO: 129545 - DNA, 2371 bp, Homo sapiens
tctgcattctcggggagaagtctgcagcgatggtctccgtggagatcctcagcagaactgaacagcctctcggagggaacactgcttggcggagctccaagaaaagacatcgcgatcgctgcgagattaggaggcctgattgcgttgtgtttccaccattccacagggtcggcggaccggggagtgcagggctctgtcagattcagtgacagctccgtctccgcagcgattgaggaaactgtggactgagattcctgtacaatttcatcccagaaactccagacttgtagtctccatgcaagatttctttgtcggcggcttgataaacagtttctttgttttcgattttgatttcgccaatcatcattattggcattttcctgcctggtttcttcttcaagactctgaacaattgctttaacagtcaaatgatttttttttttcggtttgagctggatgggtacagcttaaatcatgggtccagcctaaaaaccaccatttaacttacactgatcaatttcaacatggactgtttttggttttttgtttttaaataaagcatcattaatgcacatctgcaggggtttgccaaacagcccaaactgtatacattacaatcattaaaagttcttattttttttaatattagtgccgttatcatggagaacagcatgacagctgtctttggcagtctgtcatttttctagcattttcagaaactcatcggaaatggcggtacctgtgtttcccttcgaaagcctctcagtacagcactcctgttcctctgttaaaactccttgttaatccagtgatcttttaggccaaggaaatattttgtgatggtgttctgggtccatacaccagcaatgaaggagatagatttgtgtacttgtgttttttaatcagcattaacatgggcaggcaccctcatttatagatgtcaggaaacattcagtgaaaaacttgtagaatgggatgtgataacgaggttccagtaatctgagcagtctaacgaggcccacctcctccaccacagaacgtggctatgttccaagtgctactctcactcagcctgttgcggatcttcatggcctcaggagacttgtttctccatgggctcttctggactgcacacttccaccatagcttgctgggttgatctagatgtctgtttgttgtatggaaattttgggggaaaaaatccaaaacacaaactgtgggttgaaatattaaccgtctccttggttccttggtattcaccgtgcctgatctgcacatttcatcgtggctgtttctgtatagcctatactgcattagcccaagagattgttgctttgtaactttttgcactattgttttggctggatttgtattacacacagttttaaaaaaaacaattccacactattctctgccttttttttcctatttatttcttcccgcacaaattccacatagaggccttcccatccagctctacgtgatttggctgcacttgaacactgattgtccatttacagccctcagcaatgtgccttctaaatggcatgacatatgtagatgtgctgcagcgcttgttaatggtcacaataaatgccacttcaccaaggaagtctcagatgaacaattatgaacatccaaattttattggggggcaataatcaactgaattgcaaaatttgggggaaaatggcactatccgtgtacgaatcgaatacaaatcaaagatttgtcacatccctaataaaaacaagatggagatgtctctgcaaccatatttgtaagctacacagtgtgttgggttttatgtcttccccctccaaattgaatggttctttgaattgctccaaatccatcagctatcctgcaattttcatagaattgatttttaggttggaacgtgggctctgttgactgaaaatagctttagagaggagaactgaattaaatgttttgatagagcggttgtaaattaaatcagtcactaccaggaaggtcagaagttctgaagttttgactcattatttcagtgttacaaagagagctatgctttttccacactaaagatgagtttgagaaaagaaaatattctcccacacacaaaaaaattaaaacaaaccttaagtactattttaggattaatttcagtgtgttgtattaaggtgccagcgagatttcagattcctgtaaacctctaaagaaaaggagtcgcgcctcaactgatgtagaaatgactagttcagcatacagagacacatctgactccgattctagaggactgagtgacctgcaggtaaatatgtgcaagggtctggacaaagtgttctttcttgaacataatgcttttcccttatttatttggggaaatcag

SEQ ID NO: 129546 - DNA, 2222 bp, Homo sapiens
tgggggggttgcattttgactgaagtgtattaaaccagtgtaatcaatgtagtaagatacatttaaatcaacttttcaaataaaattttagaagccattcttctttaaattaaactcacaatcagattttttcttaatttttttgttaaagaatatccattcttacagcctaaacacctgctagcaaacaaaacaaattctgaatagaattagttccaataagttttatattttttaaaccatttatatggaagaatgtgagcttttctatttaaaatatttccttcatgattttaaacttccaaatttaaaagctaactttgtgggtgctctgtggtatcaccaagcaagtgaaacagtttttccagaatatttaactaaaatttaaatagtatactaatttgtcattcatttatcatattaactttcatatttcatacttaggaaattatattccaaaaaatctttctaagctcttgaaaatctatagttattcattaccaaaatgaagttgtgattttgccagctggttcccaaaatcagtctgtgaccagtcagttttaaactaataagcagaatgagtataaaaagtgggacaaattgttaatgccactgtgttatagttagtagtagaacaataccagtgattgtttagaagattttatatttgtattactaattgtatcttataaaagcgtttctgttgtatgtttttttacctgttgtaaaaaaaataaaattttttttaaaaagcttagaacaatccttaaatatttacaaaatgtgtttcaacattcatatttcaccacatcttaaagaaacatgaaattcaatttatagcttaaacaggaactcctccaaacagcctcctttctctaattccaatggttcaatcctcaaattaccacgtgttttacatatacattggcagaataacttctgatctcgctctcctaatgtaggatcaagacactgttcataagacactcaagaaagtgcttttgcaatatcacaaacttattttcttaagtttgtactagcagcaaaagtattgagcttccagctgtatggagccctgtagcactctctacagagagggtcctgattcccagcaacttagctgtgagtgcaggcgcggaagggtcttaaagtggcgtgagttacattaacctgagtatcatagtaagtaaaaatttatcctaacgtctttggggcgggaggggtttttagcaacattggggccggttgcagaaacaacccctctcctgccttccagacactgaggaaagtattcttgttctcttcatataccaagggaatggtgggaaaagtctttgctagagagcatgtggctgtgtgttgtcacttgatattcagcacaggcagctaggatttaaaccctccctgatcttgagacagagaactttacccaaaagatgggactgagttcagatttcagatacattaatcactcatcattgcttagattgatgaaagtatcttttccctctgttaataattaaaagggaaaaaaattctttgttaatgctgtatttttctgtccaaacaggttgaaacagttcctcaggctacagtgaagactggattacagaaaggtgagttaatattataatgttgctttgcatttccttgattaaaaccaatttttaagaattatttgtacttcatgtatttttgtctgtctctgtaaatcgttgttgctcttcagtgtgaaattgcagtattccccagtgttcgtgtgtgtgtgtgacttttagagttgatcttattctgtacctccacgtgaaaagtcttacttgttttggtaaattggagaacacaacgtagacttgatactgtttccaacttttctccataagattctggggtttcactggcttataaactagggatgtgacgaatccactttttttggtattcgactgaataccgaatagtagctattcatgtttgtcaaacatggactatgacaaatcagacaagacaagctgattgaaaaaatcttgccacatttatttttacagtgctgtaaaatctttttgtaaattaaaatgattcatagcatttatggccactattagatgaccttatgcgaatctatttgagatatgcacaaagtttaagaaagcttaaacttatatctgtattttctgtgtgcaatttgactacagtacaaactccatagcatgattcgtgcgttt

SEQ ID NO: 129547 - DNA, 1045 bp, Homo sapiens
agagtataacagatcccttgatagtcaaattaatgattaggttttggtcacattttttgccttccctgcttttcctgcttttgttattaataacaacagcaaaacttacataagtgcaacaagcactgttaaccattttatgtatagaattaattaaactcatttgttaaaatgcagaatgtgtggcactgattgaattttgaaccaataatttctaacatcaggtggataataaagtttatttttatgcatccttcagtcccttcattccctaattatatttacctaaagatgtttatgtgcctttaaaactaatgtgtctgctgttttagtttgacttttcaatttttaaaaaaccaatccccctttatttgtataatttaggaccctttgtgaatcccagtctcagcttatcagcctttacaatttgatctgttaaataatttatatgctcctgaatgtttagcattttttaatgattttaattaaaattccaaaagtaatgggtaagaaaagcaaggaatgtggtcatatcttaattacatagatgtcaaggtatccttaagtgagtttttgtttgtgtgtttaaatcatttcttaggctcagtagaaaagaagcaacagagaagatcaattagaactcgttctgaatcagagaaatccactgaggttgtgccaaagaagaagatcaaaaaggagcaggttggcttcctacatgtagagagttaaaacattgtatttgtaaatgttgtggcttacattcctgtcttaaaagaaagagaaactttcccccacactgagtttcctttctggactatcttaacgcttctgtcctggtgggttccagtgctcagttttaatacagccatccctgtgattctgcttcaagcattttcacagaaaacaggtttcaggagatgggaagccagtggtgcaagacttaaaaaatccttcacatttatttagaagtttctgttatcagcagaatgatttcatgtttttatgatttttatttggaaccatcattgagttccttttttttttt

SEQ ID NO: 129548 - DNA, 1326 bp, Homo sapiens
gttacccaggatggtcttgaactctcgaactcaagggatgcacctgcctcggcctcccaaagtggtaggattacaggcgtgagccactgcgcccggcctctgtatcagtttttaaaaccagtgaaatactgatagtcattttaaattgcagagtgcttctatggctaatgcagtccttgtttcccttatgataccctacatttgcttataatttgcttacacttgctttttttaaagaccttaatctgactgaaaatatgacctcatatttcctaaagaaagcatatggacaagcgatcagatgttttatatgaacttaataagcatttgcgccaagccttctttgaacatttttatttcatcgttgactgctatggatagtaattttttacccagacaagtacttttcatcctggcaaattttgcaggatgcttttttttcctctacactccattcttgaatcggtaaatttactggggcatccttgtaaatttgatatgacatgtagcctgaaggttgctatataatatagaatcctaccttaggaatgttaataaaaattaagaaagacaattctaacttttctctactccttttctgggatttgaccaaagaatgatgtggagtagattgctgagattctagcatttgaaatgaacttgcttagtagccaaagaaaggtttgagcttggaacttacttctgggtgttaactttgtgaattgactcttgtcatgtgtagagttcctcattgtctgtgacaagtttgtacctgtttctttttcttttactttaaaccatctgtcttggtccttgttcactcttctgaagggaaaaagtatctctttatgtctggcaaggcacatttgtgataggatcagccatatctgtgattcttgtgctgcataaccaagaatctctcccagtatagaaggccatctggctcaaccatttttcgtcttgtcaatgtgacctgctgattaaaggttaggagacgggatgtgtcagcgaggcagaagtgaaaaaccagcattgttgggtgtctgctttagtgcaaggtcctgtgttcagtagttctcttatatattttcttatccaatcctcatagcagcaacacagtgaagtaggtacttttattatcccatattttaaataggtaaacagaatctcaaagaaatcttaatttcataacctctcctcctaaacactgccttatattacagggaaagcagttaaattcacctagtcatcatttacagaggttggaggaggcagtcttattatagttccttcatttatataagaagggtattggactagtcatct

SEQ ID NO: 129549 - DNA, 1023 bp, Homo sapiens
tatactttttttaatttaataaaactttgttttcacaacagtgtctttaaatgttttgaaataatagaatgagaattttaagtagcttttagaattaatcatattcttttagtggagtgaagacctactttaatggctataccctctttttaagccatctaaattaaattctgttctctaacaagtaacatattttaaaaatcttttaaattgtagaagtaatttggttttttttttacagaaaagacgaataataaaaaggtatagaatatcttccttcaccatttccctcatgtcattcccaaaagataattactggtatcaattttgtttacattgtaccaaatattttcaaggcatgtataaattacatatttttaaataaaaaattggaagatattggtagacatgcagattactgacatgaaataatactgtagttaccattcctctgcttagattttcttgttttggatatttctatagaataaatttctacaatgtgattgctagatggaagagtgtacatatcttgaattttgatagctacttccaaattgcctccctaaagggttttagaaacttctttctttccttttttttttttttgagatggagtcttgctctgtcaccaggctggagtgcagtggcatgatctcggctcactgcaacccccacctcccaggttcaagcaatcctcctgccccagcctcctgagtagcttggactacaggcgcacaccaccacacccagctaatttttagtgtttttagtagagacggggtttcaccatgttggccaggatggtctcaatttcttgatctcgtgatccacctgcctcagcctcccaaagtgctaggattacaggcgtgagccgccatgcccagcccatctagattatgtttaatacttagctcttgtaagtagcaatggtatgcatatcttcatacttatccatattttttacatctctcagtgcttttcaaatatacattcttagaagtagatttgcaaggtcagagt

SEQ ID NO: 129550 - DNA, 1072 bp, Homo sapiens
ctgttcctttccccccatttacttcttggtgtcaatttggggaaaaattgtaaaacgagaatctcccttgatgctgtcacccggagatctttatattctgtgatcaaatgtgagtcacattcagaagatgtttttaggggggctttgcgtgtatgtacatattaaattgatttcaaagacaggatccaaatacaggatcactgaaacattaagtgatcattcagttagaaattagtatatgaatatatttgatagctttctctttatacttcacagaatctatgcttaagcttgtctttatgtactgcgtttaaaacaaaatgaccctctagttttttaacattatgtatcttaaaaaaaatttttttaaataatgtttttgctgcataaattgccaaacatgctaggttttcaagaaccagcatagctggttcattactgtagactgtctgcatgtactccattcctgttactatggaaacacattgagtgtggatttatcataaaccttgagaaatattccttgcaacagttcatataaagaaacatctggatcccttgtttatcctggggtgaaggaagaccaccgtcttcctctgtgttgtgaaaatcatattatattccaccatttttttctagctgtaaaaattctcatgtacatctatcaagtatactttgttttatagtatgattgattatgtttactagaacaactttggaaaatagattgattttcatgctgattcagttaactacaactatgacaattgtattttgagagcttctacattctgaatttcagacctacattaataaggttttaaatatatatatacatatgagtttctttttttaatatattttggtctttggttgggttaacactccctctggaagtttatttgacttcattccagtctcttggaactttaaaccttcatgaaagttaagtctagaactaaagagaatctcagtgacatctaagtgagctaagttgttagtctcattttaccaaggatattacctgaggagactgtaactgcttttatattctgttactacctccatgcaa

SEQ ID NO: 129551 - DNA, 1801 bp, Homo sapiens
ccatttaaagtatacaatgcagtggcttttagtatgttgacggggttatataaccatcaccacaatcaattttagaacatttccagaaaggtttgaaccagtttaaacccagcaatattataaagttttgttttaaaaacagcatttattcataacatttaaagtagtacagtatacaggaacacaacagcttgtgtgatatatactttatatgcatttgagagagattttagaaagtccttcatgagaagatgatgctcctacgtcccattttaagaaaacctgacatattaagcttaagctgattaaacaaaatatgaggtatatttttttgaattataaaattattctcctgagcctgggcgacagagcgagactctgtctcaaaaaaaaaaaaaaaaaattctcctggacagtcagaatgtctttattgagagagtattgtgtatggtttaaaatttttttaaaaaattcaaatttgatttagaaacactttattttagaaaacatctgtggaaagtatgttttacctatacagttaactgtagcaaacttatcaccttatagaaaatatggttttcttttaagagaggtttgctttgttctaattgaccttccccccgaaagttgttcttttgttatgttcgcttaagccgtttaacaaaacattttttaaaaactgggtgggctggctgggcgtggtggctcacacctgtaatcccagcactttgggaggccgaggtgggtggatcacttgaggtcaggagtttgagaccagcctggtcaacatggtgaaaccccatgtctactaaaaatacaaaaattagccagtgttgtggtgcacgcgtgtagtcccagctactcaggaggctgaggcaggagagtcgcttgaacccagaaggcagaggttgcagtgagctgagatcgtgccactgcactccagcctgggcaacagagcgagactctgtctcaaaaacaaaaacaaaaacaaaaacaaaaaacaaaactgggagggcagtgaagtatagggcaagagtcaaggagatctgagttcctatccccacttcactttaccactgaagatcagtgttcttatctctaaaagtgcaaatgaaaattattcttggagttacagggattcaaattagaagtactagagtgtgcgtagaactgtaccagacacatagttgataatgaataacttttttaatagaagaaaaatagtgtacacaaaatgaactagtctttagtcacatgtttaatggaagaagaactgaactcaattggctaaactcactttcatagaagttaaaagttgaacatcaactaatacctgaagagaatctttgcctaggttatatgagtttttcttaattgttgagagaattcatgctggttcaagtttgaacatgaagttaactttccagtccaattttacttccactgttttattacaactcatgatggctaaagcttcactaaagcttggtgttctgattaaacaaacaggtgatgtgaaatttggatatatagtatgaaattctgaattttctaacttttattacttattttgaaaactacatgttgaatactaaaatactacatgttgaacctaaaatactaaagcgataaacaaaaaaaacaaaacccaaactggtctttatagaaaagataaacttagtaaattattatttagatataataaattgcttagtgccttaaaaactacatatcatctttggcatacattctcttttgccttttttgggggaatggaggatacaagctaaaagaaagtaaa

SEQ ID NO: 129552 - DNA, 1035 bp, Homo sapiens
agcgccgaggaccgtgctacccaggccgggctgccagccgcaggctcctctctggcagcagcggcggcgcggcgacccccgtccctcggcctccccttcccatcccacctcccgagccttcctcttcccgcagcacgcccggcccggcccggccgtggccctcctcagtgccggccgccatggcagaggcgtccggcgcggggaaaatctagcccggggatttcatgcggcctagctcggttccgcctcctcctcgcgcggccccagcggctgcccgcaccccagccccactccgggcctccgtgtctctcctgtgatcgcactgacacggccggggggttagaatggaacaaactgaaggtaaagtgcgtgtgcgtgtgtgtatgtgtgtgtgtgtgtgtgtgtgtgtgtgcgcgcgcgcgcgtgtgtagtgctaggaagggctgaggagggaacgacggggagggggcgacctagggatggagcgccagaccccaggaggaatggaaggggaagcgggtggcctgaaagggctcgaggggagtcctgacggaggagcagatggcaaggtggggggtgtggagggaattggggggtgggccaggggaggtggggagtgggatgggagtcggagtggcgctgagctgggaattgggaaagtgggatgggggcggggataaggatggatcggggaggggcagggaaaggggagaagagttgcatggagattacagacctgggtggactgataaatagggagatttggggatggagtgtaggaaccagaagagtctgggagaaggggataaatttgctggagaaatggggcattttatgggaatgaagggagaaatgaggaatggaagtgaaggaaaaggtggattaggaaaggggatgaggcaggctgcaataggagaatgggaaatagacgcaggaaactggaagacaggattgggctagggaaggaaattaactgaatgatgacagggatgagaacgatcgacttagcgtcagagtgggaggaagagaagggga

SEQ ID NO: 129553 - DNA, 1024 bp, Homo sapiens
tatgcttcctagcaaaatggtggctaatgaaagccatatgtgctagaagagtggctgcctcgcagattgcggctgcctcacagattgctgcagcctctgcaggcccaagatggaggtgtcggaagcagccaaatctttctgattgccagtctgtttctccaggaagcttcattatatccagaaagatcttactggggagtatatccatcccatctcataaggtactttgtttccagggtgctgatcctactggtggatcattcagaaagttaatcaggtgctcctaaaatggtttttggaacttccaagttcttactcagaattccaagccataggagacaggtatctaaggtgccaagctgattccattgtgcaaaaaatttcctctctgaagggacgtacacatgaaactaaaaaaacaacatgatggggggtgggctttatacaaagttgagtggggtgacaatggtacagaggaaatgggactttgcaattatatttttctaagtggtctgaacttggtctcactacccacatcacctggaatggttaccaggcctcaaaggactgccccacgggctaaacagctgatccgctctctgaagccagacagtcttatctgggaggtcctttacagatgccactgttgagggccggaagctgaagagagtgagctccatcctcaagtagtcctttatgctccttttgaactagccttgctgttctgggccgtcatttgtgatttggcctggagtgtctaggcgtaaaaaacaaggactgtaggcattagtcacagacgtgtaagttcttaaggagtgaatgctatttttgttttcttaatcaaaatagtgaccacaaagtcaaatctgagattataatttaccttggtaataaaagataaaggagatttacaaaaaacaaggtatgtgtgtgccttgggatgcttttctgggcttaccccatctgtgtcttcatagattctctgtcctgccagccatgtctttggtccacaggagccacttcc

SEQ ID NO: 129554 - DNA, 1665 bp, Homo sapiens
aagcccgaggagatgtcggaggccctgagccaggccttggggcaagagtgggcttgaggggcagggggctagactagagagtatccatctccaggagacgtccctgaccttacagtcctgccgcaggtacatgatgatgcgggactgctggcatgcagtgccctcacagagacccaccttcaagcagctggtggaagacctggaccgcatcgtggccttgacctccaaccaggtaaggctgcccgtgccagagccagagctcaggccgtccccactgcgtgcacgcacctccctgagcagggaggaggggcccggcccatcgctgcttcctctcgcccatcacaggagtacctggacctgtccatgcccctggaccagtactcccccagctttcccgacacccggagctctacgtgctcctcaggggaggattccgtcttctctcatgagccgctgcccgaggagccctgcctgccccgacacccagcccagcttgccaatggcggactcaaacgccgctgactgccacccacacgccctccccagactccaccgtcagctgtaaccctcacccacagcccctgctgggcccaccacctgtccgtccctgtcccctttcctgctggcaggagccggctgcctaccaggggccttcctgtgtggcctgccttcaccccactcagctcacctctccctccacctcctctccacctgctggtgagaggtgcaaagaggcagatctttgctgccagccacttcatcccctcccagatgttggaccaacacccctccctgccaccaggcactgcctggagggcagggagtgggagccaatgaacaggcatgcaagtgagagcttcctgagctttctcctgtcggtttggtctgttttgccttcacccataagcccctcgcactctggtggcaggtgccttgtcctcagggctacagcagtagggaggtcagtgcttcgtgcctcgattgaaggtgacctctgccccagataggtggtgccagtggcttattaattccgatactagtttgctttgctgaccaaatgcctggtaccagaggatggtgaggcgaaggccaggttgggggcagtgttgtggccctggggcccagccccaaactgggggctctgtatatagctatgaagaaaacacaaagtgtataaatctgagtatatatttacatgtctttttaaaagggtcgttaccagagatttacccatcgggtaagatgctcctggtggctgggaggcatcagttgctatatattaaaaacaaaaaagaaaaaaaaggaaaatgtttttaaaaaggtcatatattttttgctacttttgctgttttatttttttaaattatgttctaaacctattttcagtttaggtccctcaataaaaattgctgctgcttcatttatctatgggctgtatgaaaagggtgggaatgtccactggaaagaagggacacccacgggccctggggctaggtctgtcccgagggcaccgcatgctcccggcgcaggttccttgtaacctcttcttcctaggtcctgcacccagacctcacgacgcacctcctgcctctccgctgcttttggaaagtcagaaaaagaagatgtctgcttcgagggcaggaaccccatccatgcagtagaggc

SEQ ID NO: 129555 - DNA, 1981 bp, Homo sapiens
catacccttgtcccctgtgtgcccacccttccccacgggaggaaatggtacagatggcacaggtgtgtgcaagaatgaccgttccctcagaagcctgtgctcattctggaaggtgctttgggagttaggaatccataagctaaggcaaagtatttgcaaagagtcaggagaacagagttgttactgcaatgatcagttataaaatgtcaagctggaagaggtgcatttggtctgcttattttaaaggtgagtgaagtccagaaaggccagcttgtggcagaaataggtcagtcctagaagttgggcctcctggcctaccatggtctttggaccactctgtgttgaggaaagaacatcagatacacagacatgtgcctctgccattgttgggaagccctgactaagaatgggaaggagtcaccccgtcccccctccttgctctagggtgaccccactcttccttgcaggtgtctgctgactccagtgcatccatgaactctggggttcttctggttcggccatcacggctctcctccagtgggactcccatgctagcaggggtctctgagtatgagcttcccgaagaccctcgctgggagctgcctcgggacaggtaataatactttgactcccaactttttgaaggcattccttgcttgctattctagtggtggaaggtgtgtatactaacaccttctgggcggtgaaggttcatgaaatgcctgcagaaacattcattccactttctgctcgcagttgggtgaaatacagagaggtggagatggggtgcctctcaaggtttgaacttcaccagccccaacttatgccactctctgtttcccccgaaagactggtcttaggcaaacccctgggagagggctgctttgggcaggtggtgttggcagaggctatcgggctggacaaggacaaacccaaccgtgtgaccaaagtggctgtgaagatgttgaagtgtaagtgatgcttctgtccttgcaaagaaaatcttgtcccattccaagcaaacagcaggcctcgggcccagcagaacagcttctctggtgcctttgctgcccacacctgctccgctgcctgcttggggttacctgggagtggagggggtgttctgcaccttgagattgttctatgacgtcactctgttccttggcgtcaacctgggctgtggtcaggtgtttatcctggatccatcgcttgcaggctttcctcaccacatccctgcccactcactaccacctattgcaacaacggctcccatgagagggaagagaaaacaagtttggatgaagtggggaggagagaatcaagtcccagggaaaagcagcccctcgacacataccccactcccttagcctttatcctgccctcctcccttcccaagtaaatgagtctcaacgtgttctttaaagcggacgcaacagagaaagacttgtcagacctgatctcagaaatggagatgatgaagatgatcgggaagcataagaatatcatcaacctgctgggggcctgcacgcaggatggtgggtgccggccagactggctttccctgcccagcggggagaagatctgagctggggtatcagtcccaaggcctctctcagccacagctagggaagggggttaagagaggctgctttggcagaggtttaaaatgtgttatctcgggatctgggctccgctcattggtgttcattcaggaatacagatacctagattcacacacgtggtgtgttaacagaggcagctgagtaattatggtctaagagcgctcaggctgggtgcagtggctcatgcctgtaatcccagcaatttgggaggccgaggcaggaagatcacttgagatcaggagttcgagaccagtctggtcaaaatggtgaaaccccatctctactaaaaaatacaaaagttagccaggcatggtcacgcatgcctataatcccagctactcaggaggctgacgcataag

SEQ ID NO: 129556 - DNA, 1836 bp, Homo sapiens
gcctccatggttggctggtgggttttaaaggggaaggttgggaggaggcctgtggaaggaggagggccgtccacacccgtggggcaaagcgtgttccatgaaaccagtgctgtgcgtgctgggatgaaagcctcccagcctctcgtgctgaagggaaaggtggaccgaactggcttagctgctgtggcaatggggtggggggtgagtcctaatcagaaggtgggagaagagaataacaaaatggaactccgccccctgccgccacatttccttaagttttaggagttggggcctatgagtagaatttgaaagaactaccaaaaaagcttatttttggaaattaagtcagctttgcctgtggtttggctaggaataaatatttacctgtgtgcccctacagagatgacacagacccaaagtgggacattgagcaaggcacaggctggttcccctcctgtcctctgtcctcattctgtgagtgccaccatcaccaggtactgtggcctgcagaaataaacgaggcaccaaccctgccctcagggaccccgtgtcttcttagggacagaggactcagaaacatctgtgtccccgcatgttaagtgcatgcacacagtgctgaggctttgcagagaagggccatggctccctgaggagaccaagaaaggcacatagaagtgacttctcagctggcccttgcaggatccctgggtgcctgtacctctccagtccagctgagcaaggaggctcaggaattaatgaagatggggcttgtgtagcacgatggttctaggccatcccttttccatggctcaagtccattgaaggcagcctccaaaatcagggggttgcctgatcctcctagtgccacaatcccagtcctagctagaacttgccatggttcttctccctaaaagttcccaggggacaggagacaggtgttgcttttctaatggagcgggacctcgcatggacggggccctccaagcctgctaacaccctgttcgcactgactcagccctggaagagaggccggcagtgatgacctcgcccctgtacctggagatcatcatctattgcacaggggccttcctcatctcctgcatggtggggtcggtcatcgtctacaagatgaagagtggtaccaagaagagtgacttccacagccagatggctgtgcacaagctggccaagagcatccctctgcgcagacaggtaacagaaagtagatgggggatttgcacactcagcaccacctctctctctgggcctctaatgccctgccctctccattgtccctaatttatagctttgggccttattttctggcttctgggcaaggcacagtggaatatcatgaactaagtgctctagagtctgtttcaagctagtgtagcccgtgaatttcctgcaccctccatatcacactgcaagtcctccggactcctgggacatggattgggaggaagtcctatttggacagaatgtgcagccaatagcatgaatttgaactgtccccaagggctgcttagaagtgcagagatgcagggtagagaagagaactgtttgtattagtccattttcacactgctgagaaagacatacccaagaccgggcaatttacaaaagaaagaggtttaatggactcacagttccacgtggctggggaggcctcacaattgcagaaggcaaaaggcacgtctcacatggcggcagacgagaagagagcttgtacagggaaactcccctttataaaatcatcagatctcgtgagatttattcactatcacaagaacagcacagggaagacctgcccccatgagtcaatgacctcctacc

SEQ ID NO: 129557 - DNA, 1551 bp, Homo sapiens
tggtattgtgttggtgtctgtgggttccctctctgccttctgtgtgttccttggctttgtgtggatccatgtgaggactcacggggacacggttttgctgtgttacaaatggtacttcagactgaagttgtgagtgagtggtgattaagagaaggggccataggccaggcacagtggctcacgcctgtcatcccagcactttgggaggctgaggtgggaggatcgcttgaagccaggagtttgagaccagcctgggcaacatagcaagaccccatctctacaaattaaataaattagccaagtatggtggcgtgtgcctgtagtcccagctagtctgaaggctgaggcaggaggattgcctgagcttaggtcgaggctgcagtgagctatgtttatgccactgcaccccagcctgggttgacagaatggtaccccatctcttaaaaaagagagagaaggggttaggcattcccttgcatactcgcatctgctggctgtgtatgcacatgtgcgtgtgtgtatgcgtgtgcatgtgtgtgtctgcagcccccgccatccctcctgtgttcaccttctggctatctttacctgaaaccaaacagcccctgcccgccggccccatttctccatgccgctcaccgcccgcatgctcggatgggccagtggctgccagcatctggtgaagggtcgtaaccagccatcgtcttctcaggtctgccggagttcttccctcagggtctcaccctcttcctctaacaggttttgctgcctggtggttttcgtttgttccttgttgcaaagaagatgtcagggagcatttcttcctctagtcccccttctttctgtctccttcccttgctctgcgtctcttagaggtctcatgtcctgtgcttgtccattttgcttccgttgtctcttctagactgctggagttaataccaccgacaaagagatggaggtgcttcacttaagaaatgtctcctttgaggacgcaggggagtatacgtgcttggcgggtaactctatcggactctcccatcactctgcatggttgaccgttctggaaggtacacactgtaacttctcctctcgatgtcctgccctcgccacgggcacggggggagcatgcatttccaggcttggggagacacagaggcaggagagctggaagaatgggctcctgcctgcctggtgccacatcctgccccagctttgagggctgaatcctctcagctcagagaagagcttccctagttttgcaggcgcacggaggcctcccacccgtacacctgcctctgctctccccctggccattgcaatgcatgcccgggatctgggtttaccctgcagcccgactcctccagggcaggctccttccgtccttgggtccagcagcctcccccctccgctgggtactgagcatctgaaaagtctcagatagggccctacacctcttctcccttctcaagtgctcagcccaggggtggggcttgctgcttgcaaagagcagcccaccctcctgtactgccatcctattgcctttgaagaagg

SEQ ID NO: 129558 - DNA, 1056 bp, Homo sapiens
gggaacttgccactcttagaatgtgactttcacaaaactaggagttgaggaagtggagctgaaattttctttatgccatttatgcacctcagggtgtggacttggcagcagatccccaaaggtgataggaaggactggagaaagatctggcatgaaccctgatgggtgaccacatgtgtatcaagcgtgttcttacaagaaataaatacttattggggagaggtgttggcagctgctggggtggtgggtgccctatctgctctgattaaggagggcagcccccaaaccttagtagacacatgctagaaaaattctgactgtggggtgtttagcccatcctttggaaatagcatctagccacagtgtgtctagacctgcctgggtttccctatagtcagccgtccaaagaagaatacaggttgcctggctccagcacacccaggtggcaccacaagttgagaaagcgcctttgaatgtaggacggaattaagttaaataggaacagctgaccctgatggaaccacccagtgtgaaggcttccaggcagtgggggcagtgcttcggggaaggaagcaaacacgcacaggaactgttcttaaacagtttccatcccaccaagagatcatcactaagggagcagtgggactgggatccccatggggagggtgtccgtgttcatctggaactgcactagccttggtgaaatctaggggtccctaggaggaacctcagtgccccttcttcttcccatagatgctctcccctcctcggaggatgatgatgatgatgatgactcctcttcagaggagaaagaaacagataacaccaaaccaaaccgtatgcgtgagacactgtttcctatcttactgccctttgggtctgggcattgggtttaagaggggaggggaaggctgaaaggggaggaagaggagggcacatggggtcacggtgcctgttctgctaagtgccaggcactgctcacaggtgttgggcagatgggcaagacacctccaggtcctggcctgggccctgctcctgagcctgaccagctgctcc

SEQ ID NO: 129559 - DNA, 1090 bp, Homo sapiens
aacatggtgaaaccccatctctactaaaatgcaaaaataagccagccattgtggcatatgcctgtagtcccagctgctccagaggctgaagtgggaaaatggcttgaacctgggaggcagaagttgcagcaagccaagattgtgccactgcactccagactgggcaacaaagcaactctgtcttaaaaaaaaaaaagggtctttgtcatcccgtccagtggcatgatcatagctcaccgtagcctccaactcctgggctcaagcaatcctgtctcagcccactgagtagctgggactacaggcatgtgccaccaagtctggctagtttttaaatttttttgtagagacgaggtctcactatgttgcctaggctggtcttgaactcctgggctcaaatgagcctcctgcctcagcctccccaagtgctgggattgcaggcataagccactgcacccagcccctggacgttttggatggtggactttgagtagtttggggtaggaggactctggagtggcgctgacagtcctcaggaaggagtaagctttgccatgccagggaggatgcagccgtgctgaaagcatcccaactggggaggggggggggcgcggtggggagggacagcccctggtagagagaatggggctgggtggagagagtggaagccaattgcagggagtcttgaaggtgaggcagggatgtggattttactctgtacacagggtagattttgatcaggaaaataatgtcaagcacatgacagcttggaagcaggagtctgagctgcagccccagggaggccatttaaaagattatcccggctgggcgccatggctcatgccagcactttgggaggccgaggcaggcagatcacgaggtcaggagctttagaccagcctgaccaacattccccttctctactaaaaatacaaaaattagctgggcatggtggcgcatgcctgtaatcccagcaactcaggaggctgaggcaggagaatcacttgaacccgggaggcagaggttgcagtgagccgagatcgcagcacttcactccagcctgggcgaaagagcaaaactccatctcaaaaaa

SEQ ID NO: 129560 - DNA, 1037 bp, Homo sapiens
cccagtgaggtagtgaactccccattgtgagaggtagggaggaggtgggggacactggtgctgattggagaaaggtggcaaaatccctaggggaaaaaagtacagatttgaaggaggcatcagatgaatccgtgcatagaagcttgagccccaaactcagttctcaggctgcgttatcctttacgacacccagagtccctctgtcttttaagatccacacacaactctccaggccaatagctcttggcgcctgcgattcccaagtgggattctacacgtgtcttgctgcccagctcggggggatctgtttttggggggtctcggggcgggtgcagggtcctggctgtggctttggctagtgcaggcggctcggcactaaattacagtgacgaggtgggacgcacaaaaggccgaaatctttttttaataaaaacaaaacaaaactctgggccccaagcccctgggctgctgaatggccatggcttcctgtcaggattagccgggctgcctgggcctgtgtgctcggcctttctcctcaggaaatacctttagtaagccccggtggggtccccatggcaacgcacggggggacctgctggcagaggccattcagtctgccattgtcccccggcccctttgttgtgagctttattgccggccctctggcaaacacagcagtttgcaccgttttgtcaggctgaatgtggagtttttacattttaatgggctcttctggcagtggcccatttgcatgcaaaatgtcccctcttactcttttcactttcttcaatttaaaaaaaaaaaaaaagcccttctccaaatcccctgggtcggggggctggtggacgccattggccctgggtgtcaggccctgctaattgatttggtgctcccggctctctttccacacatacctgtgccccccatttttgcagctctccttctatttggggactccgagagttgagagaaacacatttttggggctctctccacccaaacccttgtaggatggcagctgtgacccgggatttcgg

SEQ ID NO: 129561 - DNA, 1381 bp, Homo sapiens
ttagtctcatcgtgtgaaaccttaagagaatttctttacggtggagaaaaagtaactttatgaagcccattcctttctctactctggagaggctggtgacccagccccaccattgcaggaatgagacgggattgcggggatatggcaggcacttggggtgctgagagtccaggtgaactgtgagctcaagcacccatgtcgggcttgggggaccagaagacacatcctgaaacagctgaagcctctactaattcatcagcaagtttagggagcggcaacttttccctgcccagctgctggcgtttccttccccatacaatttctgctgagtttgggggaggggaggttgttcgagaggccccagctgggagaggtggggggagggcgatacattcttttccttaaggaacctgaccgaactttaaggtcagagctcagtggagagtgggagctgcagggttacctctttgccgttgattcatctctccaccctcccccactcttaatgatctttccattacagaacccagaccaggaagtgcatgacaggtcgcagctgcagacacatggctgggaggcctgggctccgggccagtggtgggagagtctgagctcccctccagcagtgggacccctgcacacacacacacacacacacacacacacacaccactttaacaacttggtggaagatgttctttcttatgcactgtcacaggtgatgacgagttggactttgctttgagtttaggatgtgatttatattataataaaggcaggagaagacactccccctgccccggtccaacctgagtgtttagatccccccaacttacagtccacctaagtggtccttaccagatcctgggagctttctattatcgtgcagatgccccaacttcttttcccaaaataggacccacccaatatggccttagaagcttcccagggtatccggggcagttgctagtcacagtcttaatgtctccgaaatagtatgttttcctctctatgtttctattaaaatgtcagccccaaaacatgtttctgggtggaggtctaggtgcaacagcacagcctttgcaaacacagatagacttgggttcaagtcataatagatgagttgagcctctcatttttcagtcttcattggggatggctctttccatttgcaagttgttcaggaaatgttaattgaccctaaactgtgtcctagggggcagttgtcacacaggagtttctgtcttcaccaccagctgtgtccttggcttccttccctgaatctgccaaggctggattctggtgctaaatgtgaaatggtgacacaaacttctaggaactgtgagcttggacggccctcctccatagccgcagggcatct

SEQ ID NO: 129562 - DNA, 1004 bp, Homo sapiens
caacagttcttgcctttccacttgccaaacaggtatctactgccttcatgtaaagcatttgtgccctgcaaactaggggctgtggggtgagggctccgtgtagctggtttcaggcactgagaaagatccaccctggcagagcttgaaactccacgccctctcctcgttcacatgctgtggcgtggctgagcctcccgggatgggttgtgtaaaaggtggggtgggggctgtgccatttgtgttcccaggccctggacatggagacacagggagcctgaagtgggtgagagggtcaaggagttccgcaaagagtagacttagtggttacgaggttgggcagagaaagaggtcagaaacagcaacacggaggtttctaggagttaaccaacagtgaacattgaattcagagcttagcccttcctcacttttctctaggatcaaaaactagcttctggctaatggtccattcattgactgattttttttcactcattcatttattcattcatctagtcaagcaagtctcttcctttttccgtaaatacaatgtatactttatacattgttttatcctagtcccttagctggaaatatctgttcctgtccttttcttccttttcactttttataattcctgctcaaatcttagtttaaggtttagcttgggtttagattaaagcttaacttaagggccacctcccttttgaagccttcccctatctccaaattaattaccccattttttctctttttcttttttctgtgttttttttttctcctgagacctagtctcgctctgttgcccaggctagagtgcagtggagtgatcatggctcactgcagcctcgacctcctgggatcaagcgatcctctggcctcagcctcctaaagtgttaggattacaggcatgagccaccatgcccttttgagatgtagtctcgcttagtcatccaggctggagtgcagtggcgcgatctcggctcactgcaacctctgcctcccag

SEQ ID NO: 129563 - DNA, 1044 bp, Homo sapiens
gctgtgtacacctgcaaggctgcaggttacatctatctgtcaagcagtgaaggaaggaagttgtttctaagggattggaaaaattcattaattagtagaatgagaaactgaggtgaagcaggaggtggcagggtcccagacagcatgttggactagtggcctgtgtcactgtgttttttgcaggcgggtggcatggggtgtatgctgacttcttattccaggagttggtgccaggaggccaggttttcttaacatccttgttttacagatgtcaaacttgagggccagaggggtaggagaggaagagactttttgtaccttttttgggaaagaacaagagggaagctggcagatgaatttgaagtgcattgaccagggagctgagagagggcggtctgcagccagcccacacctgggaggaggcggcaggcttttctggggacagagtggccaagtcgaagcaagcttaaccatctcaacatgacaccactctttcccattggaacctgagaacttgttcagtattctgacacttagcaagggacctgggttttcttggtcaggtgtgcgtttctgggtgacaggcctgcatcaggtgtattttcgggatgtagtaagttgtggaatatgggtttaggggcatcctctggcaagcactgcttctatcccagctctgggaatgtgccccatgcagtgtcctagatggcccatctgtggtctgcttccaagggtctttcttttagttagttagttttgagacagagtctcactccgtcacccaggctggagtgcagtgatgcaatctcggctcactgcaacctccacctcccaaattcaagcaattctcatgcgttagcctcctgagtagctgggattacaggcgtgcaccaccacacccagctaatttttgtatttttagtagacgaggaatttcaccatgttggccagtctggtctcaactccccacctcaggtgatactcccgcctcagcctcccaaagtcccgggattgtaggtatgagccaacatgccctggcacaagggt

SEQ ID NO: 129564 - DNA, 1962 bp, Homo sapiens
ctccaaagcccacgctaccaggtacaacctcaaggctgcggcgtctcttcacctgccccctagcccccaaaccgctgctatgtctagggcctgacattccggcgccctctgggacgtgctcagatgcaggggcgcaaacgccaaaggagaccaggctgtaggaagagaagggcagagcgccggacagctcggcccgctccccgtcctttggggccgcggctggggaactacaaggcccagcaggcagctgcagggggcggaggcggaggagggaccagcgcgggtgggagtgagagagcgagccctcgcgccccgccggcgcatagcgctcggagcgctcttgcggccacaggcgcggcgtcctcggcggcgggcggcagctagcgggagccgggacgccggtgcagccgcagcgcgcggaggaacccgggtgtgccgggagctgggcggccacgtccggacgggaccgagacccctcgtagcgcattgcggcgacctcgccttccccggccgcgagcgcgccgctgcttgaaaagccgcggaacccaaggacttttctccggtccgagctcggggcgccccgcagggcgcacggtacccgtgctgcagtcgggcacgccgcggcgccggggcctccgcagggcgatggagcccggtctgcaaggaaagtgaggcgccgccgctgcgttctggaggaggggggcacaaggtctggagaccccgggtggcggacgggagccctccccccgccccgcctccggggcaccagctccggctccattgttcccgcccgggctggaggcgccgagcaccgagcgccgccgggagtcgagcgccggccgcggagctcttgcgaccccgccaggacccgaacagagcccgggggcggcgggccggagccggggacgcgggcacacgcccgctcgcacaagccacggcggactctcccgaggcggaacctccacgccgagcgaggtaagagccgcggcgcccccggatctggggcgggcttggcgtcccgagcggcccccggcgccggagcctcccggctgcgcgctttgcccgccgcagcccagccggggccggcgcctccctccgctcgccgcccgcccctttcacctcctggctccctcccgggcgatccgcgccccttgggtctcccctcccttccctccgtccgcgtctcctgcgccccctccctgcgctcgtcccgccgctcttcccgccgcccaacttttcctccaactcgcgctcgggagctggcgaggcggcggcggctcctcagtgagtcccgggagggacaggcccggggcgaaggcggcgaggcccgcggtttcctggactggggaggagggcgggagtgggcggcgaggtgggatgcgttgtgtgtgttatgtgtgtgtgttgcattccactccatgtctttttggtccccttttggggattcacccccaattcagcaggtagctttgggctcaacgctaaaaatccggggcattcctaagtccttttccacccccgggaaagcctggggtgcgggttggggtcggatggggtgggagatgaactgcggaggacgtggagggctaggttagcttctcttggaataggttttaaggaggtgtcgtcaccaaatggctgaatctgcttgagctgagagcgaaaaacgactcccctttccagaaggggtgatcttatgacttggacggtctctgaaagggtcggaagtttggggaacgggaggacaacccacggtcgttaagccgaggtgtgggatgggggcggaaggaccgttcggtcccaatctggttcctagaggtgggggaagggatgagggtttttgtccggtgtggttcactcggcagcgatgcgtatgcttctctggcccagacccctctgcacctcgcttcccctaccgttatgtttggggttgggagaaaagtgaggctacgacccatgttt

SEQ ID NO: 129565 - DNA, 1036 bp, Homo sapiens
ttatttctgggaagaagccaggatgaattcgaaagcatcctgacaccccacccctttcttttctctagacttcaggttaactcctgcccttcggttttggtaaaactaccctgccaagccttatcttgtattttgctcctgtttttgttatcaaatgtgtaaaacagtcacgatgaatatacatgccaactgctttcagaggcaacggttagtctcttgcaagtttcaacgtgcacattttggagctgctgtctctgtgggaacctgcaggcacctcatggatgcaccacaactcggaaattacagtaccacctggaacaccttatccaggcaaggagatcattaagcctggtgtttgaggcaatcgattcacttggaagaaggtgctttggtggttttgagaggaacaatccctacatgaaatccctccatgggaaatggagaacatcagctatttcccattgccttcaaacctaaagatgtcgccaggcctcttggcttgttactgaagcagcgaaataagtcagaaatcaaagacttagaagttacgaaaagaaaatctcaaaaaggagaatggggtcaggcgcggtgtcaggcctggaatcctagcattttgggaggcagaggcgggaggatcgcttgtggccaagagttcaagaccagcctgggcaacatatcgagacgcctgtctgtattttaaataaataaatatggagaatgggaaacccatcaggctgtaatctcacagggaatttagtaccctttacctaagacaagacctgggcacttgggaagcctccccgagtgcggtttggggagggggagggcatcttaaattccagtcctcggtcactcttgtggctttgccaagggattttcaaatcccgggaatgccagggatggagatgaacaggctgaaatcccccacgctgccagggttagggaggggaaaacaacagtccacagcggccgcgaaggtttgtatttttttttttttggtaacaaggggcttgtgtgcagtccaatatcaccatcg

SEQ ID NO: 129566 - DNA, 1045 bp, Homo sapiens
tgaagaaggtcgcgtgatgacaggcccctggcagctgctgggaaatggtggtctctgccgggctgtcatccgcgtgattgcggaaggcaggtgacaccattcttagcctcgggcccagggagttccagcaggtagaggcctaccgagcaaagaggaatgcctagcatcggcctaactcgggggtgggaccagtattaattgttaaagcctctgggaaagggctcttgtgacaaaaggagtctgttggaaaagcgcatttttcaggtgtctgagggaaggatgacctcgaaaataaatggtgctggagaaaagctccagggaatggaggagctttcagagagacaggatgccagcctgagaaacccaaggagggcactgctcagagaccgcagttgcctcccgcaggtcagaccctgctgaggaccggttggttgtgaagttagacaaaagtgctggacttttagcctctgtgaatatgtagatttcaaagggtgtcggaaataccgttgaaagtggtaattcctcatttttcctccttggcagctcggattctgaaggtaattttgagactcctgaagctgaaaccccgatccgatcacctttcaaggagtcctgtgatccatcactcggattggcaggacctggggccaaaagccaaggtaaagaaaaacttgcatttttcctgcctgttttgtttcaaaagttttgaaaaatatcaatgaaggaaggaaaaaagtgtaaatttaggaccatttaagagagtttgactaagaaagagctgtttgaaacctcctggcttatgtatttttaggggtgtggtgatcgaggctttctcctctgagtagagtttgtgcatttgcagtataagattatcattatcaaacattcctactaggcctttctcctcagcccctaaaaaaatatgtatagtaatgaagtaggaagatcatgtttatatttgacttcacaaattcctcaggctaagttgctttctactggggtgtggctggagacaaaaattacaggtaagacttgacttaatttt

SEQ ID NO: 129567 - DNA, 1067 bp, Homo sapiens
tccatgctgtgcttacccagctgagaattcagcaataccctcaacttgccctaggctgcattttgccattgttctaggcagggacaacatgggaataggcaagcttatatactggagaatttgtgtgcgacgcatagctgtgtagcactctcagtgatgaagataacacttattcctcatagcttcccttttcttccgtaaagattggcagatcagaagggagattttgaagcttgaaagaactatttggtggcctttccatcaaatttaaataaagctcataagacacatgttaaggagctgtttgaaagcctttttgaattgccatcagcttgggcggcccttcctcatcgttttgtcagctgctagactgattcatcccgccagattctttgccaattgaatagaggcctggatgacctaggcccccaaaaccacagagacccaattgtttggtccttcctgtaccagtgactctcacatttttttcattctctctaaaaggaaaacttttaaatgtttatggatcatgaaggctctatggggtagttcatgaatgcagactgtaattgtaggggtagaggagtgtccagtccaggaaacaaccctgcatattatgaaggctttcagtttagggtctttaaacaataggatgattgctcatcaacctggtcgtaccctgacttccagggtccttgggtgcaacatccggagctagtccagagtaccgccaatggccttgtcacacatacacagcaaatgtgcaaagacagccagagcacaggtctgcctggagaggatttcagtgggcagaaagcccttcagagtcatttcatattgaagtttaatttctgggactggataagttccctttctcccaaaattattgattgttttgttcctggtaaagatagtctttcatacttttgtggttccaagacatggttggaccgcagttataaattatataagactaaatcattctggaagaatgatttacgaggagttagtcaggagttggagttgaaatatgtaaacattctggcttcctggtacataatggccct

SEQ ID NO: 129568 - DNA, 1014 bp, Homo sapiens
ggccagagcctttactgctagtagtggacctgggttttgaattcagcttttaagattgcagatccagagctctttggaacatattatacagcttttctctccaggaaatttgtgaatccctctctgttgttcactatctgaagagaagacatatcagaggaaataaagggtcttaaaatgttgccagagcagggtgtgtgatgggggaaagcatcgtcttaagtatcctgtcatgtgatagtagtttaaaaaatcaaaaaatacatcttccacatgtgtgaacttggcacatattattctgaagtatgaaatgtattttaggaagttgaaacatcagaagtttggaagcttgcagcatgatttagatataaattaatagtcaagcaaaaatcatcactggataagtgcagtgggattgaaaacattttgcttcctcaatgcctagcttcagctcatcagtgaaaaataaagaaggagtagacaaattcagtactagcctttgcattctgtctccacctgagtcatgcatggttgagaagaggcaggtgtgtggaggtgtgtgcggctgccaggggctctgcgcctgttttatggtagatagaggagtttttaagaggcctttgttggtgatctctggctgcataacaaattactccaaaactgaaaacaacgaacatctcacatagtctttgtagttgggaaatttgggagctgggtggtgtggctcaggtcacttttgagaatgctgtcaagatgtcggctgggactgcagttgtttaaagacttgactgaggctcaagaatcctctcctaaggcggcttactcatttgcctgggctgtgagtgctggctgttggtgggaggctgcagtcctcaccatgtggaccactgctgggttgcttgagtatcctcacagcatggcagctggctgccccagagtgagtgatccaagagcaagcaagatagaaactgcagagtcttctgtgacttagcctcaaaagtcacacttatttcc

SEQ ID NO: 129569 - DNA, 1070 bp, Homo sapiens
aataccagaggtttccttttcagattgttgtcttttttctgaatccttagcttaatcagctaagctcttttcccttgaccctagagacttttttatgtttaaaaaaaatagaccagtcacggtggctcacacctgtaatcccagcactttgggaggccgaggcaggtggatcacttgaggtccagagtttgagaccagtctgaccaacatggtgaaacctgtctctactaaaaatgcaaaaattagctgggcgtggtggtgcacacctgtagtcccagccacccgggaggctgagacatgagaattgcttgaacccaggaggcagaggttgcagtgagccgagatcacgccgctgctctccagcctgggtgacagcaagactccatctcaaaaaaaaaaaaagaatggcatgagatagacaggtagagatttgatggttttcagaaatcctggctggactgttaggagtcgtgttatagacaattcaaatgtcactgctggccaccgtcttcatactctatggataaaacagaaattccagtcctgtaacttacctctgtagcgtcaataacgtgggaaatgatccaaaagggtcttgtagaaagaagactttttacataaacagaaagctgtgatttttgtgggaaacaaacctaccactaaaattgatgagaattcttgtctccatgtgtaatttctggctcatcagccaggaggtaaaatttcaataagaatcaagaatattttaaatgatcagttaaaactgagtaaattagttggtttagtcaatcccccatctctcctgggaaattatctgacttttgcaaggtccttggtgttttcagtgtaattacctaaggtcctattccatatcaagtttcagtttaactttgctacaggattactttatcacaaaacttgagtagatgataatacaatcatacatcacttagccacagggtaagccacagggaaatgcatccttaggtgattttgttgtgtgaacatcgtcaagtgaacttactcaaacctaggtggtgaaacctactacacacctaggctatatggta

SEQ ID NO: 129570 - DNA, 1526 bp, Homo sapiens
tgcaggatgaaatatgggagtatgagaagcactgtgtttgtacttgtcactgtagatcagttggggaaatgcttctcagcattgctatgacttaaagaaaaactccagatatcatggtgacttacagcagaaaggaagacgcccagaggtttaaagagcagaaggatcaacttcagtaccaagaaagtagagagatataggaaccagttcctcagcagccccggaatggctaaggggagtgaaatgtcattagtagctctcgatctgttctttgattatatataagcagttaaatggttgttggaaaatattattgattgggtgccctcttttgtggcttttaaggttggttactcctctctagacagcacttagggtatgtactgggcacgtcactgcctaggtacttcctcccctaaatgtgggatgcttctgcatactgaagttgataaggagtcatttgtgagtctttgagttgcatgcaaccaatgcattaaataagatgaaatctgggccaaagaaagggtaatttattctacactttatattcggcagcaagaagcaccgtctctcgagtcctgccaccctcacccagtagcctttttcccctattctgtttttgttgaatgaacttcttgatctaatacacttaatagggctttttttaaggccttatgcaatcaaaaatcttgtcgtcttgttctttttagaagaaaggagtgctagacctcttggaagtttatttttcatctgtaaatttgaatttgtggcatttctgagtgtttctaccagtctcctttgtagttgaggtctgttcatcattcactcactggtgataacattcatgaatacgacatttttaatttgtatctcacctcatagaaagaattgtgcagcttttacatctgccagactagagttgaatattccagtctttacatgatttttttctccatctgtctgtctctttcctgtctctaattttgttggtgcatcaggactactgaacaagtgaaatttctctgttttctgttgtaagtactcctgctgtttctttagtccctgggaccgttggcagtttcctctctcccctcccccagccatctctccatagcatgtttgcttctaattctgagtttgatcttctgatgatttttttgcatttcatcagtcacttcatgagtcagcttagccttgcagttgtccatacctaagggagtggggcttggcctttacaccttaggtgctagagcttgcactccctggcttggcaggtgtcacgtggcgctttgacaataccaaaagctggcttggccccaagatcatcacagcagtggtttgagggactgttctgctatttaatattggaaatcattggcttttttggtagcataaagctactggcttggaacagttaataaattttactgagtcagctcaacttgagtttggtggcagagggtagcactcagtaagaagattagggaaagaagatcatgaactagtgattatgcacattccggtaa

SEQ ID NO: 129571 - DNA, 1004 bp, Homo sapiens
gttcatttaaatttacatatggtatcaaatcactaaggtaactagatagcattaagtaaattcaatatttagaatattccagatattacattctttgcaattatttaaacttatgccaaaaagtttttagatgtcacttgaaaatgcaatgggggacatagattttcaaaaaaaaattaggtatatgagcaaaaaaattgaaaaccattgtcttaaaccactgaaactgcttgcttataaacttaacctagagaagatcattttttaaaacctcagactcaagttacagaaactaggttctataaaacagcatctcacaattgaaagactccaacttcctccttgctttgtacccaggtctgtggttaacctctcacatatctgtatggagttgtgtctactttgttccattcatgggatgtcacttttccccattgcttgccctcctaaagggtagcatcttctctgttgtgtttctcaggatgaaggggcagtgatctcccagatttcagacatttctaatagggatggccatgctactgatgaggagaaactggcatccacgtcatgtggtcagaaatcagctggtgccgaggtgaaaggtgagccagaggaagacctggagtactttgaatgttccaatgttcctgtgtctaccataaatcatgcgttttcatcctcagaagcaggtatggaagcatatcttcatctttctaatgtacataagcatggaaatgcctgaaagcctaataaagcaggaggagccttacagagattaaagaattgggtcacttgaaggatagatttaggatgctgacctatgctttgcttctttacctggaaaagggacacaaagtgcttattgaagtactaggaacgtagagatacttgtgacaagttgtataggagatgctgatgtatgtgagactgcttgaatttctttataattttatgtgaatatggccatatcttaaagtatagtggtgtgttagttcatttgcgtt

SEQ ID NO: 129572 - DNA, 1030 bp, Homo sapiens
tcatgaaaagaaaagtttgccagtgttttgctctggaacctgagcttatgaaagaagctcctcagagcttctgagccagcacctcagagggcgaagtgctgccagaagggagtggaaaacttagtagcaaggaagaaccaacacacaggcatggtccttgacttatgtatggccattttgcatatgggcaacaatggcacacacccagcaggctgggttacagcaggaggtcgctgcggagcagcggaagttcaggatgatcctgaatcatccgggtgaaagggtgggggtgagagttcagagttcaaatatatttgctatttctgccttcttaggcctgaaagttagtattttagaaacatttccatctgcagtggctaaagatacatacaaagcatcaatatgtaacaggagcagctgtcacttgtttttgtttttgcttttttaaaaaagaaattcccatttacatggagcttatccccagaaacttaatcatgggtgtgtttctcttttatccatgtggttctttggtgactgaccgctattataagtacactttctcccttttagatcagaataaaattctctaggttatctgctcaacagaagctaagaccactctgatagtcattataacagtttttctttagttacttccataattagatttgttttttaaaaagcttccccccgctgacttttctttaaacatggttttaaaggatgtgatcaatttagtaatgaggaagttgttgaaggatgtctggggttaagaagctgaaagctgacagattcagtgtaatccctttccccacaggggctgctggagtcctctgcagagaaggcccctgtgtcggtgtcctgtggaggtgagagccccctggatgggatctgcctcagcgaatcagacaagacagccgtgctcaccttaataagagaagaggtaaaagctctcctgtttagtctgcttatcactccatttctttgtaaggcccatgtaccagcaggtagattgcatctctgctggctc

SEQ ID NO: 129573 - DNA, 1024 bp, Homo sapiens
tgaaatacttttggaattaggacacaaaataaaacttgtcactgaatcagaggtagagtgtctgaaagggtggattgactcaggaaagtctaaagtcagatcgcatctgttaggaagagcccagaagaatatctttaacttagtttgtaaaagattgactcatctaagcagaatgaatctatttccttgcagtattcaaataggtgcaaagagaaagggaaggcagttggttctataagtaaaatataagtttgactaaagataaaatcttaacaaaaacctttttagaaccttaagaaaccttatataatgtaaaaaaaaaaaaaaaaaaaagataacgagagccccaaagcagataaatggattacatacattgtcagtgtatgttaatgtgtttaattgtttgggacagcatttctccaactttcattgtctgaaaatcctcctctggtaataagttctttttttctcatttaggaaaattgtagctgaatatgaaaagactattgctcaaatgattggtaaggagaacattttgttttttgagggtatgagccataggatctgtcttagtctgttcagcctggtataacaaaatatgtaagctaggtagcttataaacaacaaacatttttcatagctctggagacaggagagttcaaggtgcccacagatgagatgtctggggagggcccattcctcatagaaggggctggctagctctctggggtctcttttataaggacactaatcctgacataatcacctcccaaattcccttccatgcccactttcaccctgaacatactcacacactggggattaggtttcaatacacaaatttggggttggggggtggcataaactataagaccatagccggatccatttatgattttcagaccatgtcacaaacttgtatttgtctgtcacttagatacagtcgtctcattattcgtgggaggtatgttctgtaaagttgctgcaaacactgagttagtgaatactaaacactgctcctggc

SEQ ID NO: 129574 - DNA, 1226 bp, Homo sapiens
ctttacaaaacaacagggattgatcctcctgcatggaatttagagtctcttctcatctatatcataaggattgactccctaaaccagagtctgtcctttctccactaaattgccgaaatgatactttctatcatccacatcacctaatgccttcccagctcagggccttaccacagctgttcttctctatggaatattctcccaggtagctgtatggctcacatcctcatttctgtccggtctatgctcagatctctccctgagagcaggtactctctgtacagtaacagccccctccccgcccccattcctccttaccctgccttgttctttccccatcacttgttaccacgcgtctcccccaactagagtataagccataagagcgggaatttggtcacatccccggctgtgtccctaccacgagaacactgcttgtcttctaaggagtgtctattttttgaataaatatgtcattccttttgacttgtgattcccagaagatgaacaaaggacaagtatgacctctcagaagagcttccagcaactgaccatggagaaggaacaggccctggctgaccttaactctgtggaaaggtccctttctgatctcttcaggagatatgagaacctgaaaggtgttctggaagggttcaagaaggtagagtgttttttccctctgtctcctggtgtatttccagtagtgtatttccttggtaactggtcatcaaatacatatgccagaggttgtgggtatccttttaaataggagctcagggcctactggccttgtatcctctattccagtgaagctggatttttttccacatttttccttctttggttgttcaggcatctggcccactgggtgccatgtcttggccattcctctcctgtgtcaagccaataagccccaggctgtggcgtagactgcaagaactgttaattgaaccctcagacctcaggtgaattctagaaatgttctttctggtaattcaccttttcagttttagtaaaagggattagaaggaattccatgtctctgaaaaattcaagctgcatattctagaagacattagtataatgtttcaaatttagatgtaaatgggcctgttgatttaatttaactttaccatatcaaccagacacaattatagcaatgaaatggctttattttcatattaaaataaaaatgaaactggccagtttatcaaatatggaaatcg

SEQ ID NO: 129575 - DNA, 1025 bp, Homo sapiens
cccctagaacggtgctccctgggagattcagactccagcatccctagatatgctaatggattgagtgagacccagatacttatgtttttgacaagtaccccagataattcctctgataacaagaaaattggggaactaagagattcatggacaagtttcagagggctggtgactgtcctcaccctttactcaatttaagcatgattttatgagtacattttttgaggtgtgtagcctttttttctttaaagcatctctgatgtagaaaagttaaaaatcactgaattaggatgtctagggtagggtagatccagacttgggactagttaactctatttgcctttatttcagaatacaaagtggcctgcataattatgtcatttgtctttcagaaccaagaaattgaagaactgacaaaaatctgtgatgagctgattgcaaagctgggaaagactgactgagacactccccctgttagctcaacagatctgcatttggctgcttctcttgtgaccacaattatcttgccttatccaggaataattgcccctttgcagagaaaaaaaaaaacttaaaaaaagcacatgcctactgctgcctgtcccgctttgctgccaatgcaacagccctggaagaaaccctagagggttgcatagtctagaaaggagtgtgacctgacagtgctggagcctcctagtttccccctatgaaggttcccttaggctgctgagtttgggtttgtgatttatctttagtttgttttaaagtcatctttactttcccaaatgtgttaaatttgtaactcctctttggggtcttctccaccacctgtctgatttttttgtgatctgtttaatcttttaattttttagtatcagtggttttatttaaggagacagtttggcctattgttacttccaatttataatcaagaaggggctctggatccccttttaaattacacacactctcacacacatacatgtatgtttatagatgctgctgctcttttccctgaagcatag

SEQ ID NO: 129576 - DNA, 1781 bp, Homo sapiens
aggtaattgtagcacattaccaattataaggtgaagaaatgtttttttcccaagtgtgatgcattgttcttcagatgttgaaaagaaagcaaaaaataccttctaacttaagacagaatttttaacaaaatgagcagtaaaagtcacatgaaccactccaaaaatcagtgcattttgcatatttttaaacaaagacagcttgttgaatactgagaagaggagtgcaaggagaaggtctgtactaacaaagccaaattcctcaagctcttactggactcagttcagagtggtgggccattaaccccaacatggaatttttccatataaatctcaatgaattccctttcatttgaataggcaaacccaaatccatgcaagtgttttaaagcactgtcctgtcttaatcttacatgctgaaagtcttcatggtgatatgcactatattcagtatacgtatgttttcctacttctcttgtaaaactgttgcatgatccaacttcagcaatgaattgtgcctagtggagaacctctatagatcttaaaaaatgaattattctttagcagtgtattactcacatgggtgcaatctttagccccagggaggtcaataatgtcttttaaagccagaagtcacattttaccaatatgcatttatcataattggtgcttaggctgtatattcaagcctgttgtcttaacattttgtataaaaaagaacaacagaaattatctgtcatttgagaagtggcttgacaatcatttgagctttgaaagcagtcactgtggtgtaatatgaatgctgtcctagtggtcatagtaccaagggcacgtgtctccccttggtataactgatttcctttttagtcctctactgctaaataagttaattttgcattttgcagaaagaaacattgattgctaaatctttttgctgctgtgttttggtgttttcatgtttacttgttttatattgatctgttttaagtatgagaggcttatagtgccctccattgtaaatccatagtcatctttttaagcttattgtgtttaagaaagtagctatgtgttaaacagaggtgatggcagcccttccctagcacactggtggaagagaccccttaagaacctgaccccagtgaatgaagctgatgcacagggagcaccaaaggaccttcgttaagtgataattgtcctggcctctcagccatgaccgttatgaggaaatatcccccattcgaacttaacagatgcctcctctccaaagagaattaaaatcgtagcttgtacagatcaagagaatatactgggcagaatgaagtatgtttgtttatttttctttaaaaataaaggattttggaactctggagagtaagaatatagtatagagtttgcctcaacacatgtgagggccaaataacctgctagctaggcagtaataaactctgttacagaagagaaaaagggccgggcacagtggcttattcctgtaatcccaacactgtggaaggccgaggcaggaggatcacttgagtccaggagtttgaaacctacctaggcaacatggtgaaaccttgtctctaccaaaataaaaattagctgggcatggtggcacgtgcctgtggtcccagctacttgggaggctgaggtgggagcctgggaggtcaaggctgcagtgagccatgatcatgccactgcactccatcctgggtgacagcaagatcttgtctcaaaaaaaaaaaaaaaaaaaaaaaaaccaggagtgaaaaaggaaagtagaaggc

SEQ ID NO: 129577 - DNA, 1034 bp, Homo sapiens
aggatagctcaagttgaattttctttccagccagttaccctttcaacctacccatactttgtacaactcttacacaaatacttagatatttattagatagccctgaattcactctaattataaacagggagtgtaaactgcccccagatgttcctgggctgggtaaaagcagctggagtgaagcactcattttccataaaggtaacaaagggcagctcagtggttactcaagctcaaaagggtttttttaagagcaagcattggttaagtctgtgtatactgagttggaagtgatttcagcacattcttttttagtggagtgaaagttctgaagcccccttttaacttcctcttggtttttcattataattggtagccatctcatgaactgtctctgactgttgtctctttgtggtcatgtgattgtgagcttgctttctgacttgcatttctgactttatcctgttgttaggaagatagaaactaggttttgaaagattacatgattcaagcgagggattttaaagtaaagatgtatttattctgaagaatctaaaagataacagattatttgcttatgaaagaacaatatagtctgggaatcccagaatgtcaagccaaaggtctaagaagtcatctccttcaaatactttaataaagaagtatttcgaggagatatctgtccaaaaaggtttgactggcctccagattccagttatttttaaaaagcaacttaccactaaatccttgagtctccatagagtaacagtaaagaaactgatgtaacagactctcctctcaaaggatctcctctggaagagactatcagcggcagcattctccagggaagacccatcccctagtgccagagcttgcatcctggagactaaagattgcacttttttgtagttttttgtccaaatgcaatcccatttctgtgcctcttagcatgcagttagatttggacaaacaagattcctaaggaatgactttattaactataatatggttacagctattatataaatatatat

SEQ ID NO: 129578 - DNA, 1050 bp, Homo sapiens
gagaagagaagggcctctgagttgctagccaaagttctgggagcctttcttaggtttgattattgattccaattgcatatctaatttcagaaaccctgggagtatggtttcctagccctcagcatatcagaaatctcaggagaatggaagaaccactggagaagtgggtgagagggtgtggaggagtgcatgggttttgttttgttttgttttgtttttttgagacggagtctcactgtgtcacccaggctggagtacaatggcgtgatctcagctcactgcaacctatgcctcctgggttcaaacgattttcctgcctcagcttcctgaatagctgggactacaggcgtgcgccaccacaccaggctaatttttgtatttttagtaaagacggggtttcaccatgttggtcaggctggtcttgaactcctgacctcgtgatccgcctgccttggcctctcaaagtgctgggattacaggcgtgagccaccacaccagccaagtgcatggttttatccagttcattcctatgctcatacatgggattgctgaaaagttaactagcattcccacaggttacatgtgctcaagacaatcttcatcattcctggggatgatcttggagtaagatgtggttgaactgtgatcagtgcctttgttttaggtggaaagtgctacgtggttttgctagtaggaggggtggcctggtggggggatggcagtggagctcacccctgcggtgataagagcagccttaatgattctctcatgcccttttatattcttaagatattacatcatgtgcattatgtatctttttcttaataaaaaatgtttttaattaatgttcataagactttacaaataaaaagcctggaaaaagtgtacaaattaaaaatactgtaccacattgagaaaaaaccacaatgagatatacctacacacataccagcatggctaaaatgaaaaagggtgacaggccaggtgcagtggctcacgcctgtaatctcagcactttgagaagctgaggcaagcagatcaccggagtcc

SEQ ID NO: 129579 - DNA, 1054 bp, Homo sapiens
catgttgggctgagggaaggtcatcatcagtgcactcggggagatgctcatacttcactggagccccatttactgctacacttgtccctggccaggacctggccccagttagatgacaaatcctgcactaatgtccactctcttattcctggatctcccagggcttcctcagagggacccccacccccaccctcctctcatgtcaccttgaagcaggcgtcaagtgagtctgtgccctgctatgttttgccatccctttctctctttttggggggacacttttttattgtgataaagtatacatgacataaattttaccattttaaagtgtatatgtagtggcattcggtaaattcacaatgttgtacaactctcaccactgtctagttccaaccgattttcatggcttctaaagttgacgccatacctattaagcagtcacctcccattcttctcttctcccagcccctggtcaccactaacttgctttccatccagtctacagatttgcctatttttgatacttcatataagtggaatcatatatatgtggccttctgtgtctagctgctgttgctgcttttttttttttttttttttttgagacagagtctcactctattgcccaagctagagtgcagcagcatgatcttggctcactgcaacctccgcctcccaggttcaagcgattctcctgcctcagcctcccgagtagctaggattacaggcctgcgccaccacacccggctaatttttgtatttttagtagagacagagtctcaccacgttggccaggctggtatcgaactcctgacctcaagtgatccatccgcctccgcctcccaaagtgctgggattacaggcgtgagccaccgcacctggctgtgtctagcttcttatgtttacttttgccatcacttcattgacacattttgaaagtacagtattgctgttgcctaattttatactttaattttggtcagtgcaataaacagccctgatgtctgagaatgtgactgtacctgtggggaaaggaatgtcaaaaaaggacgtt

SEQ ID NO: 129580 - DNA, 1082 bp, Homo sapiens
atttttaaatgcatgataccatattgttgactgtaggcacgatgtaatacagccagtctccctactctagaacttcttcatcttgcatgcaatcaaataattcttgaacagaaacaaatgctggcttgattttccttaaaatgttactacaatattatggcactagcgcttgtattttgatttcacattggttcccgtcatgatagaggagatgaaattccttagggccgccctactctagtacagcaatctgcagactaactatgttttagttgcagagaattgcttacatcccccactttctaaagtccacttggctaagtaattgcaagaccaaattatatggccctgaacaaagagtaaacagaagcgtgaaacacaatattgcactagattgctggtcttgtcaaatttactctgtcaaatgtgttttttcctctttttccaaaaaatacgtagttgcttttactttccaaaggccacgatatgactcatggatcatcaaataaccaaaaagattgcatggctcttagtactcctggggtgccaatgaaagccctttgcttttatttaatttttttaaataaactgaaagcagttctttccattgatggggtgaagagcgttagcagtgttggtaagaagatggatatttggtgcattttagtagaaagcatacaaagttatgggaggaggttataataacacataatgtataatggacaatactgttgtcttaaaggctacatgaaaattggtgtttttttaaaaaaacgtgaaattttcctaagcaaattttggctgaaagccaggaataatttttgcattgtatgcttcaacctgtcagaatgccaagaaccaggaaataatgttctttaaaaattgggcaatagatgcacgtggtgcagaatttggaatgtaggaatgcagagttagtgacaaatttctccctcccacttctgtcctctcagcaggggcagccagtcttgacagtttcttgtgtctgtctggagataatctctgcctgagagactatctcttaagatcatggtaactttcagatcttcagcaaattgtttggg

SEQ ID NO: 129581 - DNA, 1043 bp, Homo sapiens
ggcttgaatactggctccgctgcttgctgcctgtgtgaccctgggcaggttccttcacctgccccatccttagtttcttcatctgtgaaatgggattgttaggattaggcgaccacatgtgaaggtgcctagcagcatgtctggcgcatcataatttctaaatatatgttagtttccttctttctttctcaggctgttactttgccaaagcaccagattgatgttaggagtttgagctctgtcttcatttgactccctaaggaagtcacttcccccagttgagccttagaggactcatgtgtagtgaatgaagaggtatgcacaggacctttgagtgctgacatgctgtgagtttatggatcgatagttgggtcttctggtcatttctgtgttctttgtgactctcactggaagaggcggaagggagtagaagtcacatgggtaaaaatttcttcttcaacaagaaatactgctgttgctagaaaaaggattaacgtgggaggtgtgccacatccctgtatgggcacctcagctgcttccttggtgacggagaagaataagccatatattttcccccctggggagctggctccttcaaggaccttagtggcagaagagctcttgagcaaaaaggaaggtactggcattgtctgcataaaaccacctatctttatttatttatttatttatttatttatttttgagatggagtctggctctgtcacccgggctggagtgcagtggcgcaatctcggctcactgcaaccttcgcctcctgggttcaagcaattctcgtgcctcagcctcccaagtagctgggattacaggcgcatgccactatgcccggctaattttttaatacttttagtagagaaggggtttcaccatgttggccaggctggtcttgaattcctgacctcaggtgatccccctgcctcagcctcccaaagtgctgggattacaggcgtgagccaccacgctcagcctaaaaccacctatcttttaacaggaacctgccctgtgccctatgtggttccacaaaa

SEQ ID NO: 129582 - DNA, 1040 bp, Homo sapiens
ttcctagatatccaggcaaatgacttagcatcatgggagatttcttgttctgctttgtggagttcactcatctcactccctcaaacaccttagctttgtggagacttgttgtattgcttgtattctgacctaggaatgtcttcccttcttttctgtggcttttgtagttatcaatgccctgtctcagagatatttccttcaagccaatgatcagaaagatatgaaggactgggttgaagccctgaaccaagccagcaagatcaccgtaagtttggtttcttctgttttctggtggtagtaaaagtgcctcttcccaggctatggccttgttggggttggggaaaactgagatggcagcggggactttcccaggagcctggtctgtacccagttctctcccacctcgtctttttccttggctgaccaaacacaagttgaactgagagtctgagtttgaatcaagttcaaggggaagttcatggagcgtcccctttgtgcttcctgggagggctcccgatcagtcatgtttcgggtgattctgggatgctgattcagaatgtggtaggattggaaaatggattggtgactgtgaaaagtcaagtaaggggaaaagcatatggggagggaagtcagaactttttcccagcttgggggatactcttcttactttcagaggctgcctgcagggtcagtccaagccatccgcctccctgtcctagaaaagccttctgtttaaaagcatcacagagctcgttcatggactgtcctacgagtgtgctctttttccttgagttggctaatgaagaattcctttctttttccttagagatatagaaaaagaaaggaagaagggtaggaaggatggagaggggaaactatgttttggaaaaaactagacttttaatcaataagacaggcagactcctggcttatatagatcatggcttctttgctgaaaagtttgtttctgtatcatacagtcagaaatgcttatgtttgaggggcttccagtagtgactattacatgctgcagcaaatta

SEQ ID NO: 129583 - DNA, 1191 bp, Homo sapiens
gggcatggtggctcacgcctgtaatgccagtagtttgggaggctgaggcgggtggatcacctgaggtcaggagttcgagatcagcctggccaacatggtgaaaccccgcctctactaaaaaatatgcaaaattagccgggcgtggtggtgcaggcctgtaatcccagctactcagaggctgaggcaggagattcacttgaacccaggaggtggaggttgcagtgagccaagatcgcgccattgcactccagtcagggcaacaagagtgaaactccgtctcaaaatataaaagaaaattgagtgtcccacccaaattttagggcgtacctccttccatttgataagaagatgctatttccagtgtccctgggagaattcttccatccagtttatatggtgaattgccaccagcgttccctaaaggaagagagaacttagcttatttctgtctgtgacttttatcagctagatcagttaattgtatttttaaattaaaaattagtaactagaggaagagactaagagaactatttttacctgagtaaatgctctcctcttcttgtgtccaaatctaatgcagaggtgaaaacacttgatgagaaaatcctttgtggcttgaggggaatcatgtttctttcaggacgtgttgtttccctgaagtctatgtcacactgagaactttttctgactgcactgctttggagctattcatttaaattgagtttggcctagttttcctggtataaaacaggaaatctacattgttccctctttctctcccttccatcccttcccctgcctttcctatacacgctggtgtgcttttgccctcagaaattcttggtttgggagttatgtatttttgagtgatcgaggttatgacatacttggagcggcatgatttcaagaagccattccaaattcttatagctccttagctctggttttactctcgtattttccccaagaaaattttttggctattcaaagaaagcacaaaatatgtgatgtggaactcatgaaaatagggacttttgatatctctttaaatattccctgactcacggaaaagatgtcctcttttggtgtatacattgtgaaaatctacccatttatctctctctctctcttttcttttaaataaattatctgataaggccggcaaggtggctcacgcctgtaatcccagca

SEQ ID NO: 129584 - DNA, 1050 bp, Homo sapiens
caagtgccaggcaaccagggaccactcctatagcttagagcctgctgaggttattcaaactagccagttctaaactattcgccctgccctgtcttgcctttcctgcagaaaccccaatgaagatagtggccaaaaaccttcccctcccttctatcttccaaccaccctggtatctttgccaggtagccttgtataacatgatgtgcctcctgtctctgggacctatgagtataataaactttggtttttcctgatcctctcacctcactgaccatatcataaaagaaaacaaaatggagggtaaaaggccacagagggtccactgcactgtctcatcacttacgttaaattcactaatccttaagggtttaaattttcgtgcagtaaaacatcttccttttcattcctttcacctaggtataccggacactacttcataaccactttactctactccttcttcctgggatgttttggtgtggatcgattctgtttgggacacactggcactgcagtagggaagctgttgacgcttggaggacttgggatttggtggtttgttgaccttattttgctaattactggagggctgatgccaagtgatggcagcaactggtgcactgtttactaagaagagctgccatcatggcccagggaggcgggtgaaagctccgtcttctgaattcatctctacaggctcaaaactcctctttgatatcagacctgatgttattttccttcttttggagggcatttgtttggttaagaaggcttctttggactttggaatttcaacccagattttaccttgcagacggaatgacaagcaaaaagtgttgtggggaatcaaatttgttcctttcctcatgcacaaaacataaaggatagtggcgagtttacaagctgtggatgggtttccatagtcttcctttctgtacattgctatatcttcagtcctttggagcaagtggacctaacaagttgagcaaaatgaatatttggatccatgttcctcttgtgaccctgagtcttcatgcaaggagatctgaa

SEQ ID NO: 129585 - DNA, 1036 bp, Homo sapiens
ttttaggatgattttaacgtcttccttctagtagtgtagaatcttcatatgagtagaccccaggagagcctgattctaatcagtcttattgaaaggctgagaatcctgttgtgaagatatcttgggcctaacctcccatcccagccacttaagagaagtgattaagcagtctgtggatagcaatacaatgaaatacgattttgctatcaaaatgacaaatgtgtaggctatgtagatttgtagaaaagttgatacaaaagatgttaatcataaaaagtaaggttcactttaagtcatatgtgataattacaactatcagaactatgtttgtttagctgtaaccatcagaagaggttatttattcaacacatattttattgaatacgtactgtaccagtgcaggaagtacatgatgaataagataccgtccttgatctcaaagaacttaaattctttgctggaggaacttaaattgtctagggcattaaatcttagaaatgggtggtgtttttcccaaagggacacttaaacaaacaacagaagccatttctttttaaatgtaaagatgggtaaatatttaagaaaagtgtaacactaaaaaaagtaagagtgtagacctagcagtagaaattataattaagtatgtttgaaggtagttttttttttttttgagatggagtctcacactgttgcccagactggagtgcaatggctcgatctcagctcactgcaacctctgcctcccaggttcaagcgatccttctgcctcagcctcctgagtagctgggattacaggcgcgtgcgccaccacacctggctaaattttgtatttttagtagagacagggtttcaccatgttggcaaggctggtcttgaactcctgaccttgtgatccacccgcctcggcctcccaaagtgctgggattacaggcatgagccaccacgcccagcccaaaggtagttattaatatacggtatgtatttatctggaattgacctggcgaatactagaatgattaaaaaaaaaaaaaaaaaa

SEQ ID NO: 129586 - DNA, 1051 bp, Homo sapiens
gtccataaaatgaaattaagtttcactgaaaaatttacatactttcccctggggattctattgcttcagattaaagtttataaagtatcattagtgtcttccacagggtcattttacacaaacacagttttagtgagatgtcaactggcttttgttggttgttggattgactgtgatttaaaatgttaaagatgatataatgcatcttgttctgcttctaggctgaaaggtcactgaggcagagctgtttgtaccttgtatcccctggaattttgcctaaacatttgtgtactcatagggtggtaggagatagtccgcagatggtctaaagaatgccatgtgatactgtgagatgccaataatataaataaaactttgttattattaaacttgactggcctaaagtaattttgttagctctgcaatttctgtgatgattttcagcaatgtagcaatatttgaagataatacagtatttttcatttagaatcattgtcattatcggggctatgtggagggagttcataattcatccattgctcttagcgactgttttggactcaggtaagcaatttcctttatcttctttttttttgtttcccctatgtcttaccctctttcctgtttctgtctccaaattaaatcattttgggcacttagcaaaattggaatttactttgatgttactgaacatttttacagctgtgtttcagatatccttggcatgtttatttaagaaagtattatagttgatgagttttaatatgtaaagaggaaattttttttgagaccactaaatcatttttgctatttaaaatgaaatatactttaaatttctgtagcactttatatttataaaattttcacttgtattatttaagacttgtatttaagtcttattatgactgtgaataagagctcattatctctgtatttaggtgagcaaactgaagttcagataaattatattacaattcaaattaagttattatagtattaacattacattccttgaggtcatggcaacatggcactgtgctggttggttgac

SEQ ID NO: 129587 - DNA, 1049 bp, Homo sapiens
tgtaatgcatagtatgaacaaataaggactgttcccacccactattcccatcacttgaggcagttttaccttttttggctaagatttttgttaacttgtgctaggtttttagataatctcttggcaatgcgacgttttgatttttttgttctaggcattagttattaatttctcactatagaagatgagttagttttctttccttctcttccttcaacccttaacaactcccatcatacctatgctgattttccattcttcatcctcccaatagttagggcagtgatgactgtgtattgtataatggccacattaatgctcttcacaactaaactgtatagtaagttataattacttgcctgatttctctagagttactaattctgtctttctgtttctctctctctcttttggtttggttaatttcctatgtactttccattaattgacctgtatattgttaaccattggcctgattgtgccttgagttgattagtggcatcaagtattctatttatttcaatttgttcaaataagtctgaacagaaggcctctgttcctcttcagtcttgactggtttccctctgtatagttagttagggttctctagagaaatggaaccattgtgttgtgcgtttatgtatacagtcatataccgcataacaacattttggtcagtgagagattgcatatacaacagtggtctcataaaattataatgctgtatttttactgtaacttttctatgtttagatatgtttagataccttttctatgtttagatacgtttagatgccattgtgttaccattgcctacagtatttagtacagtgacatggtgtacagatttgtagcttaggagcaataggctgtaccacatagcctagatgtgtagtaggctataccacctaggtttgtttaagtgcactctgtgatgtttgcacaatgacaaaatcacctaacaactcatttctcagatcatatccctgttgttaagtgacacattactgtagatattactgtatatataatctggaggaattattacg

SEQ ID NO: 129588 - DNA, 1089 bp, Homo sapiens
aaaataaaaacaaaaattagccaagcatggtggcgtgtacctgtagttctagctgtttgggaggctgaggtgggaggattgcttgagaccaagagttcaaggttacagtaagctatgaacgtgccactgcactccagcctgggtgacagagtgagatcctgtctcttaaaaaaaaaaaaaaaagggaaagcaagaatagattgttactttgtcatctgtcgtcagtgtttgtcaatgtatttaattagtagggacatctaaaccaagcatccatatatgataaatgaaaaaaacaaaagtattagctggcagtgttttctccaacccttcctagctgatctaaccagtggtgcagttggtttatatgtgagagcaatgagaatgaatatgctgcaaatggtactatactgtgcatggtttttaatttacttataatctattatttaatagtgtttcttttagggcttgagtttgaattcaggctaacttttaagtacaacttaagatttatttttacattttgtcattacatatgaaatgtggaacaaaaatgtatcatgtgtgaggcaggaaaggttttccacggtgttgaggggtattgaggctgttcatccaggtgtttagactgttgtagggaatacttttatttcaaaagctaaattgccataactttttttttctttttttaaatgtttaatgttacagaagccaaggctgcccccaaagattgtttcattgaagtgaattctaaaggtgacagatttggcaattgtggtttctctggcaatgaatacaagaagtgtgccactgggtaagtggaggtgcggtcataatggaatatgaaagattataagatccgtcatctctagtatcttttttttttttttttttttgagacggagtcttgctctgttgccaggctggagtgcagtggcgcgatctcggctcgctgcaccctccgcctcccaggttcaagtgattcccctgcctcagcctcctgagtagctgggactacaggcatgtgccaccacgcccagctaattttttgtattttagtagagatggggtttcaccatgttggccaggatg

SEQ ID NO: 129589 - DNA, 1009 bp, Homo sapiens
aaaatattttatatttctacaattaacatttgctttttgtaaaacattaataatgaaacattacaaaggaggaaaaagtcatgtataatctcaatccatatatgttcactaatatcagtgaaattattttcttcttcacactaacattttacatagttggaattattctgtaatattatcattgcttctacccattctacctcctatgctatcagttaagctaagcaactacagtaaaacagtgcttgctaagaagaaatagcaacaaagacccccatgtcactcaatctgacagtcgtttttaggtcttcatacaatagtacttgacctgtcagtagcattcaattatgctggccattttctccttcttgaagaaacctctttttttttggtgattgtgtagggtgttcttcttctcccctgaccccatgtgatttcgtttacttccgtggcttcatttgcctcctctctgagaagctccagccctgctggcctgcatgtggcctgcggccacagggctctgcacctgctgttccctctgttcagcatgctgtctttccccctctcagcctgctcagttcttcgtcctccagatctcaggtgaagtgtggtttccttacagaagacttcttccacttcctcaacaggaccagctctccctctgacaggtgttcttgatgctgtttgcttctttttcatagaatttgatatgttttcattattttttagttcatagtattttctaatttacactgatttttttcctttgactcgtgttattgaaagcctattgcttaattcccgagtagttgggaatatactggttatctgtttggttttgatgtctagttcaattccattgagaacacattctatatgatttcacttttttggaatttgagatgtgcattattcagttacacttggaacattcatccatacagactaatatgtgggccagcctcttaataccagaccaatatatggtctgtatgggtaaatgttccat

SEQ ID NO: 129590 - DNA, 1098 bp, Homo sapiens
cagccagggcgacagagccagactccgtctcaaaaaaaaaaaaaaaagattcagtgaagctaattcccatacccatcacctcaccacattgtcattccaaaagtggacttgatccctttagagtgctgttcctatggcttgtggaaagggatggagacattttgttgcatttttcacccattttcacagtacatataaatcattctgtggggaaaaaaattgcagatgatagaccacctgttctatggtagaagccagagggtgctcaaggtcttcaccaccactgtgcattctctgccagtcatagaactttaggagttaacagtagatagtaaagaacatcttggtcaaggtcacttcatcattgatttagtaattccatctgatcattcctaacgtcttatagtgtaatgtgatatgtgaaaaatattacttttactttcttatttgaggctaagttatacagtttcactttgttgtaaacttcaactacttcatcaaggaaggatataatgaattccaaaaccgaggattctagctgagtggtttttatagtattagttagatactgtataggtttggcaatacattttggaagattttatttaaaatacattgacataggaaatatgttaccttctaactaatacagttggtttgaaccaagatcttagtactttggtattactgaatttaaaaaaataccttaaaagaattaagtattccacattcagtggtaaagatatgtcaaataagcaaaatatttttgactgtcagcattataaataaatacaggttgagcacccctaatctgaaaatccaaagtgctccaaaacccaaaactttctgagcaccaacatgatgccacaggtggaaatttccacacctgccctcatgtgatgagttgcagtcagaatgcactgtttagtacttatatgtgaataaatctaagaaaatgattgcttaccagtagtatataaattcagagtcaggagtgatggtgagccaaacaaccacagattgtccacatgaggggctgagagagtaacacctttgctttctgatggttcagcatacacagacattattttatgcaca

SEQ ID NO: 129591 - DNA, 1061 bp, Homo sapiens
ttctcaaattaactgtattggtgtaagagttttgtcattaagtgtttaagtgttattctgaattttctaccttagttatcattaatgtagttcctcattgaacatgtgataatctaatacctgtgaaaactgactaatcagctgccaataatatctaatatttttcatcatgcacgaattaataatcatcatactctagaatcttgtctgtcactcactacatgaataagcaaatattgtcttcaaaagaatgcacaagaaccacaattaagatgtcatattattttgaaagtacaaaatatactaaaagagtgtgtgtgtattcacgcagttactcgcttccatttttatgacctttcaactataggtaataactcttagagaaattaatttaatattagaatttctattatgaatcatgtgaaagcatgacattcgttcacaatagcactattttaaataaattataagctttaaggtacgaagtatttaatagatctaatcaaatatgttgattcatggctataataaagcaggagcaattataaaatcttcaatcaattgaacttttacaaaaccacttgagaatttcatgagcactttaaaatctgaactttcaaagcttgctattaaatcatttagaatgtttacatttactaaggtgtgctgggtcatgtaaaatattagacactaatattttcatagaaattaggctggagaaagaaggaagaaatggttttcttaaatacctacaaaaaagttactgtggtatctatgagttatcatcttagctgtgttaaaaatgaatttttactatggcagatatggtatggatcgtaaaattttaagcactaaaaattttttcataacctttcataataaagtttaataataggtttattaactgaatttcattagttttttaaaagtgtttttggtttgtgtatatatacatatacaaatacaacatttacaataaataaaatacttgaaattctcttttgtgtctcctagtagcttcctactcaactatttataatctcattaattaaaaagttata

SEQ ID NO: 129592 - DNA, 1115 bp, Homo sapiens
ccttacaagcttctcttctgtcaggactccagaggctggaaagggaccgggactggaaagggaccaggactgaacagactggttacaaagactccaaacaatttcatgccctgtgctgttacagaggagaacaaaatgctttcagcaaggatttgaaaactcttccgtccctgcaggaaaggattgatgctgatagaagagcctggacagatgtaatgagaactaaagaaaacagatggctggagatgacatttatccagggtcactttgtcaggccctaggacttaaatcgaagttgaacttttttttttttttttaaccaaatagataggggaagggaggagggagagggaggacagggagagaaaataccatgcataaattgtttactgaatttttatatctgagtgttcaaaatatttccaagcctgagtattgtctattggtatagatttttagaaatcaataattgattatttatttgcacttattacaatgcctgaaaaagtgcaccacatggatgttaagtagaaattcaagaaagtaagatgtcttcagcaactcagtaaaaccttacgccaccttttggtttgtaaaaggttttttatacatttcaaacaggttgcacaaaagttaaaataatggggtcttttataaatccaaagtactgtgaaaacattttacatattttttaaatcttctgactaatgctaaaacgtaatctaattaaatttcatacagttactgcagtaagcattaggaagtgaatatgatatacaaaatagtttataaagactctatagtttctataatttattttactggcaaatgtcatgcaacaataataaattattgtaaactttgtggcttttggtctgtgatgcttggtctcaaaggaaaaaataagatggtaaatgttgatatttacaaacttttctaaagatgtgtctctaacaataaaagttaattttagagtagttttatattaattaccaaactttttcaaaacaaattcttacgtcaaatatctgggaagtttctctgtcccaatcttaaaatataaaatatagatatagaagttcatagattgactccttggcatttctatttatgta

SEQ ID NO: 129593 - DNA, 1031 bp, Homo sapiens
ttcagccctttgcttgaaaatcccagctcaatcactaagttcattagtgctggccagggcagagttgtgaggttgaaaatagactcagttggcccctcccacacatgtgcacctccctgtggcatccccttccctgactgcccttccctctccaccactggcttcaacattttttgcagtttttgactgcatagggtgaaatttccaacacccagcttgacatgtcttgtttccagtagcttcaatatattaaattcaattccctggacacttggaagtccatgatgatagtattcatcatataagcaaatcatcgataatgctttggttggctaatgttgttccctctaccttatctcagttaaaatgtataaaatagtctttaaggggtggtaaggtcatatgatgatataaagttataattctaatgatttctacctgaatagctttacgactactttaccatttataaagggcttcctttcactcatttattcctcaccaaaggcctatacggccagtgtcttcttaatttagagattagggaactgaggctcatagaggtgaagtcatctgctctaggttccatgatttagacggtgctgagtggcaccagcaggaccacactccacagcactgtgtcccattccatatcctcgatgtcctgctggaacaatttggaggatatcgttatttggggtgggggatcagggtggattttgactaagataattcccagacgtggctgaactgtttctacaacattgagtttgactacagcagacgctacacccatcgctgcctttgcagtatgggctttgctttgtattcgtccagacctggatgccctgggggttgccacaccagaccacagtctcccagagcctccgcaagcatgtgctggctttctctatcctcttccgtggcctatcagcacgtttataagttacagtttggccctgtctgcagaatgtgctgacagctttcagtaatggatatggacgtctgctgaaaggtttggctgtgtttgt

SEQ ID NO: 129594 - DNA, 3363 bp, Homo sapiens
ttagattaggaaggtttttaagatccgcaatgtggagcagcagccactgcacaggaggaggtgacaaaccatttccaacagcaacacagccactaaaacacaaaaagggggattgggcggaaagtgagagccagcagcaaaaactacattttgcaacttgttggtgtggatctattggctgatctatgcctttcaactagaaaattctaatgattggcaagtcacgttgttttcaggtccagagtagtttctttctgtctgctttaaatggaaacagactcataccacacttacaattaaggtcaagcccagaaagtgataagtgcagggaggaaaagtgcaagtccattatgtaatagtgacagcaaagggaccaggggagaggcattgccttctctgcccacagtctttccgtgtgattgtctttgaatctgaatcagccagtctcagatgccccaaagtttcggttcctatgagcccggggcatgatctgatccccaagacatgtggaggggcagcctgtgcctgcctttgtgtcagaaaaaggaaaccacagtgagcctgagagagacggcgattttcgggctgagaaggcagtagttttcaaaacacatagttaaaaaagaaacaaatgaaaaaaattttagaacagtccagcaaattgctagtcagggtgaattgtgaaattgggtgaagagcttaggattctaatctcatgttttttccttttcacatttttaaaagaacaatgacaaacacccacttatttttcaaggttttaaaacagtctacattgagcatttgaaaggtgtgctagaacaaggtctcctgatccgtccgaggctgcttcccagaggagcagctctccccaggcatttgccaagggaggcggatttccctggtagtgtagctgtgtggctttccttcctgaagagtccgtggttgccctagaacctaacaccccctagcaaaactcacagagctttccgtttttttctttcctgtaaagaaacatttcctttgaacttgattgcctatggatcaaagaaattcagaacagcctgcctgtccccccgcactttttacatatatttgtttcatttctgcagatggaaagttgacatgggtggggtgtccccatccagcgagagagtttcaaaagcaaaacatctctgcagtttttcccaagtaccctgagatacttcccaaagcccttatgtttaatcagcgatgtatataagccagttcacttagacaactttacccttcttgtccaatgtacaggaagtagttctaaaaaaaatgcatattaatttcttcccccaaagccggattcttaattctctgcaacactttgaggacatttatgattgtccctctgggccaatgcttatacccagtgaggatgctgcagtgaggctgtaaagtggccccctgcggccctagcctgacccggaggaaaggatggtagattctgttaactcttgaagactccagtatgaaaatcagcatgcccgcctagttacctaccggagagttatcctgataaattaacctctcacagttagtgatcctgtccttttaacaccttttttgtggggttctctctgacctttcatcgtaaagtgctggggaccttaagtgatttgcctgtaattttggatgattaaaaaatgtgtatatatattagctaattagaaatattctacttctctgttgtcaaactgaaattcagagcaagttcctgagtgcgtggatctgggtcttagttctggttgattcactcaagagttcagtgctcatacgtatctgctcattttgacaaagtgcctcatgcaaccgggccctctctctgcggcagagtccttagtggaggggtttacctggaacattagtagttaccacagaatacggaagagcaggtgactgtgctgtgcagctctctaaatgggaattctcaggtaggaagcaacagcttcagaaagagctcaaaataaattggaaatgtgaatcgcagctgtgggttttaccaccgtctgtctcagagtcccaggaccttgagtgtcattagttactttattgaaggttttagacccatagcagctttgtctctgtcacatcagcaatttcagaaccaaaagggaggctctctgtaggcacagagctgcactatcacgagcctttgtttttctccacaaagtatctaacaaaaccaatgtgcagactgattggcctggtcattggtctccgagagaggaggtttgcctgtgatttcctaattatcgctagggccaaggtgggatttgtaaagctttacaataatcattctggatagagtcctgggaggtccttggcagaactcagttaaatctttgaagaatatttgtagttatcttagaagatagcatgggaggtgaggattccaaaaacattttatttttaaaatatcctgtgtaacacttggctcttggtacctgtgggttagcatcaagttctccccagggtagaattcaatcagagctccagtttgcatttggatgtgtaaattacagtaatcccatttcccaaacctaaaatctgtttttctcatcagactctgagtaactggttgctgtgtcataacttcatagatgcaggaggctcaggtgatctgtttgaggagagcaccctaggcagcctgcagggaataacatactggccgttctgacctgttgccagcagatacacaggacatggatgaaattcccgtttcctctagtttcttcctgtagtactcctcttttagatcctaagtctcttacaaaagctttgaatactgtgaaaatgttttacattccatttcatttgtgttgtttttttaactgcattttaccagatgttttgatgttatcgcttatgttaatagtaattcccgtacgtgttcattttattttcatgctttttcagccatgtatcaatattcacttgactaaaatcactcaattaatcaatgatactgtgagctgtgacttttttttcccactcagtcatacacttctcaccctttccggtgaaccacatgtatctttctcctcttgagtttcttcagtgatgctttctggtcccagttcaacagcttgcaaatggtaactgggtgtgggtgggctgaaggagaacttgggaggcaccacaggctacccgtggcccccaccctcccatttaccatctgctcctataaataacttccagaagtgtttctcctggttgtgtgtgtttcagatcagagagaaggttaaatgcttgctctacaagaatgtagctttcggccctgcctgaatttcttttccatgtttctcatggaaacattctctttcccctccggct

SEQ ID NO: 129595 - DNA, 1076 bp, Homo sapiens
gggtgtgtgggtggaagccttgcatcattaaaaagagggggcttggtaattttctattaaaaagagttcagaagatacgcaaattatctggtgactggcacctagaaagtgatttccaactcctttgggaatatctcgggctgaccagtcttaaaggggagttgattgtacccgcgacactgtgtgttcagtctgcttcgtttatagagcatgtccacgctcatttatcttcatcagcagcccctgtggagtcattgctacaggatgtggctcacaggttaacactgttaattcagtgtccattgggacagagaaaagagaaagcagagttggtgaatgggctgattttcccacactcctgggagttgagaacagaagcagccctggtaccatattggatttgaagagagctcatcacctggatttatcaattaggacttcaccagaacttgctctaatctgccagaaagtcaaagtagatttggattttgtgtaggtcttctcagttggcagaacattagtgctgcctgtcagtggggattagtggttgattagcgattgactgatactagcagtacctgctgtcttaccgccatagagacccagtagtagaaactgatttctcccatgctgtggttggacgttgatgtttaatgcaggaagcatgaccatttgaaacaacctttaactttcccttgctgagtgcacacacatagttctgcctgtcattttataggactcaattttcaaggaattgtaggtctttcaatgttaaaatactaaaccaataacttgctcttcaaaacaaaaccaaacaaaaagaaaccctcatggtcaggcgtggtgactcatgcctgtaatcccaacactttgggaggctgaggagggaggatttcttgagtccaggagttctgggcaacatagtaagatccgtctcttaaaaaaaaaaaaaaatcagccaggcatgatggtgcatgcctgcaatcccaggtacttgggaggctgaggtgggagaattgcttgagcccgggagtttgaggctgcagtgagccgagatcgagacactgcactccagc

SEQ ID NO: 129596 - DNA, 1045 bp, Homo sapiens
aactcttgggttcaagtgatctgcttgcctcagcctcccaaagtgctgagattacaggtgcgggccaccactcctggccatattatcattttttaaagttttttttttaaaattttattttatgtacagagagctagcatggtttctttcacttggtggatgccttggataatccattcagggaagctcacttagtctaacctaatgaagcctacctcctctgcatactgatggaaacactggcagcacatattgaggccataatgacaagaatgagaaccctggccgaatttttttggatggctccaggagagctgctggtgacccatcttgcttttaggagtgcaacaaggcaaaaagtgaaaagtttttttttttaatactccctgcattgtctctgttatctctgaattccttttcttccttttctgttttgtatgttacagtctctgccattcacatttggaggctttccttaaatacttgccagcccttgactgtccatttgaatttaacagcgagacatgacgttggaagctctttgtgtacatgcagggcctgtgatttgttaggcctcacttgagaattttgcagagggcccatatgtcttttcttttgaactattcttaggttgatgcagaagtaactacggtttttgcagttgaaagtaatggcaaagaccgtgactacttttgcaacagcctaatagtttctttagagaaaaaccactcaatcctctgacacaggcatataaatgtagtgttctaagacccgagtgtctcattcttcactttgcagactttcatgtaaccctttggtgttcacgcagcagcacctgtccggtcctcctctgtgtctagtataccccagcggcaggctgtgtgcaggttcaggccttctttttttcccccttttcttttctttttctttttttttttttgagatggagtcttgctctgtcacccaggctggagtgcagtgtgcgctctcggctcactgcaatctccacctcccgggttcaagcgattctcctacctccagcctc

SEQ ID NO: 129597 - DNA, 1050 bp, Homo sapiens
tctctgatccactctgaggcccaagcccttgctccccaagatgcgtggcttcccagatgaaatcacaccaggcagcactttgctctcagagtggggttttcattttgcaccattagcttaactcagtggggatttaacacaatccaggaaatcaagcagttagcagcaggattctggatggctgacaccgatgctgctggtgtgtatgcattgatgatgctggcgagtgtgtgtgcatgtgtacatgagcttgcgtgtgtgcgttcatatgtgagtactggggagagggctctgcaaagttgcaatctctactctcctgcctggccaccttcctgaggtgtctggggtccagaaaacaggacaacttcaattaaataatttgtcccaaatgagccactcaggagcattttccacatctgctgttttttgttttgttttgtttgttttgctttgttttgtttttggagatgagagaaaaagaaatctgctttggatcttgttcttttagtttagttttttttgttcttgtgtgtaacgtatgtcttgtagtcagcaaatgcatccaagtatgcagcatgtggcttgtggtcaggggagagacgctgagttattgtgacaaagcacaagcccctttctctgctaaacgaattaatgatgccagacattggctcctgctgggaacagtggggtctgttaagctgccattgcaaggccattgtcagtaggacttatctgggccctagtgccgcaaagccagctcgccatggtgcccagaactctgctgagtgttggaaggaggttgtggttgcttgcagccaaatgccgtacccagtgctgttactgaatctcatttgcacaattggacttggggagggtgctttctgcctcagacctcagggttacccaagacatgtgtgatctggggctgggaggcaggaaaccagtgctctgtcttcatggcttagtgaggctttggtatctgagcagacttttccacctggaggctctgtggggtaggaggggtggagcaggcccatgcgactggtgcat

SEQ ID NO: 129598 - DNA, 1024 bp, Homo sapiens
agttggctgtgttggtgggtgaaccttccttctggtggagatgtaagatgatctttctgaagaaggtggaggagccagctagggcccccatctctttaggtcaccagcagcgtatgaatcctacccttgaaatgagttcctagctgcccccgacctcgtgtgtggaccccctcttcagtgaagaaagggatgacgccagggtgtgtaaagacagaatcctggagtcgttccatgttgcgtgtcttggagaggaaggccagatggcctggagcattctagtggctgtgactctttgggaacggacctgcagttggcagcaaggagcatggacatggaatgaagtccaggcccagggctgaaccccctccccccgccccgcttcctttatccaaggaggagccactggccccacactccctctgcctcccttggtgttgattttcctggtgactttgaaaaacaaatccttttttgccttcacagttgtgtccctgtgtttgtgcggcgggggaggcggtgggaaggttgagcgggaaccgcccctgcctcggaacaggagtagaatccatgtattgtgttgggttttccctgtgactgacagctctttgcctggaggcttcttcgcttacagacttaatgtatctcctggcaggtttccttgttttggatgattactcgaagtcgggaataggcaagcccagggaggaacacagagtgtttctctctcttgggttcatcgtccccatccctgtccccccattcccgacgctctttggaagtggggtgatgccaggaatcgggtctgggccggctggcaactatgagcttctgctttacccacccaccccctccccccgcccagttccatagaatgaggaccctgggttggagtggaaacgttgcctgttcctcccatggagccctcagcctgagagttcctggggacccataccccaaaactccgcagagaacaccaaagggtggccacttctgaggcggctgggagggatcattggcacccccg

SEQ ID NO: 129599 - DNA, 1064 bp, Homo sapiens
ggacctggactgcagtctgtctggctgggtgaccaagaagagggacttgccccatagtcagtgtgtgcaagagccacccctgtagcgtgagcctccctgggtttgagtgcctcttactgctggcacctggggacttcctaattcaaagggggcaggctcaggatggttgccctccgcatcccacaaatagttggtgatgagttatgaggaaagtgaaccagaagcagccagcttaggtttctttgaaaatagacatttgttgatccacattggcagggggctggacgtattgactgatctgggagctggggccagggcatggtggcagggggtgaagtcatcttctggattctgctgagtgttaatgacagtggcaaaaaaaaaaaaatgctgcagatactcccccagtgtctctggctttgctagtgggtggctgtgagagacccatttgggaattaggtaagttgagttctgtgagtgctgcagcgcatatttaagtgagagggtggatggacacatgaatggtgatgatggggacgagatgaaatacagccttccaggtctttccagggaaggtactgtagtgaatttttttttttttttgagacagcctcttgctcttgtcgctgaggctggtgtgcagtggtgtgatcttagctcattgcaacctctgcctactgggttcaaggaatttttctgcctcggcctcccgagtacctgggattacaggcgcccaccaccatgctcggctaatttttttttctttttttttgagacggagtctccctctgttgcgcagactggaatgcagttgcgtgatcttggctcactgcaacctctgcctcctgggttcaagcaattctcctgcctcagcctcctgagtagctgggattacaggcacgcaccaccatgcctggctaatttttgtatttttagtagagatggggtttcaccatgttggccaggctggtcttgaactcctgacctcgtgatctgccctccttggcctcccaaagtgctgagattccaggcgtgagccactgcactggcctgtagtgattgtt

SEQ ID NO: 129600 - DNA, 1050 bp, Homo sapiens
gaggctgatttggggacaggtcgagaggagcagggaaggacagcagctccttctcagaagctgcagggagtacaagttgccacctgctactgtgtctggttgggcccggttttttccggactggctctttttttttttttttttttttaacatctacccctaggtgtcagcatgactctgtccaggatttaaatggctgccctctgggtgccttcccagggaggggagagttcaatgcttaggggattcagagtgggggtcctcatcaggttccgcgaggcaaagaaaaatggacatccccacagcagggtggtttttctctcttcttcccaagtcactctccatcgaaagagaattctgaaccagcactcgcagctccaggagaaggaggagctggtgggggccagggggaggtgggggagatgccaggggccttggggccttccagggatggtctgttatagtctgacctgcagaatacctgaattcaccacaccctgagagtctctcctctgagaaaagtaaatgtaaacggcacccctttggagggccagctccctctctctcgcctctatctgacatggatgcagagaagtggctccggccaagccacactttcagaagactcagtgtgatgctgaacaacgtgtttctcataattcctgccttgtgtccctgagatcggatttcttacagaattcttatctggaaaagcgtaaagataggtgatgtgagtccattcggaggcatcccagtccatgttttcattaatcgaacatggtaaagtacacggaagggtcttgttcctgccctgtcaaagtaagctgcacacatgtgggaggacacatgcaagtcggagggaatcatgcctcacgacagggtcattctcagggtattgcaattgtggatgaagatggaagctggatgtagatggccaccagagctaaactggagagcgcgtatcctgtttccatgcatggggaagattgatgtgttctctgtgatgcagcagtgtgagttacttgtctgtttctgcattaactcaaattc

SEQ ID NO: 129601 - DNA, 1433 bp, Homo sapiens
cggacgtggtaacgagtgcggctcgccccgccgggagctgattggctgcgcggggcggctccgagggctcggccgtaggagccccgcgcactccagccctgcagcctccggagtcagtgccgcgcgcccgccgccccgcgccttcctgctcgccgcacctccgggagccggggcgcacccagcccgcagcgccgcctccccgcccgcgccgcctccgaccgcaggccgagggccgccactggccggggggaccgggcagcagcttgcggccgcggagccgggcaacgctggggactgcgccttttgtccccggaggtccctggaagtttgcggcaggacgcgcgcggggaggcggcggaggcagccccgacgtcgcggagaacagggcgcagagccggcatgggcatcgggcgcagcgaggggggccgccgcggggcagccctgggcgtgctgctggcgctgggcgcggcgcttctggccgtgggctcggccagcgagtacgactacgtgagcttccagtcggacatcggcccgtaccagagcgggcgcttctacaccaagccacctcagtgcgtggacatccccgcggacctgcggctgtgccacaacgtgggctacaagaagatggtgctgcccaacctgctggagcacgagaccatggcggaggtgaagcagcaggccagcagctgggtgcccctgctcaacaagaactgccacgccggcacccaggtcttcctctgctcgctcttcgcgcccgtctgcctggaccggcccatctacccgtgtcgctggctctgcgaggccgtgcgcgactcgtgcgagccggtcatgcagttcttcggcttctactggcccgagatgcttaagtgtgacaagttccccgagggggacgtctgcatcgccatgacgccgcccaatgccaccgaagcctccaagccccaaggtaaggctgcctcctcccacgtgcgcgagccgccccctccatcccccggccggagctgcaggagaacccgcgccaccctacgcccgcccgccgctgggtcccggtgctggggactgagggcccgaggttgctcgcatgctgtgcacgtgattcctaagcgcgtctggtctgtcccaggtatcgctcagcgcccctcgcgacccaggtgcacggcggggctggcccgggagcggcagctctgcgccttggcctcgcagggactcgctgtggtccccggagccgctcttcctgggatccaacttcgcctttcccatacctgaaacaaagccttgcgctttaaataacaggggagcttccctctcctctaggaggactccgagtccctatcgaagtttttaacctctgagacgggaggaaaaaacaaaaacccaaagcgtagaaagttcagaaaggccgagagaatgcttggagcagcttttgtttattttca

SEQ ID NO: 129602 - DNA, 1024 bp, Homo sapiens
cgggtacgcaacctggctccccacgcctgctctggcgagggagagagactcaccggggacgggaagggtgtgggcgacaaccgggcctttgagggtcccgcagttctggggaggtccaggcacagaaggggccttggccaaacgtgtaagaagagagccactaagcaagacaggtgtttggagcaggaagaataatataggccgatcgccggggttgacgaccttatggaactttgttgcccggtgccgggaatctggatccagcagtgttcccctgctgcactcccccaaatccccaccccgggttattgtcggcagcgatgaggagccaattcctgaggctccaggtcgtctcagtcaccaggttgtaaactatatcctcctacctctccgcgcaagataaatcatcatcattctcgtgactggtgtttgctgcctctgtgctggccgcactgtttggctgaaagggtttattaggtgcatggccaggcggtgcgttcaggctttcttggaaccttaaagacgtcgggcgttagataggcctggacaggaaaatgtctcagaacaaggccttaaacttgtcacattcactgggagccacctgttttgtcttgcatatcaaaatggtcatcaggatataggtcctttgggcaacattgcaggcaaaaatggaagaatgggatttgcttccccttcagacctagcaaaactttaaaaaaaaaaaaaaaatcattgtatcttgttgtagaggtaatggagtgtgtgcgtgcctgcctgtgtttttgtgtgcccacatatgtacattcaaccaaagattcttttggtcttgacccatgttatgtagattgtgtttcccgttcagggatcaatttctggttagctggaagcaggttttgtggctctctcctctgtgacagggaggacgagggcctgagaggtgattaggcattccttgggtgtgggactgagagatgctggtcatgggataagtgggtgtggatgagtctgtgtagagaaatgtgta

SEQ ID NO: 129603 - DNA, 1054 bp, Homo sapiens
aacatcacaattgatgtgttttacatgttaagattgacatggaatctggctgggcccggtggctcacgcctgtaatcccagcactctgggaggccgtggcgggtgcatcacttgaggtcgggaattcaagaccagcttggccaacatggtgaaaccccatctctactaaaaatacaaaaattagtcaggcatggtggcgggcacctgtaatccccgctactcaggaggctgaagtagaagaatttcttgaacctgggaggcggaggttgcagtgagccgagatcatgccattgtactccagcctgggcgacagagcaagactcttgtctcaaaaaataaatcaaataaaaagatatacatggaatcaatcaaatgttttatttttaagcctcttacggaaactatgacatacaatttatgtacttcaaaatcagaatataaagtattctttttttaccacaattatttggacattaaagattcctttgctttaaggttttaaagcaacacttacacctcatatatttgagctaaatgtgtatacacagaatcagacattagccttccactctgtgtgtggcagagcctttattttgtaatctaagtgcaaaagcacaatgtagttactgtgctccactgattcttgtcaggaaattgatgtttctaaattctggagtccttttacctctttgactctgtatagcccagaactgcttgtggtactgagtactatatggaatgttacatggcactcttcaattgtgcctttgaatttcttttttctttttaaatgtttgggttaaaacactagcttatgctttaaaccactagaaaagctttgattgtctgtgtatgtgtgttgagattaaatttaaattacaggtttaaactttccttgctttgatgaaaaattgaaaggtttctgtttctctactacttaccctagaaattttactgattgctctgctattggagctgattttccttttgtgagaacatcacacttggcaacataatagagaaagtgactaatatgcaagtgttttgtattatt

SEQ ID NO: 129604 - DNA, 1072 bp, Homo sapiens
aacaaaacaaaaaaaaaacttgcccagcaaagttatgcttgaaccagataaaagaatgatgttgccgtttctttgctcgtaacctgtactcggagaaaggagacggaaagctgttctgaaggaatcctttctttgaaaccagccatgcaggcatttttctgagtgtcttccctagtattactggactggagtgaagggagactgagtctccagtttccaattctgcaggtgaactgagaaggaaattagaagattgagaggccttagttgggcacctttatgggctacttccttctattcattattttaggatgattgacaaactctgatgtgaagatagtgcctaagggggtttttttgctcataaagaccaagcacagctaaaattctttgaatgctgaaaataggagaatgatacatgcattgcttcaggtaattagatgaaaaaaacaaatcttttatttagaaataatactcctaatttattacgtaagaaccatgcagattgctctttgaataatcttacgctcttttgaagaagcataaaacatgagatttttttatccccaaaaaatatttgaataaagtgtttaaattacttttcttcaattagaaaattctttatatgaaacaggtagagttttaaattctaaatcagtttataccaaagcatctaaattgtgacatcctaatttgttaagtttggtctgtatgttatataagccacacttaaatcattgcttaatttccaactttatttccatacacttcttttttccctttaagttgtgatcacatttgtgactttatcatttgctaatagtgtgaatttaaggaaatatatagtaatttaaagaactggatcaaagcctcttttgaacattagagccagaaaaaagttatgatgacttcgagcctgaaataaaacatgtaactctttgatttgggatgtagctattaagatttattttcttctagcttatctgtctcagaattgcctttattaaagctggagatttggcaatttccagaagttcctttgtatcctatctggtttttgtctacatttgct

SEQ ID NO: 129605 - DNA, 1422 bp, Homo sapiens
taaatttttttaaaaacctaggtcacataatcccaggccttccagctgataataatttcagcagttttgttatactctgcaacaatagttcttaaactttcaggggtcatgaaccctttcccaagaaaaaagttttcatataatttcagggtatttttaaatccctgaattcattacctccatggattctcagttaagaactccctagttcaacaaataaagcatcgttttcagaatttatttgttttgttttcaaaacataagttatcagtgtttgggaaggaactacatgtggactactataattacatttcttaaaattttcagcaaattggagaaagcaaacttaagtaggaaaaatgtttaataattgaaaaataaagcaaactgaaagcaaagtctgcagatcacaccctccaccttgccaagtccccctttgtgtgttgtgtcctgtagtgtgttttcttaacagccatgctgtttagattgaaattaccatttatgaagacagaggcatgagcagtggaagataaaccgaagaattaaaggtaaatatgaaatgatatggcttgtatgcagcttttgcaagtttagaggatgcatgaatattcttccccgcatggtaaataaatcattaaatcacgcagttaaataacagtatatttgctgtgttagcttaagctagtcactgtattagcttgatatttaaaatgtgtattcggcccaagttctatttggtgatagagaatttaattctgattttttttcctgctgtattgtgttcagactggttttgttgttactttggtgggggaatgggggatggcagttacttggcttgttttaatatttcaaaactatcctagacatataaatacttgggttttgcatataagaatgagttcagagatgtctacctatatgacaaatggctttaataagcaaaggaacatttcagaggggagtggggagattctgaatatttcatttattatgtttaagtggcttcagacccctgtggaagaaaccttacctactgagtagaaacataaatttcattcctttgtttaaagtattaatgtccttaaatatccagatgctgccctttaatgagtaagaaacaaattaatactactaagaatctctaggcagagtcacgttgaagccctaagtactttagcatagccttctaagtgacaggaagtagcacttcactatttctgccaattttagttacgtggtcttcctacagaaagtgttctgctgctgcgcttttctagttgactgtgcttataggtatctgtcactaattaatagacagcacagacacagaatgtaccaaagcagacacatgtcttcctagggcaacatcaataacagctaccattttgagggcacgtactatgtgcctggtattgtaca

SEQ ID NO: 129606 - DNA, 2115 bp, Homo sapiens
gtgataataaaaacagctaatgtttgttggcacatctgtgccagcactattctaaatgcttaattttaatcatcacaacaaccctatgaggtagatattgttatccctgtttttcagatgaggaagccgaggcagagagaacttaagttgctggcccaaggacaaacagctagtagacagcagtcaaggcagcgtggctccatggtgatgtgcttggtcagagatctgaatatataggacttagatttgtagactattgagctgtagactcatttagacaaatggtaccaagatattttagtagataaaattctaggttagtagaacatagaccacatgttataagctgatatcagttgatggaagaaaaatggttttacaagttattttcaggatctctatcaaacctttacttctccctctaattacagatcccacttccagccgggcccctcatgtatccactggccgaccgcagagtgtccctacctcctctccagagcatcattcctttctatctgctgccagagccacggtgccatttactccaaggactcactttctaaaattccacacctggagtgacctctagtcgctcagcatccactttgtgtctccaaattgtgtaggactctgtaatcttttgattagtttctgagaaaacacaatgaagcacttcacttttttttattcaaagccatttaataaaacacagttggtcagcccagtgcaaagcttgttatctgccaccagtacataccattggttctcttcattccttgggccagcttctcaggtggctttagacctcaacaagccgtatcttcaccagtgttctatcttgttcccctaaattaataaaatgtttttctccaggattttggtgagggttggctgtggctgtcgttttgcacctcccagatttcaaagaattactggttttaccatgactcaaatcttaagatctgtttctactattcagttcctcaaactgaagcttattgaaaaaaaaatgtataatgttatttgttttattatagcaattatgcctaattaaagcagtatttaatgcaatttccagttatttctttggagaattttatgtcattgttccattaccttgaatgttggaaagatatgatacgtgctgcttgttcatcacaaaaatcagtaagcacaataaagtggatgccaaaccatcagacacataaatgttcccgctgtgtccctggatatggaataagcaggtataaaaaatattttaattatagttttgttataaatataacttatgagaaaaaaatttgataggaataatactgtatattactaatttttaactatccctaaggcaaaccttatgacccacagaattttctcatatacagtattcagtgcacagaaatcttatgattggctcaagtacagtaagttacttctcagtaaaactctcaagtctgagtccatatttgtagctctgcttttggctgtacgttcctaggatcggggctgcttatgcctttcgtttatccttggggtttgagagcgctgtatttgggagagagtttaaaaatacattaggagagagaaaccattaaaagtttcactgtcagatatattgtaggtgctaatactggatttcgtctcagatttaatttcttttatgggtctgttagtcattcaacaaatcccataagtatgtgttaatattttaattgtgtaaaactcatttgttactttacagcctgtaatagtgtgtctgcattttcaacctgttgcaataactttgctgaaatattaacacattaataaaacttttcttaaacaagttgtctctgtgtcatatttggtgggatttggtagtaaatgatggtaaagtggtaaatgataggacactaaatttgtcagataatactagaattgtagtagtgtaccgtacaatgtagcttagtgttttaaaataaacatcttacatttctatgtcacacctctcaatttcttacctgctttatcttacaacagcaggtatattataagtaaaaattaaggagtagtcgttgacaaagcctgctctcttccccggacagcatgagcttcaccactccctccaccttc

SEQ ID NO: 129607 - DNA, 1112 bp, Homo sapiens
attacaggcgtgagcccggccagctcctaataatgttaagtgcttgctaggagtcaagcgctgtgctgagcgcaggggcttcccacgtcattgcgtccccagtgcttagtgccaggcactgagcagaggcgcgattcgtatttgaactaaaacgaaccccgtccctgaggaacaagacctctactgggaagtcaaagaaatgaatagtgattgtatggtgtgatgggtgctcagctcttggtggacagaagtaagggggaggcttgtttgagaaacggatacctgacctaagccttggaggaagaggcagacactggaaaactagagtccctgcgttctctcaccacttgctaaagggcctctacaaccccaggaaacctcaataaacctttcctttctccagatagatgtctgttcttgcagataattagaaaacgcattgcagagtattggttctttccctctcattaggttcctggtttcagagaagatgaccgaagaagtggatttcctgggacaggactctgatgggggtagtgaggaagtggtcctaactcctgcagagctcattgaaagattggagcaggtaagcatcccagatcgaatccctttgctccagtcagcctttttatttagttcaactgtgaatatcagggatcacaagatgaggaaacggaatttggggcttactttagaacagggactggatcttaccatctacatggaaacgggaagcaagaaggacatcctctgttagagacctcatcatatcaaacacagcatccccaagtggggtcagtaagggacagctttgggcacattcagtgaacagttcacagagcaaggatccacgtgatattttcagggactgtagaggtccctgaacttctttaccttagtcccttgaacatctgctgtttccctggagaatgcctgtttagcaagaaaatgctgaaatgcctgtaagggaaaactggtcatatttttcctttttctcacatgttttttcttgagtcgtctgctctccatatgtccactgcttatctaaaatcctttctgaaatatttctcctttaagttgtaatagctatgacttactgcatatttcccatg

SEQ ID NO: 129608 - DNA, 1152 bp, Homo sapiens
ccttctcttgtagcctccccacctggcccctgcaaacatttgagtttgtggtccctggcctagatgatctgagcataaatcattgtcaacttcagagaagctgtaaaatgtggatatttcagtttctcagctggtgttttaatactgctttttagacccaatggaagtttcgtctgtgtgctgtactatctcccttacaatcagattggagttcttttggaagcctctggctgaacagattctattcaaatggtcattttctaaaagtaaatgactattgtttgtactttatacaatgataaaatgaaaactcacatgatatttttgttttccttggactgaaacatagtctgggtcctcaacgttgccggtgatgatggttgaacatcatgttttttataaaccttaatttctcatttaataggaagaaaatctcaggagagccaaaagggaggacctgaaggtcagcatccaccaaatggagatggagaggatccgctacgtcctcagcagctacttgcggtgtcgcctcatgaaggtttgacgtggagatacctggagggattgagacagcacagtctgtaatgcagactgaatgtcctggggaaaacttgggctggggcccaggagggtccaggacctgaagatgctgctaagagcccaatatccatgtagctaaactgtaaggagagcgagagattgctccacagaagcacagaggaacgtgtgtggcccactgcggggacaccgcacacatttttagtctgttcacctgccgagtgagtggttcccccttgcgttacagcatggcagtgctaaagggagagttgttggcattggtcaatagtgaatgctgactagaggagaacttgtttccaaaattattttgtctgtcagatggccaacgtcagtgtcaaatgaaccaggatgacttacattcacctacagctttgtggctatctaacttacaaaaatgaagttgcaggccaggcgtggtggctcacacctgtaatcccagcactttgggaggctaggcgggtggatcacctgaggtcaggagtttgagaccagcctgaccaacaaggtgaaaccccatttctactaaaaataaaaaaattagccaggcgtggcggcaggcgcctgtagtcccag

SEQ ID NO: 129609 - DNA, 1032 bp, Homo sapiens
cactgcagagcctacaccaacattgcccctgcttagaggggctggccatctcttcgtcacaggtcccagaatgcacagggctcgcctagctggaggggagggctgaaacaggaggctagggagacctccagtgagtccctgtggcctcagaagagggagcaggttggagggtgtggagagaggagggaggggagccggggaaggggagcttggccggagcccctcctcgggcttcttcgcaccagcccctgagggctgccgagcaaggaaagggaggtataggcagagcccttaccgtcggatcaacccaccgggggccctggcttacaggataaagcccatgttcctcagtgtttcacagtgcgccagatccaagcaagacctcctcaggcaaaattgccataccaaatcaaacgagctccagtacacccgagccctggaaattcatctctgcccagcctgtgctggggctggggaccacacagccacccctgcggtggtggaacagggtcttagtccctttgggctgctcacagttatggagactgggaagtccaggatccaggcccccacagactcagtgtctgccaagagcctgttcctcatagatggcgccttccatatgtcctcacagagaagggaaggggcaagcagactctcaggctacttttataagatcactaatcctagtctctgtgtgtcctagtcccctccctcccccccaccttttgatttttgttttttgtttgctttttattttttgagacaaggtcttgctcagttgccccagctggagtagattgacgctgtcatagctcactgcagccttgaactcctgggctcaagcgatcctcccacctcagcttcccaagtagctggaactacaggcatgtgccaccatgcttggctattatttttaaaatttttttgtggagacagaatcttgccatgttgcgtaggctggtgtcaaactcctggcctcaattgatcctccagcctcagcctctcaaaatgctgagatcacaggcataa

SEQ ID NO: 129610 - DNA, 1228 bp, Homo sapiens
ggagttcgagaccaaccgaccaacatggtgaaaccccatctttactaaaaatacaaaataattagccgggtgttggtggtgtgcacctgtaatcccagctactcaggaggccggggcaggagaatcgcttgaacctgggagcaggaggttgcagtgagccgaggtcgtgccattgcactccagcctgggtgacagtgagactttgtctcaaaaaaaaaaacaaaaaacaaaaaaaaaacaaactaggcataaactcatgaggtcaggagatcaagaccatcctggctactaaaccccatctctactaaacccatctctactaaaaatacaaaaaattagccaggcatggtggcgggcccatctactcaggaggctgaggcaggagaatggtgtgaacccgggaggtggagcttgcagtgagccaagatcgtgccattgcactctagcctgggcgacagagcgagactccatttccaaaaaaaacacactaggcgtaaacaagaatgaagacctggaaccgtagagaaaatactagaaacccctcgtatcacgttgtgcctgaggacaataataaagtagtttactaggcatcagacattcctcagcagtgctgtgggtcacgggcgtgaagcggagctcgaggcaggattgcttgtgttgctgcatgtcctgtctgctgttttagcccgtgtcagtagatggggccattgtactgtttgttctgcacacttggcggagcagcagaggctctcagcacgccttttccctttgtagtattttctgagctaaggaaagtcaggcagaagtagttcataagaaggcatcactgcctgtgatcggggctgcatttagccctgacctgataatggtaggagagttcatttagcctttctgctgcgaagattgtaaatagattaaagaaaacagctgtggccttctcccgtcatacatcattagactgtgtaaactaacattttagaacctctaatattggacttaaaaccaatttctgtcgtgcttaattgaaaatcacaactaaaccaataaaccattattaaatttccattctgcagcagaaggcacctctggacggctcccggcttgtagtttaatgaagtatgtgctccctgctgttaacccgcagccctccccaactctccagcagctttgccaagtcagcctccgggccatctggctgtccttggccaaggcactgttaacggagtga

SEQ ID NO: 129611 - DNA, 1034 bp, Homo sapiens
acagtgtgcttcctaagccttaatgtgcatacccatcgcctggagctcgccttaagatgtaggttctgcctgaagcccaagttcatttagtatgtcatggttaattcagagtaaaatcaagagttagtacttgatttatgcttgttatataaagaaagagacaacttcactgtatgatcattttgtcacttttcaaaagcatttaattcccattcaattgaaaatgtttcaagaacaaacctgtttggtcattttattgatattgcacatttgtatatgaataaatttttgcaaattaaaaaaaaaaaagatgtaggttctgaaacagggtgaggtccaggatcctgcctttctaaggagctcccatgttgtgcagttgctgctggcccggggaccacattgaatgacggctctacgtcctcatgcctccagctgctgccctgtacatgtccaactgcacggagcactttacatcctctaaaaccacagtaaattgctccatttcctaaattacctcttcaagagaagactggttttgatgtcatttttaaataaaggagaagttgaatttcaaaaccaagtggaacaggaaatgatgtgacttggttgacattgattttaacatttggttcatggtgagtgttttgctttattgttaaaaactcgccactaaaagcatgacagaacattttatcaaatgatggcgtcatcctttaccgtaagtttgcccctagcaagacagctcttcctgagacgtgcttgcaggccgctatgtgggttttcccaccgcagtcatcatccgtcatctgtgaccttgctgcatttactccatgctcacaccccagcagcccgcctggctttggcatcgccctcagaggcatcaaacttcccctgctgcaatgtacaagagttagccaggaagcttgcagagtgctttggttttgttttgtttttttgacatgtcgccctggctggagtacagtggtacaatctcagctcactgcaacctccgcctcctgggttcaagcgattct

SEQ ID NO: 129612 - DNA, 1030 bp, Homo sapiens
gtttgagtttccttctagactatgtgcttcttggctacggtcttaggtgactgggactgaggctttcacagaatagagatggaggtgttcactgattgaaaacaggtctcattcttgctcttgtatcttgcttccttcccctcccagtgggctaccttgagaatggagcgaggagccaaggagaagaaccaccagctttacaagccctacaccaacggtaagatgggggtgtgatccttgtcctgagaggtccatttgaacagtgttccccagtgcttctggtgccacacacgctcttccctgcattagtgcaggatgtgtgctctgagtatgtctcacgtgctctcccccagcgtgctgcttgacagggacacattcttttgcaggaatcattgcaaaggatcccacttcactagaagaagagatcaaagagattcgtcgaagtggtagtagtaaggctctggacaacactccagagttcgagctctctgacattttctacttttgccggaaaggaatggagaccattatggatgatgaggtgacaaagagattctcagcagaagaactggagtcctggaacctgctgagcagaaccaattataacttccagtacatcagccttcggctcacggtcctgtgggggttaggagtgctgattcggtactgctttctgctgccgctcaggtgaggcagggcctgcgggagtggggctcgctgctgccaccccacgtggtgcacagcccacctgcctgctctgctgtgtattcccgttttagaaaggaggagggaatgactgtcgttagccaggccacgtgactctttggagggatacactggtgattctcctttagaggcccttggattctctgcatatcagacagaaatagttggatttcttaaagacagcttgcttctctagatgacagcaaacacagggacagggaacattgtgtgctttctgccactccttcctggacatggctcattctttcctgaagcttgcctctcaggtacaggggcagtattg

SEQ ID NO: 129613 - DNA, 2001 bp, Homo sapiens
gagcatttgactgtgtggataaagtgatgagacaatacagtttttaaaatggtttgaaatgtagggaggttttgtctgtttgtgtgaagaatattttgctccctttgggaagttctggggtttagaaacctttcttctgcctgggcgggtgaggaggttggcctctggccttggacctgcctctggatgttgactgggggaacggagttcagcccgcctgtggtctgcggatgccggattctaggctgtgaattctccacccactgatttgggtggatgtaagtgagtctccctgtcccctctttctctcctcatgtgtgaacataaaggtgctcatgcatcacaggactttcctgtaggtgctgatgtctatacaagcactttgctgttataaaggactgctgagctgttgaagtcagtaactctttctgtcttcctgtatgtaaaataaaacccagaatccttgtcctgttattgcaggtttaaggagttcatgagtaaacatgttcacttaatgtgttaccggatctgcgtgcgagcgctgacagccatcatcacctaccatgacaggtgagagcgctttgtattgataggaagggagatggcgctgcaggaaacaccacccacctatacttagccaaatgggaagacacttctgagcttttagttagagcagatgaagcatgtgaggtgagaggtgtgttacatgaactgtttcacactaattttggttgctttgcatacattttaaacccagggaaaacagaccaagaaatggtggcatctgtgtggccaatcatacctcaccgatcgatgtgatcatcttggccagcgatggctattatgccatggtaagagctctttccggtgcgttcttgaggcaagacttcctgctttagagtggtcagggctaggaggctcctggacccttcacataaacacatttatgcgtgggccaggcccccaccttactgtcactgtgggggctctgtgggactgtgataggagataccctgggcagagtgattggtgagtgtggctggagaggatgccaagggcagtcaggcagaccagcaggggcagagggagttgctggcaaggactgtgtccagggcatctgagaatctgcccagggaggggcagttttacacagggaattgcgctactttagtattttagtattttgtcttaggggtttcagttatgtttttaattacctatttctagtattactgattaaaaggagaagtttaagatttggggagtcttggtagtggtttcttggcagtgagcaaccttcagccggcaagcgttagaagtgagaagttggactgcttattttgtgagatgtggttcttcctagagtggggagattcgtgtgaagatggcttcactactaatgagtcctgtgcctgcgcttaggtgggtcaagtgcacgggggactcatgggtgtgattcagagagccatggtgaaggcctgcccacacgtctggtttgagcgctcggaagtgaaggatcgccacctggtggctaagaggtaatggacagaacactgctgttctgcttggccagttagaatgctgaaaaggtttcagggtagttatccctccacagtgcagttacgtgccttctatcataagcctatactgctttcataataattttttcctaaaacatgaaattttaaaagtggccgggtgtggtggctcatgcctgtaatcccagcagtttgggaggccgaggtgggcggatcacttgaggtcaggagtttgagactagcctgaccaacatggtgaaaatacaaaatactaaaaatgcaaaaattattgacgggcatctgtaatcccagctactagggagactgaggcaggagaatagtttgaaccagggtgacagaggttgcagtgagctgagatcgcgccattgcattccagcctgggcgatagaatgagactctgtcttaaaaaaaaaagtatagaaaccctagtattatttaccaa

SEQ ID NO: 129614 - DNA, 1047 bp, Homo sapiens
aaagttggtgtttgtgtaagaaaatatctttatttgggggaggtacactagatgaatgacaggatgctgagaggggacaggtggagcaagtgggaaacgttggcggtggttgaatcagggaatgggtacatgggagtgcatgatccttttctccctggttttggagatgtttgaaaactttatatacctatgagtaagacctgaaactaatcaaggagggaagacatttgcttgaggcaggctgtcaggggagccttccttactgatctgtagcagaggccgggttcctcgggggagatcagtgttgctcacagtcagaaccggccacatggagaggggcttccacagtactcatgcaaggtcagggagcagcaccccagtaccagcacggcccagtggagtcactcacagcagtcactgtggactcgcaaacgttgtgagaactactcatgtcttacctccagctttccattgttttcagtatgaccctcaatttggcgatgccttctggaacagcagcaaatacgggatggtgacgtacctgctgcgaatgatgaccagctgggccattgtctgcagcgtgtggtacctgcctcccatgactagagaggtgagtgcctgccccaggcaggtctgcgcctgctctgtgtaacgtcaagccggggctgagtggtctcatttgttctttcttacaggcagatgaagatgctgtccagtttgcgaatagggtgaaatctgccattgccaggcagggaggacttgtggacctgctgtggtaagtttagagccaggccttttcagctgagtttctgcagcagatgctgtgtcattgacttcacttacatgtcattccccgtggtgtggagaattaaacttgtcagctctagagagagcagtttgactctccccgaattccaacccagaagtgccctgtgcttccttgaccttggggaacctggatcagggatgcctggactgaggcagttgattctgtgtacctttctggggtttgaaccagtcttccaggacacctggacagtgcccatc

SEQ ID NO: 129615 - DNA, 1058 bp, Homo sapiens
cgctgtgcgggctgagtggttggggagatgtggccatggtcttgtgctagagatggcggtacaagagtctgttatgcaagcccgtgtgccagggatgtgctgggggcggccacccgctctccaggaaaggcacagctgaggcactgtggctggcttcggcctcaacatcgcccccagccttggagctctgcagacatgataggaaggaaactgtcatctgcaggggctttcagcaaaatgaagggttagatttttatgctgctgctgatggggttactaaagggaggggaagaggccaggtgggccgctgactgggccatggggagaacgtgtgttcgtactccaggctaaccctgaactccccatgtgatgcgcgctttgttgaatgtgtgtctcggtttccccatctgtaatatgagtcggggggaatggtggtgattcctacctcacagggctgttgtggggattaaagtgctgcgggtgagtgaaggacacatcacgttcagtgtttcaagtacaggcccacaaaacggggcacggcaggcctgagctcagagctgctgcactgggctttggatttgttcttgtgagtaaataaaactggctggtgaatgaactgggggacttctccctttactttctcccctggctgtggccctgagtagcaggcttctcgtgaggattcccgttctcttctgggagcatggccctggggctgcggagaagccaactgactgctggagcgaggaaccctgcagctcagaaggtgaacagctcgtctcagatgcttgcagatctttggttaatttagaatttccagcacagacgtggatttctccagagacggggtgtgtgcgggtcgctgatgtgaggcctaggggaagcaatgagtaaactccagggtgggggaggagcaagggcccggggagggctgcagaggggccggggcggggcagggcctgtgctgcatggtggcttctgcaggggagggacaggggagggctgcagaggggcagggtgggcagggcatgtgctgcatggcagcttctgcacagcca

SEQ ID NO: 129616 - DNA, 1021 bp, Homo sapiens
taatggtcttttgataaataatcacttgtaagtcaataaatttttattaaacagtgtggctctttgatttattaaaatccgaccgtgtttgtctgggagaaaagggatgccgaattgaagtggaggttttcatacatcttcctgacgcggagcagtcaccacacactccagagaaaaacaattgcattttaacagaaacaaaacggccgagtttggaacttgggcccaggcaaactttatctccgtcagcctgaggcttactctgcagggatcagctgcaggctggagggcgccgagttgagaactttgtgttggcctccaagagtgcccaggtgccagggctggatgcctctgctgggctgcgttctgagatggcacgtaccggccctctcccagctggggatgcaccctggggcaggcaccctttgtcagcagacatctgtcatcaacaagagaagctcgtgtggcaggaccctttagcttccttcctggccaaatcgccaccagagtcacctgtggcaggaagatgtggcaggagacagtcttttgcagcaatcgggctgtgtggattatttcttacagtgtgggccaatagctgaagactggaaatgcctttttgtgagattttcattggcatagagtttgctgtaaagagtttggcactttatcgagacaaatatggccccaaacagatggtcttacatagatcaacccaaccactgacgatacaaccagaattcttacccaggggaagttgtaggaaagggaaaacacttttttttttattgatcattcttgggtgtttcttgcagagggggatttggcagggtcataggacaatagtggagggaaggtcagcagataaacaagtgaacgaaggtctctggttttcctaggcagaggaccctgcggccttccgcagtgtttgtgtccctgggtacttgagattagggagtggtgatgactcttaatgagcatgctgccttcgagcatctgtttaacaaagcacatcttgcactgc

SEQ ID NO: 129617 - DNA, 1118 bp, Homo sapiens
ctacgagtccaggggttaatggcgactgggggagagggcggaggtgcagggtgcccgggaggaggcccctcctcgtcctctgccccccggggcctggcgggtgccgggaggtggctggggaggacccgtactcactgttgctgcactgccgcccgcctcgccagtcttggcccgtgtccgcccagcagttccgggtccgggtcgggtactcgttcccagccttggaaaaattccctacctgggggctgtagtagaccccctgcgagctgagccccccaaagcctgccacgtgggggtagccggagaggaggctgttgttcggcgcagccacgggcctgctcaggatgtccgtgatcccgtggggggttccggcggccagctgggggcccagccctggggggctgagcttgtagaaggagttctgcacagagtactggcacaccggggccttcatctccggaaactgagccagcggcgtgttgttcagcaggaacgtcccctgcaggttggactccatgatctcccagtcaggacagggaaggcttctccaggcccctaaaacccaagagcccactctctagccccaaatctcatggcaggcctggaggcttaggaccgtctccgagctcctgactgcctcccacctaaggcatgggccaggccctggcccaggaaccggcacccgatcagctgctcggaagtcaggtgctcggggcaggtgggaggcctccccagggctcctggcctctctccttgccctggccggacagggtggccccctaagcctcagctcagaccccctttctgcctctgagtcgggggaccctccatgagaagttttaagttcagagaaggaacatttccctgataaagatacggcccattagaatacaggccggagactggctgagccgccggagccgcgccgccattggtcggggcgcacacgggcctcacattggcttttcctagacaaattgcactttgaaagattgactgtacaatcagccagggtgtgtgtgtgtgtgtgtgcgcgcgcgcgcgcgcgcgcgcgtgtgtgtgtgtgtgtatgcgcgcgcgcgcgagagagagacagagaattagctctagaagcccta

SEQ ID NO: 129618 - DNA, 1044 bp, Homo sapiens
ggctggggcagcctgaaggtgttgttgaaagatctttgctttacttgtttgcatctaattttgtttatttctttaccaataaagatgctttctcctcaggggcattatgactgtgacctgggtggagcctgtctacagggtccccaaggttctctcagggctcaggggcaacacccagggctgcctgtagacgcccctccagccctgactcctacagggagcccccctctgagatgttcctaattcctagcccctggcaagacgcgagctcctcctcttctttcagagtctgtggtggctgctctgaaaagcatttaagagcctggaaggggagatgggctgtgcctcgaccacaaaccgcgccaaaaggaacctgctacaagatacaatgctttggaaactcgggaggaggagagaaaactgcatcggagggaatcaagggacgatctgcagggaggtgcctttaagttggctgtaaggggcactccagagtacagggagaagagacgcgggagggttcccaggcggagagtaccgctgatgacaacgctgcccgacagtgcggaaagcatgaggtcagctcggaccctcggctaccaagtggacccagaagggccgagcaaggctccgccagggtgtttaaagggtctggaaagcaccgaggagcaatggacggctctgagcgggaggacccttgcagtgagtgatctggaaaggaaggaagcctggagaccgcaagatcaattcggcaactcctgcgggaaggcccaggcccggaagtgatggagaccctcagggatgcgcagcgagcaggggcagcagtggttgggactggagtgaccacacccacaagaggggaaggtcggaccccagccaggcctcatctaagaaccatgcaggcaggagcgcatttcatccccatagttatcccgtgaggtcactacaggctacagataaggacactgaggcacagagagattgatttactcacctctccgtagctagacagctgcggactagggcaggaagccaggcaagctggcc

SEQ ID NO: 129619 - DNA, 3345 bp, Homo sapiens
ccgcctataatgtcaattccatgaatatgaacaccttgaatgccatgaacagctatcgaatgacacagcccatgatgaacagcagttaccatagtaaccctgcctacatgaaccagacagcacagtatcctatgcagatgcagatgggaatgatggggagccaggcctatacccagcagcctatgcagcctaaccctcatgggaacatgatgtacacaggcccctcccatcacagctacatgaacgctgctggcgtgcccaagcagtcactcaacggaccttacatgagaagatgagcaagatgaacttgcaatcaaaaacttaaatatatataaataaaggaaccttttatactgacaaaccagagaaaaatggacctttttccagttaaaatattgctgtagatttagaggaatttttctttggtttattttattttttagaaaacctgatcttctctttttttgggttcattttgttctgggttttggttttcttcacaatcttgaacattttacagtagaactcatctaaaaatggatttggggatggggaaacatgcacaaaatcttttcataattaaaaagagccttactttctttacataccacatggacagaatttgtgtaaaagtgaattatctttattttaaaatgtatgtttcccctcactgtttgcagctcccaatgttgtcatttttaaatgttatatacatctcaagggttaaccagaccctttcctccaaacccaacctttcatttcctacttcattccagcaggaggcacttaggggagactcggatggggacatggagaacaacccaagctccttaaacttattattattgttaatattattattattattattaataaagtgaggcaggaaaatgcttctccttttaaaatcccctccactcctcacacacacacacctcttgaaacccttccccaagaatgtttctttatagacggacttcattgaaatctttgttgttcttgaatcaagtgtaatataatttttttcttcttttttaaaatattcccactcagcactcagagacacaaaaatactgtaagtctcaattaacagcagaatctcagagaaaagctgtttgcaatccaaatccagcctttggaggaatagagatggtcaattaacaatcaaaaagaggagattaacctcttgtttttttaccacctggtgaatcagccataacgcacacacacgccacccagcctcttgtttctagtatgtactttgaaatgctaactgagggtcttgatgcttgagcctttgactgataaaactcaaatagcagtccccagtgatttgcctcttaggttctttcttaaattgttggtggatgactgtacattttagtgatttgaaaaataactgacaaaccattgaaacagtttattttatgttggaagagatggcgcagatgtgtgtcagaagggagatcacggtgtgagtttcgtagctatttaagtgatacatacctctagtttttgtatgtcttttgagatcctgagttcatcccctgtgaatcagagtgcacaagcacctctcctgtgagtggctaatgagaagagggacagaccgaccaccagcacagtagggcagatctggacagcagaatgttataacgcaagttcatgtgttgctcccaactccattctcttttctctcgtgcaaccagtttgcccattctcttcctattacttgctccagggataggtaaaaaaaaaaaaaaaaaaaaaaaaaatatatatatatatatatacacacacacacacacacacacacacacatatatatatatatatattccatcattagaagatggaaactattataccacttggtatgtgcagtcaaatatccaaaagggggaagtactgcttagagaaatatctgtaagcattaaattctctcctttatttgtacattttatatagataaatttttaaagtactaattaggcattaacttttttcaaatgcacaggtttgttggtttttttaatacactttaattgactttctcaagcgtgctaggtagaaacgcagaattccacatcttcccgctctcagctctgagcatgtgcaaggctgtgtaggacccagtttctctgtatatactattccagttcccagtcatctatgtagaaagtgcactgtgctgccatcgccctacatcttcagctgtgtcattgcttcctggttggggtggggacggggtgggtcgggagggaggtatattgggaggagggtgggtcaaggcagaaggagaagctgttgaaatgagggccgtgaaatcagtttctgttggtttgcggttgtgtttggttttgtttgtttctttataaaaaattcaatcgggcagctcccttttccacaagcctctttgtgactgtagaactattgtagaaaaaaaaagttcttttctatattataaaagaaattatccaacacagtaatattggtacctgtcattttttcacttctgtttaaaaaaaatgtatttttagcaagataacttgggtaatcttctaaaaaagaaatttaaaaactcactgttagtgactttgatgccttttaaaataagagctttttcatttcattccatctttaaaattttttatctttgttgtagaatattaaaaactattttaagaaagataaattctctttaaagagatctctagcgtgtgtgaatagagctccagatgcctctaaaagccgcatgtacaaaggaagccacgtctatcctgtctgtttatatttgcttttcctgttttgtaacctctttgtactttgttcatggtgacttgtaagctaaggggaaggggtgcctagatgcctttgtatctctccatgtcacgcgctcctgggccagccggcctcccttcctctccttgtatgtaatacctttttttcccctttctagcaagtactttcaaaagaactctgtacattttaacataaaaaataaattatgttgagccattttggatgtctgtcttgcatgtggaatttttctcccttcccagtatgtcagaactcttcaattcttgttctacacccagagacctataaacattagtcttttcattttcctctttattataggagtacaagtccatggcctttgctttgaaattccagttttcatttatgtctgtgtttaaatgccaacaatatggatgggttttccatttccaaggaacatggcacggtaaccctactttggattttgtaggggcattcatataaaaacctcctaaagggattttaattcccgtcccccccactcccctaaaaaaaagcaattgcaat

SEQ ID NO: 129620 - DNA, 1147 bp, Homo sapiens
attcctaaagctggacgtaaacccaagatccaggagagtgaagaaactgttgagccaaaagaagacatgcccctacccgaggagaggaaggaggaggaggagatgcaagcagaggcagaagaggctgaagagggtgaggaagaggatgcagccagcagtgaagtcccagcagcctctccagcagacagcagcaatagtcctgagaccgaaaccaaggagcctgaggtggaggaggaagaagagaagccccgtgtctcagaggagcagaggcagtcagaggaggagcagcaggaattagaggagccagagccagaggaggaggaagatgcagctgcagagactgcccagaatgacgaccacgacgctgatgatgaggatgatggccacctggagtccacaaagaaaaaggagctagaggaacagcccacgagggaagatgtcaaggaggagcctggtgttcaagagtcttttttagatgctaatatgcagaagagtagggaaaagataaaggataaagaggaaaccgagctggattccgaagaggagcagccttcccatgacacgtccgtggtgtcagagcagatggctgggtctgaggacgaccacgaagaagactcccacactaaggaagagttaatcgaattaaaagaggaggaagagattcctcatagtgagctggatctggaaactgtacaggcagtgcagtctttgactcaagaagaaagcagtgagcatgagggcgcctaccaggactgtgaggaaactcttgcggcgtgtcagaccctgcagagttacacccaggctgacgaggaccctcagatgtccatggttgaagactgtcatgcgtcagaacataatagccctatctcctccgttcagtctcaccccagccagtcagtccgttcggtcagcagtcccaacgtgcctgcccttgagagtggctacacccagatcagcccagaacaaggatccctgtccgcaccctctatgcagaacatggagaccagccccatgatggatgtgccttccgtatcagaccactctcagcaggtggtggacagcggcttcagtgacctgggcagcattgagagcaccactgaaaactatgagaacccaagcagttacgactccacgatgggcggcagca

SEQ ID NO: 129621 - DNA, 1056 bp, Homo sapiens
gaagattctgactccgagaggccaatgccaagattagaacccacgtttgagatcgatgaagaagaggaggaagaggatgaaaatgaacttttccctagagaatacttccgtcgtttgtcttcgcaggatgtactcaggtgtcagtcctcttctaagaggaagtctaaagatgaagaagaagatgaagagtcagatgatgctgatggtatgttttacagaactcacttactgtggtttattgtcttcagatatatagcagtagcagtgacagacccttcagtaaaaaggctgaaaaatgaacacaacccactaagcaagaaaaggaacgtttggcaatctctaaaaagttgtatcaagtatatccatcttgatttttaaatgtgttttcccttcaactcagaacctctattaatttgcctctgcagaaaatatcttactattaggcaactgttcttttttgcccaatcctttctaagcctttatcagaatctttagttaatgggagagttggacttagcatcaggaagatgtaataacccttcactagaatgtgcattctctagacttagtctgttttgctcattgctgtatgctgagtgcttaagcccggcgctcagtaagtagtgttaaatgagtgaatgctaagaagacaattctccagaaagagcagattcatgtaaattggaacttgtgtcacatctgttcaggagtctttcctgaattgtatctctaatgtgtcttacccaactagtagtaaatttctcacaaatggtaacaataactcaaaataaattttatagtatagatacaaatccaactatttacttttaaagcagcctagttgtcatttcttctctagagacactgaaactaggtctcatatatatgagccaggtcagaaacaagtctttttcaccctagcctaaagttttgccagtgtctcatgctgcctgcatctgcagtgtgtttatctcgcatgggctcagaatgagcatttttactttgttgggcaaatttgaagaaatctacttgtccagtcttggtacataaaccttt

SEQ ID NO: 129622 - DNA, 1082 bp, Homo sapiens
tccatgttaaataactgatcattttctttttaaagctcagtttccttttcttctctcaatacttaaaaggtcagaataggtaaatgtaagcaaacaagactgaaaaattaaccagcattgttttattttctaaaatcaggtgggaaagtctgtgtctcatgagaacaaagaacaagattcttattcagtagaaagtgaaaagaaaccagaagttatggctccagtcagttctacacgtttgagcaaacaagtccttcctcatgatagtcttcctgcaaatagccagccatctcggaggggccgctgggggaggaagaacagaaaaacccaggaacgttttggtgataaagattctaaactgctcttggaagagacgtcttcagctcctcaggaacaatatggagaatgtggggagaaatcagaagccacccaggaacaatacactgaaagtgaagaacagctggtggcttctgaggagcagccaagccaggacgggaaacctgaccttcccaagagaagactcagtgagggggttgagccctggcgaggacagctcaagaaaagccctgaggctctgaagtgcagattaacagaaggaagtgagaggctgccccgtcgctacagtgagggtgacagggctgtcctcaggggcttcagtgagagcagcgaggaggaggaggagccggaaagccctcggtcaagctcgccaccaattctcacaaagcccacgctgaagcgaaaggtaacgcatttctttccaggtcttctcttcctccaattccagtttatcttacaccttctcgttttagcttacagttctgaaagagtataagttagaaattcctagtgcattgctttataaaccttaagcctctgtatattgtagctcaagatcttcccagtgaacatttgagatgtgtgtgtgtgtttgacttctttgattcatgggaattcacttagaaatcataagcttatttaagggcttcacctcctgggatgcaaacaaacttttttttagcttactggtttgatgttcaaatcatgacttttaggggcttaaagccctaaaatatctttaaaag

SEQ ID NO: 129623 - DNA, 2652 bp, Homo sapiens
aaaattgtttaatctgagttcaaaagtgatagctcacagttctaaagagatcattgtgggatctgtgtaatttgagggaatattttacctcagatattgctatacaatgatatttagatgaatatatgcagaactaatggttcaaacaaaggattttgattctagtcttgagatgttaattaagccttctcttagctttagactgtccttctgtccatattttattggaagcttgtgctactggttgttttacacattttctggtctttttagatgagcagtaggggatggaactcagattacttcctttaatgttaatatattgttttgaaataggactcatgattagacatgttatatatgccattaaattgcaaagttagggaaaatattttacttttggtgattgggggtgtgtgtgtatggtatacaaacagtccgtgcaataacagtattgtttgtatttacttttcctaatgtaatacgtttccaaattaacattcttagactgcttttatgttttctttaatgacagtaaaaatacctttctctgccatctccattttcgttgcttttccttagaagttaggcctttgtttttcagttcttgagagttgtgcactatagaggacagagtccacagttccacacttatattggcagtcctgcttgcctagagttagaatgataggtaattgtgaggagttttggttgaagtgaaagattgtcatctaattcactgacagaactacaattttaataggattatgtgaaaatgaaggcattcttttgtacttctcagttcagatacagcagttgccatctagtggtccaaataaagcatgcaaggcttgttttccccaggacgttgaacgaaactgttaacagtcctgatttttaacacttcgaatattttaacaaggtgattgatattaactgtagacataataatactaacttagtcttcaatatatataaattatgtattctttctgcagatttgttttgaagtagttttgcaatttgtttctctctttttttttttggaaggaatttacctttggagttattcttggttgtagaagaggggattgttattttggtgaatccagtttttcagagttgctgacctagttctgatttgagttatttgtgattctttaggttatttgttatcaaagcgtgaaggccaagcagggtctccagagaaaccgttatctgatctgggtcgtctttcctacatggcatattggaaaagtgtaatattggagtgcctttatcaccaaaatgacaagcagatcagcattaagaagttaagcaagttgactggaatctgccctcaagacatcacttccacactccaccacctacgaatgctggacttccgtagtgaccagtgagtatcacatctttttgtatacctttgaaagataattaggttgaagttttttggatcagccagtcagattattgatgaaagggcattaactaatataaatgatatacttggtgataatgagatatcattttcctttctaggatattttatttgattgactatatatatggtctatatatagtctatatatatgctttttaaactgaattgtttttctgatacccctaatttttggacctaagctactgaatctttcatcttctagtattgggagctctttcacaatacaagaagtaaccactctagaaacagtcattaaataaaatgcccatgttaaattttcatataaatggcacaaagtaaatatagattgaaaggaagaacagacagttcacccttcactaaagtggtcagaaaaaggtcacaaagaaaggaggcatttgagccaaataaatggagaataggaaagagagtgcagaagagcagcagaacttctggagcgggacgtgtgagacagcaggcagtgaaaacagcccgcggccacggtagagagcgaagcatttgtcctgcttcacactcctggccgtctcatgtggtggcacatttctgcattccatcgtcccaggcaggctatctttgcagcacctatcatcttacatgcttcaccaggggtctcatctccacattcatttttatgtacaccttgtacattgttgattgctataaacttttctctggttccagatttgtgattatccgccgggaaaaacttatccaggatcacatggcaaagcttcagctgaatttgcgacctgtagatgtagatccagaatgtttgcgctggactccagtcatagtgtccaactctgtggtctcagaggaggaagaagaggaggctgaggaaggagaaaacgaagagccacagtgccaggaaagagaattagagatcagtgtaagggcatgaatagtctctatttttgatgacagaagatatatttttgatttcatgagtatttataataatgtattatgatcatctttcacagaaaagtaaattcacattagaatgtcaagagttttatttcagtggtagagatttcaagaagactggacctggtttacttaagtatttttaagccttggacaattaggaggagaccatcaaatttcttataatgtgttacttgtgagaaaaatatttgttaccagggtgccaagaagcagctcagttttaagctggatagtagttgaga

SEQ ID NO: 129624 - DNA, 1545 bp, Homo sapiens
agcctcatttaccacatgattgcttgaggaacccgcttggtgcttctgcgtggcaatagttagtacccccttaagtagttttatctgggttcaagcccgatcatggtagtcagattgcattgcttcaggcagctggcatagattagactacatagttacatcttcttttacctaataaatgtattttagaagggttgtatttagatcttttgttgtgttaagtactttgaaaacgaaacttgctatctaaaggattgctacaattcatctttttattaaagcaaaaattgctcttttaaaaccagattatcacttccttatctggctgttcctgctatgttgaaggtatgaggttttatatatttggttgtcttaaaacagcagatagcataatactgccatttcaaaggatggcttccaggttccaaagtgttctggtcatggacaccttctcctagtctggactgtggatatctagagatgcttttaactgatacatattattctagaactaaagagaccctctactgactgttttgttctgtttatttctctaggttgatgggaatgtgagtaccatttattgtcaaaacctgtgtcttttggcaaagttgtttcttgaccacaaaaccctctattacgatgtggagccatttcttttttatgtactaacacagaatgatgtcaagggctgccaccttgttggctacttttctaaggtaagtatgtcagcttaaagtttgtttgaactcatatagaaatctgaaagaatctttgctggttctcactcggggacacaacaagatgcagcacctcctaggtgtcatctagctgtttggaaagaatagaaggaacatttggaaacttaccaggtgctagaaggtgcttagtaacattcaacaacctatattctcctaggattatggactgctggcaatactcacggggaaggttttaaatggcttctcttcccatggtaataacatggaacttctgaaataaacagtcattagctctctgagttctgtctcagcttcaatcttctcttccttatttgaactttaggcatagaaataagagtaagaaggcattttggttaaaggatattttctccttttttaatcttccattcccttagagggagaaagtttatttctagtcagagaacataaaagatatacttttatttaagcaagcctgtggtaaaatccaagtgtataaaacagttaggggaagtactagctttttataagcatttataagaattctttaggctacttcattagttagatgtgacttaaaatatattcactcatttataaaattataaaagtgactattttgtgtaaagttagatacaactaataggactgctctgaggagcaccagagcaggagagaaagaaaactctgacataattaatgagtcttctcacttctagagtggcacactgattcatcatttgtagctttacggattgtttgggactcagattccggtgctgatccttaggcattggcgtactgtgtttgagttgcagatggt

SEQ ID NO: 129625 - DNA, 1001 bp, Homo sapiens
ttcaaaagctgctttcaaaatgggaacttgaaaaaatggttatggtcttcacacaaatcaaacatttttgtgtgtgttaatctacttagcaaatattattttctttaattctaggatagtattttaagcataactatccaaattgatagcaactaaattaattttttcatctcagtacttaaatatgagacaagatacagtaatttatttgaattatatattttgtcattttaccgtccagtatttttgcatatgcagttttttttttaacctgttacctgggtagtaatgagaggcaaaaagatgataattgtggaagtttgaagtactctaaaatataaagccctgtcttttttgtttaattatcgtttacaggctgcccaaattgtatctttgtgaattttgtctaaaatatatgaaaagtagaactattctgcagcagcacatgaagaaatgtggttggttccatcctcctgccaatgagatttacagaaagaataatatttctgtctttgaggtaaggtagatacttagtaattgtcctctcatccatttcataagtagggccacctatattgcatctattgtgcaactttctattgtctattttatgtatcactaaaatggaaaaagtactaattataatttttaaaacttcatttgattataaaatgccagttgattttgcatatattaagatgtgataaaagtacatcttagaatctatgaaatatggcatttaaatgaaaggatttctatcacttatttaaaaggaatatctcacagagatctgtttaatagtaaatcttgatgatgatgatgatgatgatgatgatgtgtgacctctgctctgtgattctctattgctgttagtagcgctcttgatcctcagttctgtggttttcgtgccaagtattaattgagtacttgcttatgtgccgtttacttactgtaacagtaaaatttcagattgtcaggatcccctcagtctctcacttttc

SEQ ID NO: 129626 - DNA, 1015 bp, Homo sapiens
catgtttagcgaaaacgtactttggttgaaatgttaaaataaaaagacctagcaaaggtaaccttgtagttcagatatgacagtttgattttggctaggactggaatgagtggtttctgtgtagccatttcttcctccctgtgtagagagccttgctgatttctaaatcttcgtaaaaggaaacacccttgctgtggaggcttgctcaggggagctgggagtggaggcgggctcacacatgagcgcatgtgcaggaacgtttcacggtgcaaaggttaaaggcgggtgtgggcagaggggaacctaccacaggtcccattctggacagacgtgcgcagttgtggtgatgtgcaaacagctgtactggaactggatatccactttcacatcgggcatccgcctagaagagcagcgggcagctgatgggaagaccctcaaacaacagacagtgccgcagcaggtgcatgacttcagcttttgggctttctatctgatccttgcctcaggaagttagatctggtttctggtatttagttattttgaaagtttcctatactgttgttattactttgagttgtgaagatagatgaaaagatagtactttatgagttagagtagttgattctagaatgtagtttaaaaacagcctttaaaaaatctttttacaaagttctgtttgggttttgagaaatgaaagaaatcttattttaaccctgtattatgtattcttcattgtttttggttttgtatttggaggagccccagtacttggtggtgttataacacaattcatcccacaaacagatctttgtcttttgttttgaggtgtctaaggaagagcttgaggtttcatttggctacattccagtatgaaacctgagataagtcccttggccttttataaaagagaatggttagaaagaccagaaggtctctaatgagttatggtgaagaggcttctttaaacggatttatataaaaccaatgaataaaaatttcttttagttttgttata

SEQ ID NO: 129627 - DNA, 1123 bp, Homo sapiens
ggagttgaaataatagaaaggtgcaagaaggatgaccaaagagagttaaacgggttgctgagccctgctgaggctcggggagacagtgtaaatgcttattgacagtaatcgggctaatcctatgtttctttccagcatttgattaaactcagcattgtctgtgtgtgtattggcaccaaggaaataaacagctagatcttggaagtctagttcatgcttatttttgttggcagtgcactgaaattctgatgatggtgctatttctccatgaggcttattcatttagcatcatgcacctgccttggtaccagaactatagggcaaacaaaaagacacagactctgccttcatgaagcttttagtttcacaaacagacagataataaacactcataaaaataaaactgtacttacaaactgatagtcggaaggaaatgagaatgcagtgaggggttctgacgggctgggctaccttgctgagggttggggttggagtgtttatgagaagggaagacttttgaagaagtaacaatttatacatagttccaaaagagtattcaaaagtcagcagagtaaagagctagagaagaacatttcagagacaagtggattgcctatgtaaacgtctaagggtgtgaaagaggttgataaacttaaggaactgaagttcagtgtaactcaaatacagtgaacagaagagttgcataaggtgaagctggggaaatagactgaggccagaagttagaattggggtttttatcataattgcagtgggaagacattgaatggtttttagcaaggaaacagcaagatctgtttcattaaaaaatggtttttcttggctactacataaagagtggtttagaattaagcaagagtggaagctgggaaaccactttgcaggcttttccggtgatcaggatgagagaagatgttagctaggactagaggggtggtggtagaaatgggagagaagtggatggatttagatatattttggagttggaatcagcagaacttagtgatgagttttatgtgtagcttgaggaagcaagagatgatcaaagatgacttccaggttctctgacttaatttaataaagaaagtggtttgaagccacttgg

SEQ ID NO: 129628 - DNA, 1102 bp, Homo sapiens
tcatatggtgaatgttatgatgcctgcttattccaggaaggaaactggaaagaatagaactgggtgaaatgctgttgatctaagcataaaaaaaagaccaaaatatttgcagatgtgatgaggtcattgacttttctacttcagatcttgacaaatatagttgtaagtcatggattgcacttaaaaagggagagacagaaccacagctccaggctgcttatgtatcaggctaagttccctaattttcaaagtagaaaacatctgtggagaggacttaataatgtggcaaatcattcaagtcagaggagaagaatttgattaactgtccaataaattaaagcttaaaatagtcttattgctgagccttgaatttagagatactaaccctgtgaaggaagtagaaagggcttgaagaaagtagaatgagaatgaactcttttggaccacaagggccagaggtgtagtgtctcatctactacaagagaattccctgaccttggtttcctccctgaatgtctccttggtgagggagagtgtattcactgctctcattcgtggttgattgtccagtgcaggagagaaagtccttgtaattgtcagagtcccctttgtatgctttattgattggtcttttaccatagtgatgatcaactaattactctttaagcattcaagactcttcatgtctttatcaacctgtagataagttcctgatctgagcatgtttatctaagaaaatatgcaatccgtttagattaaactaggaaagaatctcagagcaaatcctaatgaaagacatttttgaattaaccatttgtactggagacggtttattagaagaatctactagaaagcttttgaaatagaaattgttagagcaagtgtatcaagtatatggagaaccaatattgaatttttgacagtggtgtgagcgtttgctttaataggctctgtcattttctttatgaattataaagtttaagtaccgaatgctgtattagagaggtgcatgcatcatgcactagggggcattaaagtcacatagtacctttagattgtacttttttcttccagtttgagaatgttgtcaacagtgagtcct

SEQ ID NO: 129629 - DNA, 1079 bp, Homo sapiens
tagggtcttctctatagtgtaggattcacttgttttctctatgaaaaaaattccattgtcatatctggcacttttatataataataatggctaacacttattcagcccttaataagtgccagacactattctaagtgctttatatgcattgaattgtttaattctgccaacaacccagtgaaatatagctgctgctgttactttcatttttcaaaggaagaaactaaggcatagtaaatgttgaactgggatgaaaatccgagtagtctggcaccaaagtctgactcttaaccattgctttatgttgcttctcttatataaaaacaggaaagaaaaagttgttactgtgacatttcacatgtcactctcctgatcttgtctcagttgttaatatctattaggtgtacaaatcactggataggttcttcctattgaggtgatggctaagtcccatttttgtgttctttggatgtaaaataatttgaatgttttcatctattagcagaaatcagaaattgtggactagaaagctgggctatgtctggaggaggtggggcaagattcagtagctagttttgtctttttaaaaatgtctgtagtaactcacctttgatgatatgtaaacgtcttcaggcttgtcaacctccctttattatcaaaagttttacttactttttttacacgtaagactatcttgaaggtgatataactgaaatgaatgggcattagcagcctgaaatgtacagaaccaatattgtagtctatattcaaaatcttaaatcaagctttgattttcctataaaatgatcttttgattcctggccttcgaagaataacccatccttgtgttttagagataaaagtataactttcagttggtgcagagatcacagtgtagtagaactttatacctggaaggatcttagttgttcttagtccagttctcattttacagatgaaggcactgacatatgtttagaaaaaatgtgatttgtccaagtcgtacagctagtaagagagaattatgactagaacaagtcttctgactcctggcctgtcattctttgcactataagtag

SEQ ID NO: 129630 - DNA, 1081 bp, Homo sapiens
tgctttaagcattggccttaccagactgcacacctaagtctatgctacttatactacctctattgccttctctccatcactcttaggaggaacatagattaaacaaaccactcttaacatttgttagctactgtccttggacaagtttctaaagatcccaaaacataatactgatgcttagtacatgttgttttcccctttcaacctttcccttcctccacaccacagttggaatttctttttcgtactgctagaaaacacttactgtttctctcacttaatgtcttctgccgaggagtcactgtgtctgtttacttgtatatatcttactgctcttgtactagatcacatgctttttcagcgcttacactgtgtcttcttgaacttattccagttgaatttttcaatcttaagggtttgctttttaaaatccacactgtatcatttaggttctaagtgatgaacatgactgggataggattttttggagtaaagtttctaaatggtcataacaaggaccagttgtaaaggcccagccagagcaggctttgtaaaaactcacctacttagctggaatttaggagagtaatacaattgtcctaaacttactctggtaggaatttaaaactataattttgatgtctttgtagtaatactaaataaaagtattagtactggaatgaattgtgtttttcttcacagccggttgctgaaccaatccccatctgtagtttctgtcttggtacaaaagaacaaaaccgagaaaagaagccagaggaactcatctcctgtgccgactgtggcaacagtggtatgtgatttccttctgtttttcttctaaaatgtgttacgaaggcaagcggaaagtatgttgacttgagtttgtatccttgatccttatgagattaatacagtcatacatcttttaattatgggggataagttctgagaaacatgtctttagaaggtttcatcatcgtgtgaacatcatcgagtgttctgacacaaaccaagagggatggcctactacacatctgggttatgtggtgtagtctgttgctcataggctcaaacccgtaca

SEQ ID NO: 129631 - DNA, 1053 bp, Homo sapiens
catccctattaaagttttgtaatggctaatgggttatgttggaattgattaaaattatagaaagttatatactataagtaatggaaattataggtcttttcccaggccattcattttttttttaattattataaatcttttgcaggtgtgtacttttgagaacagcttatccttaaaaatgtttaataagcagccatagagtacttgatagtatatgggatgctgaagaatttaaagagattaaagtccacccagatatagtttccttgaagatatagaatctaggaggaaaggctctgagtaagtaatgataaatggagctaagcatggtttcattgcattttaatttcaacaaacgcttacttagtatatactaagtgcaaggcataggtgaattaagtggtgatatctgctcacctaggatatcagtttggaaaaggtggctaaaaatggaattcaaaactgtcagaaaggatttggtcagagcatgagttcatcaaaggctattattagtgaaagaatgaaaaacttggtaaaattgacatgaagagcttgcctgagtggaagagaaccatacgttttagaacattcagctttctcaaagtatgaacactttccaacaaaggatgagtttcctaaagggaatatgtgtgcagtttgttactcttatgatattggaaataacgaattttgcagagattcttccagaaggcttacttttttggtgtgtgagtgaaaatatgaatggtacttaattggtttctaattgttttgtgtggattttgtctttgaattgactgacatttataagtgctttgaaaatgtgagtacaaccttttctttgattgattcaaatttttatgttatgttaaaatgcccaccaaggagtaacatttactagacttcttactgtgtattgggttatattttgacaacctagcaatactcgttttcctcatgcccagtcattgagcatcattttggtttccttcactataccatgcctgaaaatagtccaattttccacccttctaagcttaagacttaactcct

SEQ ID NO: 129632 - DNA, 1031 bp, Homo sapiens
attgaattaaagaaggtaatgtaggatcttgaaagttggggttcttattttcaagattttttataaagttgagtatctagactgcaaaatgtgtcagtggttttagagggaagaattagcttttcattctttgcagagtctggtgagagtgcttgaatccatgtctaaaaaaagggctttgcttactaaagctttatgtagttacttaaaaaataagtgtgctcctacttctttttttcctgaatccttcaggcttatacagtttaggaaccattaatttgaatcagttatttgggcaacttacctgtaatattttcattatgtttgttacttagcatatgctatcctgtattgtaatgttaatgcacacgtcttaattttacaactagatcataagacccagcagcagggagctagttttattatatatttgtttctctagcacctaactaaatatccttatacacaataaatactaaagataatggtctgtgtaggtaacattgaggatatgaatagtatgaggtgatttcactagctgactactagtatgctagggctgttattacagaataccgtagactaaatggcttaagcaacagaaatttgttttcttacaattctggaaactggaagttgcaaatcaaggcaccggcaaggttatcctctctccttgtcttgcagatggtcacctttttgctgtgtccacacgagcttttctctgcgagtacactcctgatttctctttctcttataaggataccagtcctattggattagggccccagctttatgatctatttaacctcaattacctctgttaaaggccttctctccaaatagagtcacattgaggaattagggcttcaccatatgaatttttcagggagcaaaatttagcctgtaacaatgacctcctgaagataggtaggtatgccaagttgctaagatattaaatagaatccacactagatacttcagtaaagaaaatgatgtatagggaattgataaagcagatgctggagaactga

SEQ ID NO: 129633 - DNA, 1141 bp, Homo sapiens
gctaattttttgtatttttagtagagacggggtttcaccatgttagtcagggtgttctcaatctcctgacctcgtgatccacccgctttggcctcccaaagccctgggattacaggcttgagccactgcgcccggccaacaataaaaattttaatgaactttctagtcctagtcccaggagaaacctttgctgtgttttaaagttaactcaacttcatctctcattctctagactcctcagcccttaaaagctcagtttagtgccttatagaactcagtccacacatttcttaagtaactgctctggaccagtcactgtcttacataatttactaattcatttatgattatctttaactagataatgaggtccttgaaagtaagaaaccctgttttatactataattttagaaattaagaactgaaagagactttagagctagtcatgtcaaatattttcattttacaaatgaagaacccaggcaggttaagtcagttccccatatttggagaattaggattaaagaactagcctttcatcagactatctactttattggttgattgttaaattaatctgaaggaagttctcagcactactctatgttgaggattctatattgtctatataaactgtgtcattgtagaataataaagttatttataactcctgatttcagcacacggtatttcctatttgtttcttatgacgtgttcttaggggcaaattgcatgatagttttggagatacagtattatgaaaaaggcatttttggttttagattagagtaagttgactgatttttttttttttttttttttgagatggagtcttgctctgtcatccaggctggagtgcagtggcatgatcttgactcactgcaacctctgcctcccgggttcaagtgattcttgtgcctcagcctcccaagtagctgggattacaggtgtgcatcaccatgcccagctaatttttgtatttttagtagaaacagggtttcaccacgttggccagtctggtctcgaactcctgacctcaggtgatccgcccacctcggcctcctaaagtgctgggattacaggcatgacactgtgcccagtcaactgatttcttaggttaaataaatactcctggtttata

SEQ ID NO: 129634 - DNA, 1198 bp, Homo sapiens
cacccattagtcgtctcagggtcacatgtcaccttttccatgaagatacttgttatggtcttttatgtagggtgtttttttctttttaaacttacatactagattatctgcacctagcacagtggtgctgtatatggttgttcagcaagaatccagttcctgtgaagtttcctaagataacagcataagataatatttaaaatttttattttcatataaactaatagcattaccttttaatattttacttcagattactttatggttcctgttcttttattcaagttctgcagatctagttactgttatccccattttatggtcaaggaaagagacacattgtagttaactaactgattttctctctgatgtagctagttatttatatgcaatgttctcactaatgtattttccgcaacgaattaaactaaaacttgagagcgtgatattaaaaggtgaatgatgatatgtgatttgagacacttggtatgaaagccagccttgtacaggggtgctgtgtatgcagagtcatttactgtagagtttacattaaaaattgattttcaaggtaaaaaattgctctcttcatcttttatattgctttattcaccaacttttaaattacaattttaaaatgtcttctatatatagactttctagaactaaaccagtacagttgccattaggtgcatgtagctatttaaatttaaattaattaaagttaaagtaatgataaccactagcacatttcaagtacccactagctcacatgtggctagtggttacagtattggacaacagagatatagaacatttcatcatcccagaaagttctactagatggcactgttcttgagaacagtgttaaaaaaatgtcactcgaggggccaggcgcagtgtctcatgcctgtaatcccagcactttggaaggccaaggcagaggcaggcggatcacttgaggtcaggagttcgagaccagcctgggcaacgtgaaaccccgtctctactcaaaaaatatataaaacttagctgggtgtggtggtgcacgcctgtaatcccagctacttgggaggatgaggcaggagaatcgcttgaacccaggaggcagaggttgcagtgagccaagattgtgccactgcactccagcctgggcgacagagtgagaccctgtctcaaaaaaagaaaatattacttaagg

SEQ ID NO: 129635 - DNA, 1036 bp, Homo sapiens
tttatcaacttcctttaaccggctgtcatttcttacagtggtaagagccattgccatcgattctgatgcttaaaatggaaactttggtgtcatcttccatacctcacttgtctgtcttttggattcagttctattccatcccatgtcttctctcttacactttttaacatctcttatttaacctcttctgtattcgaggtcctctgttagagcaggtcctcatcatttctctcctgattaccttagtagtttcttcattgattttccttcctccagtatcatcttcgtctagtccacattattgccaaaatgatcttactaagaaatgattaagaacacaagcgcaaagaccagaccatctgggctttctatcccacactgggactacttgctttatgaccttgggtaatttgcttaaccattctttgccacattttcttctataaaatggggataatacagtgcttatctcatagtgaagttgtgagaatttaatgagttaatatacatctgggctgacagaactttgtgcaatgatggaaatgttctatatctgtactgccctctgtgatagccagagccatgtgtagctattgagctcttgcaatatggccagttgagtgaggagctgaattttaaattttatttagttataatttaattgaaatagccacatgtggctagtagctgctataatggacagtacagaatatgtaaagtccttagaaatagtgtttagcacataagtgctccataaatgttaactgttattaccatctttctaaaattaaacttctctgcttaaaatccttcagtaccaaattctgcgatatagtatatatgagttgtaacccattcccgtgcgttgctccaaacttgtcaattgccacttcttcataatgccctctgtgttccactgtaccagttctcaaagtgtggatgtagaggacagcaccagcaatagtatcccccaaaaacttgtttaaaatgcagattcttgagccatatttcaggcctattcaatcagaaactgaat

SEQ ID NO: 129636 - DNA, 1110 bp, Homo sapiens
tggagtgcagtggcacgatcttggcttactgcagcctccgctgcccaggttcaagcaattcttccttctcagcctcccatgtagctgggattacaggcatgctgaccaccatgcctggctaattttgtatttttagtagagacggggtttctccctgttggtcaggctcatctcgaactcccaacctcaggtgatccgcccaccttggcctcccaaagtgctggcattacaggcatgagccaccctgcctatagtgttaactgaagtaactaaatttagacatgttggaaaatagagtttgtttcttcaggtagacttgtatatgtactaatctcattggaaaactaatttcatgatagtatctattcaattagagttggtgagctctgttctatatttttaaatggagtcttattttcagtagtgaatttcctgtgtgacttcccccaaagatatgaaaagtttacattaaaaatcgtaatacagtgaactctaggatgagagattattcctttgaacagattatgtctgctccttttattgtattttaactattttctttcctctccttcgaactacgcagtcagttgctatgcagaattgatagtttgctgttacgaacctagatgttctcaaaaaaagaaaagaattatccagagtttatttgacagtgatggagaaaggaaggtgtataggtcaggagtagtttcacttttaggaattaattggttcagcatatagtcattgagcacctactgtgggccaggcactctgcttggaacagaaacagttctgtcttctctgggatgctaatgcaggtatttctattgacctggccaactgtaaggtgaagatgaaattcaaagactgcgtggagtaacccgagcaagttcctctttactttttctggtatcaattctaactttttgtttttttttggtgatattaacctttggaaggaactgtatgttagattttcggcagctgagtggttttgatccttttgggagatcaactgtgttggaatacgtttaagaggagtttttgtgaagacattggaactttagtgtgttcttttcacattgataagtactgaggagaatccatggg

SEQ ID NO: 129637 - DNA, 1892 bp, Homo sapiens
ttctgccttattgactgtttttgtctactctgaatgtctagaattttgaaagatgaaagattcacttttactttcattgcaggattctttctactaatccagatacttgttgaagtgctgactagtttcttggggaaagatgtcaaggaagagttgaaattcctagactggtgagcagagattgcggagtacagaatagccatcacccactctggttagtggtagcttaaaggtcattcttagaacatgtcatcgtgtttcctcattgtatcctaattactcatcttttttttttcttttctttttttttcttttttatcccaatggtttacatacatgattgttttggaatattaatagataagtttggaaattcttaagggtgcctagtaaacacttgctgtttgattgctttatgatgaggatgcttattttcattcgaaataggtcttggtagaaaactgaccttattttcattgcttttcaggcataagatgcacatttttctgctctggagccgggaatgaaatattcttgagttcttacaactttatgacgagacccatgtgtggtgctattgagaaattcattgggaagttggaagacatttcaatcaacaggttgttttggtttctatagtacaattggggtggcattctgttttgtgaaaggaggaaggacttaggccagaaaactcatatgctatggttaactggttcccagcctccgagaatcttgttttccatggtgtaaaacttactcagcatcaggataagggataacgactctatggatatacagaatccttcaccatggtaaaactcgcaaacccgctttatactgagtggattttggaggccatcaaaaaagtgaaaaagcagaaacagcgtccttcagaagaaaggatatgcaatgctgtgtcttcatcccatggcttggatcgtaaaactgttttagaacaattggagttgagtgttaaagatggaacaattttaaaagtctcaaataaaggactcaattcctataaagatcctgataatcctgggcgaatagcacttcctaagcctcggaaccatggaaaattggataataaacaaaatgtggattggaataaactgataaagcgggcagttgagggcttggcagagtctggtggctcaactttgaaaagcattgaacgttttttgaaaggtcagaaggatgtgtctgcattattcggaggcagtgctgcctctggctttcaccagcagttacgattggctatcaaacgtgccattggccacggcagactccttaaagatggacctctttatcggctcaacactaaagcaaccaacgtggatgggaaagagagttgtgagtctctttcctgtttacctccagtgtcccttcttccacatgaaaaggataaggtaagaatggcatatgcttcggggtttatagagctgatgatataggatgctacaaattcacatttctgggaagttatattcaagttttttgtttggggacttctgtggagtgatcacctctggttttttattggtgagttgtagctatgagagcttcatagatttgttctggtactttgaaatatttgaagcctaagattaaaaatgtagaatgttaatctgactaaaagaacttatttacattacaatgaaaaagtgacatatgagtttaaaacttttttttaaatttttttttattattttgcttgaggagtactccagcgtgagactttaaaactttaactaaaggttcttagaacaccttactactggaagttgatgagcagccaaatcatggagacttgaatttgaaacaagcagatgactctgagaacatttttctgttttccattttgttgcagattactcgttagacagaaa

SEQ ID NO: 129638 - DNA, 1076 bp, Homo sapiens
gggagttaagatccgaggctgcaggcgcttgactttccgaagacctggagactgatgacaatcccgactggaaagacaatgagtgactgtcactcattcttttacctgcgaagcttagtcaattaggacgttcgttcccagcttgttaaactcaggatgtagcttctcatttagtttagacttaatatctgtataatgagcttacttggagtaatgatactctgatttctatcctcttgagaccctcaccaaattgaagcatgattctcccagggggcttctttttaggcagctgatttaaaaacaaatcttggctcaggtttgaatgtttgcttcactcttttctttcctatcagagttaatagtaatatctctttcctagtgtgtattagttttccgtttgattttaatgtcactaccaagaatagttgctgtgggagccatttgtctagcattgtttatattgtaatgcaaatgatctccagaatgagagcagaagttctaaaaaacacttcagttaaacttatttttggaggcaaaagagttagattcagaattcagtactttagtgattaaacaagattgcatctaccagattcttttatagggatactgactttgattcagagagacagtacatttctgtttatgttttattaatgttcgtttcaggacagcaatcttgaatttatatctttattatttgggcttctctttagtcctacaagtagccagtgtatttctttttctgtaccgtccgtttgatatgtagtatgtgcgttgaccccagtgattctgggccttcctcatttctagttttcctgtctgaattacttacacgcagtttgacagttgtgactctcttcagcatatgaatagaaacatcttagtttgggttaggagaagctatcagcatgtaattcttaaaatttgaatgaaagtggattattgttaaattcagtaagcacttttactctaggctattttcaatagtatttttgtttccattaggagagattaaggtaatactgtacttaaattataaactgggtgtgcatattgtattcattcttttc

SEQ ID NO: 129639 - DNA, 1366 bp, Homo sapiens
tgcctcagtttcctcatctataaagaggtgggaataacagtacacacttcatggtttgctgtgaggattaaattagctaatttttgtagactgtacaacagcgcctggcacatagagcacattcttaatattttaactcacatcatccttggagctgctttgaaaatacaggggacccttgaacaacacttgtctgacctgcagggtccacttatgtatggatttttttcaaccaaaggcaggatgaaaacagtatttgtaggatgcagaactggtatacgcgtgttccacgctgcaggacttgagtgtgtgtggattgtggtagacagggctcctggaaccatggcctgagcacacagaaggaggctgtcattaggggcttccttttttatacttgacaggttgcagcgagccaaggtgtttcaacgggggcacctgccagcaggccctgtacttctcagatttcgtgtgccagtgccccgaaggatttgctgggaagtgctgtgaaataggtgagtaggtgagagcacgtgaaacgagctgaaatcccacctctccagtctcccccgcccccggaaggaaaggcagggtgcgatggcagggccaggggtgggggccagggacagggaaggcgcttctgccatgggtcaggaagcacagtgccacacagcaagcagagcctaggtgtgaccctgaatccaggctggcacccttgccacccagcctgtggcttccgagccagcctgcatcaggcctgggggaggacggggcagagaggggagcctcctgagggctgaatgaaaggggactcccatgtgaggcatccatgccctgctctctgtcagataccagggccacgtgctacgaggaccagggcatcagctacaggggcacgtggagcacagcggagagtggcgccgagtgcaccaactggaacagcagcgcgttggcccagaagccctacagcgggcggaggccagacgccatcaggctgggcctggggaaccacaactactgcaggtgagggcacatccccaaggagggattccccctgtgagaagctgctacagctggggaaagattctgtcagatccgtcagggttctcccaagaaacataaccaatacaggatggatagatggatagatgatagacagataatagatgataggtgatagatgatagattgatagatgatagatgataggtgatagattagataaatagatgatacatacatgatagatagatgataaatagacggtagatggatgacagatagacagatgataggtgatagatagatgatagattgatagatgattgatagataaatagatgatagatacatagatgatagatggtag

SEQ ID NO: 129640 - DNA, 1050 bp, Homo sapiens
ctcgctagggcaagggcgtgggcatcgcctccctcggtgactttcttccttgcctgatgccacagcaaccggatgggggagggtgagagggacaaaagtttgccacaaagtttggaccaaccaaacacattggtttctttacaaaataaaaaaccagttgtatttttcttctctcccattcaagagcagtggtatctcttgccttctccatccctttgagctccatttttttcttaatcctaaccttttttccccatcccaaattgcttatagagttagcacgacatcagtatgagctggtcaccttccctgacaacgcagacatgtggggcctgggaaatgaaagagcgccttgggacagggggatttggaaatgtcatccgatggcacaatcaggtaggccctctgtgcagcttggggaggggcggggagccaggccccctcctcactgcctccactttctctgatcctgctgggccaagggctcacctttggctttggtcatcttgggacagtgaatagggggactgggaagagggcttcaggacttctgagctgactccaggttagtggtctccatgctttattgactatgtcacctaaataaatagtaaaataaagttaagctcttagtctctattatatatatatggtaacagtagaatatcatgtactaatatatactgatattatatgttataaaacatatagaaataggaaaatttaaaggatgagactaaataaataatttaaaatattttaattccttgaggccagtagttcaagagcagcctgggcaacatagcaagacctcgtctctacaaaaaaggtttaaaaattaggcagccagctgggcgtggtggcttatacctgtaatctcagcactttgggaggctgaggcaggcggatcacgcagtcaggagatggagaccatcctggctaacactgtgaaaccccatctctactaaaaatacaaagaattagccaggcttggtggcacgtgcctgtagtccccagctacttgggaggctgaggcaggagaatcgcttg

SEQ ID NO: 129641 - DNA, 1360 bp, Homo sapiens
ttttattctagagatgggacagcaccacacacgggggcagggagcatagcagagagggagcaggattcatgatcagagagccgggccagggctgcagacccgccccaatccatccgatccacctgacccacctggactcatctgtggggctctattctccaccttctcaccacaccacctcctcttccctagaatgttcacttctggtgggtggatggcagcccctcctggtctcaggggcagttgggtgccctcctccccattgttccctatgacagtaccacacagcctgctagtacatgttacctcattcgatttccaaaagctcacacatgggtgcacaggtatggttcccacatgatgggtggatgtcatggcccagagaggttgggcctcacacagctgtagcagcagagcctgggtcccagcccacacagacccagctgcaggccacctctccatctctgaggctgaataaggccatataacattatgaaaactggaagctctgaacaaaataatttttttttttgagacaagagtctcgctgtattgcccaggctggagtgcagtggcgtgatctcggctcactgtaacctccatctcctgggtccacgtgattctcctgcctcaccctcccgagtagctgggattataggcgcccgcccccacgcctggctaatttttgtatttttagtagaggcagggtttcgccacatcagccaggctggtctccaactcctgacttcaaatgatcacccacctcaggctcccaaagtgctgggattacaggtgtgagccactgcgcccagccaacaacaatttttattttaattgaaaaagaggtcggttgctctgcgagtgcacctcttcactccagaagggtcacaatagtgggggcgggagcccaggcgtttattcctgttcagtggccattcccagacacacttcaggtgctgttctcactgttcctccaggcccttgtgcctcttaaaaaaaaatttttttttccactttggaaagctgagacaggagaatagcttgaggccaggagtttgagaccagcctgggcaacataccaaggccctgtctcctcaaaaaataaaaaatgaaaaattagccagatgtggtggtgtgcgcttgtggtccctactactttggaggctggggtgggaggatggcttaagcctgggaggttgaggctacggtgagctatgattgtgccactgcatgccagcctgggtgacagagcaagactcagtctcaagaaaaaagataatcctgtctcagaacaaagagacagataaataaaataaaagaaactttccatggggcttggcgtgctggagtggctctccct

SEQ ID NO: 129642 - DNA, 1888 bp, Homo sapiens
tcaaaagcaggtcccctaaagaccagggcccagggtcagcactctggtcacatgggctggtaagagacatgtgtggatttccggtggtttgtgaccaccagctctgatgctgcttttcactttcttgacagtacctgaaccagtttgagaactgctgtggtctgcgggaaggtgccatcctcaccttgctgagtgacattggtaaatcccagtcccggaattcaggccgtgtccttcagggagagtgtggtgcccctgtgagtccctgcggagccctgcaggcagacacttcaatcctttggtctctgtggaaggggaatgggagcccagggacgggggaccctggtggagtagggaggtcaacaaggagtcagccagacagatgctgaactcaaataggtttcccttccttcctgattaactcatcaggtgaattatgatgtatagggaataacagatttcctttcccattataaagctcccctccctcctttcctggaatggccggcgctggaataagttgtcattcgaatgagttttgtcccttggcagtgaatttttccgctcccacgtaggcagttctttgccaatgagaggcgtaggaaaaactgtcctttttaatcccttgggtactgttggcttccccaaatgagggcatctgcggcaccctctgagaaggccaagctggccattcatggagaagagtgacctcagcctgcagaggtcagtggagcctcctagaccctggcgctcactcaggaggggtctgagggctgggcgctaaaggtcagcacctggccccagcctggggagacagggagagggacttgctcagagctttttgttttttttaaaaaataatctccagggttgttggtgcaagttgatagttggggtctaaggtttagagttatcagaatttatctttgactctttgcctccagatttggagaatgatgccattttcatccctccactacctcaacctttcaaagctgtatacattttttctttttgtttgctcaagtttttttggaaaattgtcaaatatatagaaaagttaaaagagtagtacagcaaaactcacataccgttcccctcggttcaccagatgttaacattctccctcatttgtaaagctgtcttctctaagccagggcctggaagggttgatggtccaacactgtcttgctagtgtgggtctggtctcttcctgactgctgcttttgacagaggagaagcaagaaggaaaggaaggggaaaagtcaagcaatgacatatttaaggttaagatccaaatagtctgacacagaaaattcccatcttgctctgtgctgtgtcttcgtccctttgggtggagttcacatggaggatacgttgacattacatcagttttatttgactcgaatgagcacccagtgctggcccaagggatcccctgcacatggcccgcatgagtctcttctctgtctacctagagcataatccatcagttagaaattccacttgttttcttgacaccctgacccaaggctcacccatccatgttttgcttggaggcttacttgattgtattttttacctcagtggccagattcttcatttgttctctgttgaattgggttgaaggcaggttagcaggttggggagtattctcttgcttttcttgggtgatttttattttgtttctctttggttaaagctttgtcaagttattattttttttttggatgtttttctctcagatatttttctttcactccttaggctgttgatgactttagcaagtagttattacgaaagtcttttttttttttttttttttgagatgatggcttactctgttgcccaggctggtgttgcagtaggcgacctcagctcactgcaa

SEQ ID NO: 129643 - DNA, 1017 bp, Homo sapiens
atccatgctggtcttgagcggtcctcccacctcagcctcctgagcagctaggactacaggcaggagccactgagcctggccgaggccacactttccatgaggtatttcaggggccactgagtaggggtcagagctctgagctccccaccctttgtttacgttatttggtctgaatattaggtttctgtttgagtcactcattcattcaagcatattgatggagtgtagtctgtgtcaggcactgtgctcagggctggtgatgcagtggggaaaaaagacaagcccttttcggccttcagagcttagggtttagcaggaaagcaagcattactgtgatgcttacacagataactaagaaattacagttgtggtgagtgttacaaagcaagagtgcagggtgttgcaagaatatatattgggtggcctcagcctggtctgggacttgaagggtaaggaggtgaaaagggctggaggtgggggacggcagggggaattccgtgcaaagggatcacacacaggaagacctgcaggtgtggctggaaccgagcacaaaagggaaagagagtcttgagttgaagctgagaacaaggtagagcacagattatgaagggccttcagggctgggctaaagttctagactttatcttaaaacctctgcagagattgatgggttttaagtgggagaaggagcaactctttggaaagcccactcctgacactgtgtggagaaggaatcacactgaacaggagggaaaagtgggtgaggtaggggcagtgaagatgtagagggcaattagattccaggagggcttagcacaaatgcccagcaagacttgtcataggttgcttgatgatggcagtagccaccacaattgggagtgactcaaggagtctgcggctttcagagtgggtctcacagagggctgtgattcaggcgcctgtgtccatatggcatgtgatttggtagatccttctggagtcctcctcagctcagcagcagtcgagcaagggggaccc

SEQ ID NO: 129644 - DNA, 1006 bp, Homo sapiens
ggccagatgcaagagctgcatgaatggacagagatggtccaggtttaaataagaagcaagggttaggttcccttggggaaaagccaagaccatttcctgttaggaagggcattggattgatgatcaacactccctcttgtcgaaggtttttgactaattttgttgggatgctaaatccataggaaataaaaggtctaggcagaaagtctcagggcagcgtaaatcagatgtcaccaaaaaaagttaattatgaaggcaaaggaaatacatgtgacttaatgaacctcacacaaactgaaggttgaagtcaggctccggggctttttcctggacttatcctctgttttcccctgtgtacttgggcaaggatcttcacctgtgtcttagtatcgatttttatgaatcagtactgatggagtatatgtgtgtttaatggtgaatattaaccatagaagggctgagtgctcctccccatcttgggactcataatctgtgaaataaaacagtctgggcctccctgcccgggtagcatcaggatagacagatgaagagaagagaaagtaatgtgtcttgggcatcttctgtatgccaggcaccatgccagaggctttaagtacttcatcttacttgactcctcagatggccctgttagaagcctattttatgcaaaaggaaactgtagctgggggtaagtaacttgccaaggggtcacacagctagaaagcggtggaccctagatgcaggcgcagccattcagaccccacagtccacattcctttgagccagtccattgagggtcctcagggaatgtggcgggtcccctggtctcgctcccccgcagatcttgcatctcagcatgcgcctaccacatcagttgacattagcacagcttttccattaggagaacgaagtgaaactcctggtagaacggatgatggctctgcagaccgacattgtggacttacagaggagccccatgggccggaagcaggggggaacgctggac

SEQ ID NO: 129645 - DNA, 1078 bp, Homo sapiens
ggtcacataaacaaacacaagactctgaaaggtagagataagacggaagactatccctggaccttgggatctgaggaaggactctggtagttattccgtggcttttctttttgtctcaaggttgagtgctggcttcggaaggccaaggcgggcggatcaggaggtcaggagtttgagaccagcccgaccaacatggtgaaaccccgcctctactaaaaatacaaaaattagccgggtgtggtggcatgcggctgtaatcccagctactcaggaggctgaggcaggagaatcgcttgaacccgggaggcggaggttgcagtgagccaagatcatgccactgcatgggtgacagagcaagactctgtctcaaaaaaaaaaaaaaaaaaagatatgagtgctggagaagccaaccaatgggcacagacaagaaagcctgctctctctacctgcgttagtttcctagacctgccctagctagttaccacaactttggtggcttaaatgacagaaacttattctctcccagttccggaggccagaagtctgaaataaaggtgtgaacaggatcacacctcttctgaaggctctagggaggttctatccctggtggcgtccagcttctgttggctttaggcaatccttggcttgtgactgcatctctgcccctgggtcatattgctgccgctttctctgtcacatctctgctgtgtatctcttacaagaatacttgccattggatttagagccaatttgaaaaatccagggtaagcactttgtctcaagatgtttcatgtaatcacagtttgccatatgaggtaatgttcacaggctctggagattatgatgtggacatcttcttgggggccaccattcagcccactacagtccaccctctggcaccccaaaatccatatttgtcctacatgaaaaagacatttattcctcccaacatctcccaaagtctcaactcatacagcatgaactaagaccaaatttgcatctatatattagctcagaagtcctgcatctcatcatctaagtcagatgtgggtgagaccccgtgcatgattcattttag

SEQ ID NO: 129646 - DNA, 1035 bp, Homo sapiens
gtggtctgtcagctcatctgatttttaagttccatatggaggtagaaaattaggccaggcgcagtggctcactcctgtaatccccgcactttgggaggccaaggcaggtggatcacgaggtcaggagatcgagaccatcctggccaacatggtgaaacatcatctccactaaaatacaagaaggcgcgcctgtagtcccagctactcgggaggctgaggcaagggaatcacttgaacccgggaggcggaggttccagtgagctgagatcgcgctgctgcactccagcctggcaacagagggagactgtctcaaaaaaaacaaaaaaaaagaaaattagttatcttggtgaaagcataagcatagatatttgcttgtatatgtattccagtttaagaaaaattaaggccttgatggatttctaattggttttccttttcttctttccttatagaaaagcagcatctgttatagcaaaatacccacacaaaataaagagtggagctgaagctaagaaattggtaagtttagttagcatgttgatcgaagagttcacacgtgtccaaatttggtgggttcccaccaaaccaaacttgcctgtctgaagcagccttgacccacacaggctgatttcactactcctgatttcttggaataacattcatgctgtttcatacacactttttcaagctcaaaatgttttcatttgggagaagatgggttaaaatttttaaaaatatatgtaattacagttttctttctctctgttacaatatatacatgtactcacgttgaatttcaacttgagtgttggtttttaagaagagtgaccaagtggcactagcatatctggtcccacctatttttctctgatccccaggtgtaggaacctatgtgagttagtgggagtgcgtgttccccagagagatcttactaataagcacatgattaagacccttttgttttatggcatttagccctgttctctgtaatttccacgaagccttgtgtactgtgtcacagtttctagagggtca

SEQ ID NO: 129647 - DNA, 2632 bp, Homo sapiens
tgactgaaagatcgttatcttttagaatttctttatttctttatttatgtttttgagatggagtcttgctctgtcgcccaggctggagtgcagtggcgcgatctcggctcactgcaagctccgcctcctgggttcatgccattctcctgcctcagcctcctgagtagctgggactacaggcgcccgccaccacacccagctaattttttgcatttttagtagagacggggtttcaccatgttagccagtatggtctcgatctcctgacctcgtgatctgcccgcctcggcctcccaaagtgctgggattacaggcatgagccaccatacccggccatcttttagaatttctatgtttacactctcccaagcatttttatggttttatttcaccccatgatagtaattatatcacttctgatctgttaagaatagaccttttaaaagtattggataacttagagatgagacatcttcagttactctgttattcacctattactccttaggttacttgtgaataattttgtgtgggtcacccaggcaaatgtaaatagctcttcatgtcttttagcagactggtatgtttccaataagatcatttaagtcctcaaagcattcctaaatcattgttagacttttttttttcttaaagattcggcaggatgatacgagttcatccatcaatttcctgactcgagttagtggcattgggtaagaactattttttaagcagacacaatcgtcagttagtttatttttcctgttagccaaagtaaattacatgctgtttctcaaaacctgtacttcaccacctctgtaccttagccatacagttcacccttccatagcttatgatctgaggccgattcttcagatagtgtctctactgtaaggtccccatccaaggcagatgttacctccttcatgaaaccagtttggttacccaggcagaaagaacctctccctcctctgaactccactaccatttcctccgtgtgcatctatttcctgctccagcttggcctcttttgtttctctgagcatgatatttatcatagcacctcatgaatttggaacaagccctcaagctttttttaaattattttttgagacagggttgctatgttgcccatgctggtcttgaactcctgggcttaagtgattcttcctcctcagcatcccgagtagcttggattataggtgcacgcccccttgcccagcttcaagcatttttaaatgaagggattattatcttaaaatttgagctggtaccaaggtgggcttttttgacactggctgaagtaaagattaacattgaaatattaaggctttagtgctctcatctttatggcatggggcattcctttaaatataatgatttgttctttaaatggcagcattttcggtgaaagttattctaaaacatattaaattcttaaacctagtatgttgaaaatgaaaatgactgcttggggactcaaggccattataaaattttcattggaagaattacaaaaatttttttttttttttagagatagtgtcttattctgctatctaggctagagtgcagtggtgctattatagctcactgtaaccttgaactcttggggtaaagtgactctcctgccttagtactccttttgagtagctgagactacaggcttgcgcaaccatgtgtggccaatttttgtatcttttgtagagaagaggtctccctatgttgcctaggctggtcttgaactcctggcctcaagccttcctcccacttaagcctcccagagtgctaggattataggtgtgaaccacaaggtgttttagagagcatctattatcctttttttctaggcaagagaactgaaagttgaatatagaacatgagtaaccatggcagagccagatttgaacccatatcttctgactccgagttcagttctgtttcttctatgctgcattgccttcctaacatcagtatcagtttctatatcacaatataatgtgatgatatttgcatagcttactgaatgatacaggtttatttgtcccgaaacactgtggccccagactattgtgcttgtatgtttatatgtgtgtgtatgcatttctttctgttcaccgctcctgctttattatgctgtaaactggtatggtgagaagagagtcaggaaatctggataatggtctagagctagcaccagctagatttgtgaccttagcaaatcgcttcatctttctaggtttcagtgtccttccttatgaaataagagagaaatttggttaatcagtaagcttccttctgtccccatcctataagagcatcttcagtcatttctgacattctgatttatttatatgaataaagtgatattttagaaacctaaatcagattttatcattgctttgtgcagtgtcctctaatagctttccattgcactcagaataaaatccaaacctatcaccatggctctaaaagcacagtagagtgtaacacctgcgtactgttccatagcacctcataccgtcacttacatcactctatgcatcctagtttttctcttctcttgaacaggccaagctcatgccagccttagggcccttgcactaattgtttccttttcccgaaacgtttt

SEQ ID NO: 129648 - DNA, 1140 bp, Homo sapiens
ttttgtgactgacttcttccacttagcatattgttgtctgagtttatgttgcaggatagtatttgaaaatataattttgcaggatataagagcggtaaactgtaaccccttgccttgtcagtagacagcagtttactttgaaaataatgccctaacttaaatatatttatttactcttgttacatgaacacatagtttatttacaaataagtttagatggagcctttgaaatattacaaagaatgacacttaaggatttttatccagtttaggaataaacctccccccattcactccacccccaattttgctgttgtcatctcagtgaattcattctagccttgatttgtgagaatgatctgctggtatggcacggacaattgttataaaaggcaatttaatttttaaggagatttaaattttacgaaaatcttttgtctacttattctgtctttatagatattttggggactttgaaaaaagaattcctcgtgaagagatgttacaaatgcaagtaagatgtgtcaaattatattctttgattagaattgagagtgtcacttggtgaaaagccattttgggaatactgacttaatttttcttctattaggatattgtactaaatgaagttaaaaaagtggattctgaatacattgctacagtctgtggcagtttcagaagaggtaacatacttcctaatcttgggttatttttgccctgatgttaaaattgcctaatatatgggaagaatttggattaaaaagatgtaatttgtggtacttcatagactcactaagacctagtagtattagttaagggtatttgtttatagatgggaatatgtaactaggggaaattcatcctgattttattataggatgatattttaatgactagttttaacgacgtttattaaatgactttaagtatattgaaatgctagtaatggttgtctttggccttttggctggatgatagtgaagttgtgggtagttttgttaatttacctttctttttcctttttttttttttttttgagacagagtctcactctctcgccacgctggagtgcagtggcaccatctcggctcactgcaacctccgcctcccgggttcaagtgattctcctgcctcagcctc

SEQ ID NO: 129649 - DNA, 1019 bp, Homo sapiens
tcatggatagagtatcttctgttattactggaagcttttttgtttgagactatactggtagcttttttgtttgttttcttcttcctgcataatcatcgtttcttccacgttgctctcttctgtttattttgatgtctgtgtttcgtgttcagggttttctttgattagtttcttgcttagaatcacacaaagaccaaatcctcataatgagaatccttatttgcagttttgtgtagttctctaattatcgtgaagtgtaatagaaaggtagggatagtgtattgctcacagaagctgctaagttaaaagtgctcagaattctagagctgctaacattaaaaacaaaaatggccttgtgttttacttgattaaaattaagccttaagtttagaacatctttaaacttggtttaaaatgttcattttagggtgtttgccagcttcccagtaaaaatgatgaaaaagaatatccacacagaagaattgatatcaggtattgttcagactttgttgctgacctgttaacttttccaaacttgtctcgttttctccctccctgtttgtatcttggagttcacattcatatctagagcctttttttactcccaagagccatatgttcttgccaaatgcaatgtttagctccaaagtatgtaaagaataatgactgtctacagactccaatttattttctctagatttgcacctcaccatgatgccttccacagctcaaaagtcatttcctgcctgggctaagttagttgtaataggtgataatgcaatttcatttctccacatctctttcagaacaaagttcacagaaacctaaacaaattacaaggttggggtgatttgagcagtctacctcatgatagtcttctcttcaaattattagaccacttaggcttatctttggtattttgttccttattgattttaggagtcctatatttgctaaacttgaaatgcatggtaaaaaaatgtatctactgtccattttttttaggttgatacccaaag

SEQ ID NO: 129650 - DNA, 1240 bp, Homo sapiens
cagaagaacctgctgcagaaagatttcccatgatacaaagagggcaaaggaatgagataatcagcagtgttgatagctctgagaatttgatatgagggtcatattaccagtagcaaagctgggcagatttttagtaggcaagatgaaaaatcaaggcacctgaggtttttgaaggctttaacttcagagtttacactaacttttggtaagcaggttgctgcaggtagaatctgtcatatttctggttaatgggtaaaattatagcactttaagaagagctttgagagaagatatattctagatgaatacacttcaattcgtatggtaaattcttattttaagaactgaatttcagaggagaaaaatgttaaccctgaggattttgattgcatcttttaacagtttctttaaaaatttccattgttgtcttatacaggtctttggtttcataagagcctgagagagatttttctaaggtaaattttgcatatatttttaaaagaagtccagtttaacatagcatctttttcatcctgtaagaacttacttttctttgaaatgcaatcagaaagatgacctctgaatctcacgggaaaactgttttattctcagtattctggaaaggtctgttttttaaggagcagactgctgtctcatacctttgattgcattaaagcattaatgatacacaggaagagaaaactgtataccccttctcacaggattaaacagcagaagaactgtgggtgaataaatactaaatggttatttttattcctttgccctgtttttctttataagatatgtgtaacacaccaacgtactgtgacctaggaaaggctgctaaggatgtcttcaacaaaggatatggtaagtatgctattgtaactttccagtttggggtaaaggttagtgttgaatgcctactgtgtgtaaatactgtgttagtaaaataagggtaagtcagcattattccacttcacaagatttaaggggataactattaacaggctattagacctcattctttagaggcagaaccccttacaagcattaaaagcaattatatacatatacagatgcatatacatgtccatatttaatgttatctggaatgtagaataatatatataacatttatgtctctttgtctggccctgaggacaattaaattagggggtagaacttttcctccctccaaacagtggcattgtttttatgaaagtgacaacataacttt

SEQ ID NO: 129651 - DNA, 1080 bp, Homo sapiens
ccaccacgcccagctaatttttgtatttttagtagaaacggggtttcaccatgttggccaggatggtctcaatctcctggcctcgtcatccgcccaccttggcctcccaaagtgctgggattacaggtgtgagccaccacacccagcctcttattcattcttatacttttgttcatgcttttatgaaataaatcatgaagtatcctatcatttgaacttataatgagtaatagatgatagtagtctatacatgtctaatcctaacaaaattatatttgtagaactaggtcatttgaaatgtttttactatatatgtggcatgtaccaaaataatatttacattgggagatgagagagaggatcttactctaaaaattcctagacagtagtaagaactcatgttgttttcatcatttgcttttgtttgtttgtttattgcagaaagaagagtgggaaattgaaggcctcctataaacgggattgttttagtgttggcagtaatgttgatatagatttttctggaccaaccatctatggctgggctgtgttggccttcgaagggtggcttgctggctatcagatgagttttgacacagccaaatccaaactgtcacagaataatttcgccctgggttacaaggctgcggacttccagctgcacacacatgtgtgagtgtttataatttattccttagtatcagtgcagttgcccaaaatattgtagccattagcatgctgagaagtgatggtactcagatttagcatgccttggtgaatatccatccttgcggtgctatcctcatagcaaaaccttgccaggaggctggtgcacgtggtgtgcaggctgtgctgctggtggtcactggcccctcagcctgcaccccaaacttgaggaagctccagcctctgtagaagaaccactgggatagagggagcccagagcatggcttacctcatggtaagatgaccctttggagatgttactgcttcctctgctgccctctcatcttgacagtatctggaagcaggtctgttttggtcaccaacaaccaccaccaaattgatctgagcatcctggga

SEQ ID NO: 129652 - DNA, 2312 bp, Homo sapiens
gagctgagattgcaccactgtactccagcactttgggaggccaaggagggagggtcacttgaggtgaggagttccacatcagcgtggccaacatggtgaaaccccgtctctactaaaaatatgaaaattagccaagggtgatggcatgcgcctgtaatctcagctgctcaggaggctgaggcaggagaattgcttgaacctgggagatggaggttgcagtaagctgagatcacaccactgcactccagcctgggtgaagagtgagactgtctcaaaacaactatataaaacaactatataaagagctatatgctgaagagaagaatccccaaacaattctacctaaaatctaagctattttaaaagctttaacaaatgtaggggactgggtaatgttgtactagagcttgtttctgagattagcccatgtacattggtagagtgtagcctttgtggctcacctgtttttactttgcaatgtctgctcccacaggtgggctcggtggtggccgtgggctggatccgctcccgcaaggctgtggactggcgcctctttcggaacatcttcgtggcctggttcgtgaccgtccctgtggctgggctgttcagcgctgctgtcatggctcttctcatgtatgggatccttccatatgtgtgatttgtcttcttccagctgcaaacagctaaagggatggtctggtgttggcgtgtgggagacatgtgtgctcgtgccgcacatacacatcctggccgtgcacggctctctcatgaccagctctctgcctcccttccaggaggctccatcccacactgttcacccaggctgcggagactcaccttcccgagctaacttaactactgtacataataatatgtattaaactggtatcgtggtgatataatgtggtgcagttacttatatattaaatatctattgtatccatagaataggcagcattatttcaaacatattcaagttgggagtggagatcattgcctagaagtcaatattcaataaatcttgtacataactatttcgatggcaaatgttaagccttctaaaaggaaagtgtagattggaaaatgattttttttccaaatgatgtttttgccttctaatatactgtaaggtaatgagcttcagaacaggcaacctgaccctgcagaggtcgcgtgctgtgggatgacagcgggacgggagctcacaagtgctttcactgaagatttgttcatatactgtgtattgattgttgtgtaatatatcatcattgcttttgtaaatacgtaaaactgtaattttttaatggtgtgcttcccttatacttttttgatcagagaattttggaaagtaccaaagaagcaggggaatcattggccagtgttacgttttcacattgtctgtctcccaccctcactgatcacgcctgccccagagcagtgtgtggcggtgacaccgtcacccagcatgcgccacgccgtggctcccaccagcagtgccaccgccaccacaccccagatcccacccaccttgcagtggcctttccttgtcatcagagtagagaatgcacaggtgttggtgagggcgtgtggctgagcactacatgtcaagtccagagtcagtttctatcccaattctccctgcagcctgaagaacggatccttgtctccaatgtcagcacaaaggaggctttttctgtgctttgacattctagcacttcagggatgagagggagggagaatcctggatgctggatggagtatttctctgaggcccacacaaagctggacacccccaggctctactccatcccattggagtctcttctttttttgatagcgggagggaggaagtacgactaatgttggagcctgaaactatggaaatgctgctaaaatttttatattgacaaacattttcttggtacttcattgtcatttttcattaatcaaccatattaaatttataataaaaaatgcccctcagaagtttgcctctgaagcctttttctcaatattgacaatttttctttcagagtgagtttccacaaaaaccaaagctatataatttggcccttgtatttttcacatacctttttttggtttcccttatttgactactgttacgggcttgtacagaaaacacaggtgagcaggaaagggaggcacggcgtccccgccccgcattcagaaacccgcagtcagcagctcatggagcagtcggttgccatgttcagggctgaggacccagcagggaagtgcaggtcttatcctttgctcaagcagccaaaaacaccctggcttgcatattctgg

SEQ ID NO: 129653 - DNA, 1028 bp, Homo sapiens
aagtgccatgaaatagtagggagtgtttccttcgcttatattcgaaaggctggggctgggcacgttggctcacgcttgtaatccgagcactttaggaggccaaggtgggcggatcatgaggttaggagcttgagaccatcctggccaacatggtgaaaccccatctctactaaaaatacaaaaaagttagctgggcatggtgtcgcgcttgtagtcccagctactcaggaggctgagggagaatcgcttgaacccgggaggcgaaggttgcagtgagccgagattgcgccattgtactccaccctgaggacagagcaaggctccgtctcaaaaagaaaagaaaaaaaaaaaaaagactggaaaatgagaccttctctaacccttttcaggaagagcactgtccatgacccatggctctgtgaaatcgcccatctccaacggcaccttcggcttcgacggccacaccaggagcgacggtcatgtgtaccacaccgtgcacaaagactcggggctctacaaagatctgctgcacaaaatccacatcgacaggggccccgaggagaagccagcccaggaaagcaactaccggctgctgcgccgaaacaacagttacacctgctacaccgcagccatttgtgggctgccagtgcacgccacctttcgagctgcggactcatcggccccagaggacagtgagaagctggtgggcgacaccgtgtcctactccaagaagaggctgcgctacgacagctactcgagctactgtaacgcggtggcagaggcggagatcgaggcggaggagggcggcgtggagatgaagctggcgtcggagctggccgaccctgaccagccgcgagaggaccctgcagaggaggagaaggaggagaaggacgcacccgaggttcacctcctgttccatttcctgcaggtcctcaccgcctgtttcgggtcctttgctcacggcggcaatgacgtgaggtgggtgctttcattcattcattcaacaagggtccttgaggctccgccag

SEQ ID NO: 129654 - DNA, 1062 bp, Homo sapiens
gtgttgtaaaatctcatggtaatgcagtgatgctgaagtcatctgactctcttagaggatgcttggaggttggaatctcaaattatttgttgaatgtagccagttagggccaaacctggacttggctgtagtgagcactatgggttttgaggaaggagatgctgagctctgggctttggtcctccggaaccggcttgacccaacagatcttttctgtttccaagtctgacatcagctcatgtgattccagggctttaatgtgtctgctggccacaacagtgggctctttgacattgcatttgtgtgggagagatggccccagccaatgccatttctgcagaagtggagcagatcacaggcagtgacaacgcccatccttttggccacactggggtttgggaagagtttcttgtaacagtattttgtatcattttgtctgtgttggctccaaatgctgctgggatcctgaccttccactctgtctccttgtcttcctacaggaagaccctgttcccaatggcctccgggcactcccagtattctatgctgctaccatagcaatcaatgtcttttccatcatgtacacaggagcaccaggtaaggatcccttggaagcatactccaggggcaaagtgcattgtattctaacagtatcagtttatttggtgctggtattgttggctgacagtaaaaagcattactcatggtcattatggaataggtgctggagttgttggctgatagtaaaatgcgttactcatggtcattatagaatagtaaaaagagtggtaaatgcatttacttgtcttaattaaatacccaagagatatgtagagtacaaaggcaacagactttcaagttagaaaaaaaaattaaatccccactctgccatttacgcagctgtgttgccactatagcttagcctctctgagcctcagaacctgatctaatcccacaggcctacagggttgtgcaggggtcaggagagggtgtggagcacctggggccatgcctggcacccagtgagcgggacagtccacacatcagcaatgcccagcggag

SEQ ID NO: 129655 - DNA, 1027 bp, Homo sapiens
gatggcaggaatgaaagtacccggctggccttggcaaaggaaatggaagttggcccagcttttaaataacccttactgttggaacagcaacagagtctccatatgtgttgataagaagggcaggcagaaagactccgtgggaggcaggactcaggatgctgtcttctgaggcccgagcttggggcaggggtttcttgaccctgcattggcagtgtggtcagtggtgtgtgactgtgtgttgatgtctgagtgtggccataaatgtgtgaaggtcagctctgccaagtcacagggcttgttaggttctgaattaaaggtaaataattctggaaatacttatgaatgtatgtaatacattttgtttatcattgtgttctatgaataggaccataattatgaatgaattttaacattcattagattttttttttaattattcagttgcttcttggtttatatctccactgttgtctggtttcatgtctggcctgctgtttgtactcatcagaattttcatcttaaaaaaggtaagtggggctgctacttttaattaaatcttaagaactatttttggctctactcagtagaaattaataatgagaggggttagaggaataattgtattcatacattgtcaaggcacagcaccctgcagttagcgtcagatgttattataaatagccagaaagagccaaggtaaattacccagagagtcccccagaaacaagcactgcaaatagtgtttcttggctctgtactttagttcattaatcaacactcccaggagttgtgctgagacctcaaaaaggaaaggtaattatttcctgaatgttaagcagaatagaatgagatagtgttaagattttgaaactgtcattaaaaaacagctggagaatttcctcacccaaatgtgaaggtgtgttcccttttttttttttaatggagagagcaaggttgaaacactgacgcaatttgaggaaaggataaaaagaaggaaatacacctattgggtacatcttgtctaaaa

SEQ ID NO: 129656 - DNA, 1040 bp, Homo sapiens
ctcctccaggatgtattttgtaaagtcagccacagaaaatatagcagctttcaggaaggacaaatcttatggtctgaattcaattgggtgggttgatatcactgtctcacatcatgagattattttaattgtaagaatataggctggtagcggtggctcacacctgtaatccgagcactttgggaggccgaggcaggcggatcatgaggtcaggagattgagaccatcttggctgacgcggtgaaaccccgtctctactaaaaatacaaaaaattagccgggcgtggtagcgggcacctgtagtcccagctactcgggaggctgaggcaggagaatggcgtgaacccaggaggcagagcttgcagtgagccgagattgcgcctgggcaacagagcaagaccccgtctaaaaaaaaaaaaaagaatataaaccatatcatgtattttctaagctatgaatccgtgctatgaaacgtgctccaaaccctggctttctttttaaaaccactagtccccgaggagcccagggctcagatgtggaggcttaaggaggtgtccgcgggtaggcctggcgctgccatggagcctgatatgggtttggcagcacaaggctggccccttctcctcccaacgcacgccttaaggattgacacagggtcacagccagcctcagctcaaaggtcagcacgcctagcactcatggcagcaactgtgtgtgttgcttcatggactgggtcctgcacagccataaatgatcctcctgcaactcagatgcctttgaaggaaatgccaggggtcccctgaaaagtgctgctgctgccaggcaaccaggtttccagaattaacgtttgggattaataacgtgcccagcttatcagccaggccctttgttcccctacagttccatgggagcttttcaacaactgcttctgaaagtgatctctcccggttgatgcttttaatactcactacaaaatctgatctgcttatgaaaatatttgaagtgaactgtagcctagaaaaacatgaaacctagaaaag

SEQ ID NO: 129657 - DNA, 1436 bp, Homo sapiens
catgcaactaaatttctcatttcttaatcttttgctcatttgaggcacttgttcctctctgaaaataatgaccaaatatgtttttccgattgcatgaaaaatgtaacctagtaaggattactattagtctgtaattattaagcatgcttcaactcctgacaattctagaaagcaggtttttttgtgtttttggttgggggtggttatcctaattataatcttccttgaattgctttatggttaggtccgtcacatgccaaagttagatcccattagcaggcttaaaacatttatttctgaaagaacaaactgttacaggttgctgagtataattgatttcttttgtttcctttctgctacaggaggagacatcacagctttcccagatcgggaggaaaaatatggaatgtgttttaccgctgactgaacacaaccaaatgaactgtcctgacagtagtttgcaaaccagcagctagcagtttgtccagcctctaacattgtccagcactttccagagcaaactcactgtttacaagaactcttggccttacgaagtttataacctcaagctttgtttatttaaaatattcctgcaaaagaaaagtacccggcacccactttccaaaatggccatggatgagtatttgtggatggtcattttgggtttcatcatagctttcatcttggccttttctgttggtgcaaacgatgttgccaactcctttggtacagccgtgggctctggtgtggtgaccttgaggcaggcatgcattttagcttcaatatttgaaaccaccggctccgtgttactaggcgccaaagtaggagaaaccattcgcaaaggtatcattgacgtgaacctgtacaacgagacggtggagactctcatggctggggaagttagtgccatggttggtgagtagcctcttctctataccgatgggacatccgcccactgacccgcttccctgcagtactttgcccatatccataaatgtgatttttgctttggcttttcaaaaactggttggatgtttcacatttactctcttatttttgctttctgcatattaatttatgatttttaaagtgtttaaatatcaggcaaccatttattttctgaacttttgagcaaacttggttgctaaaatagatttcagctaagtgaatacttttcagaaagtacagaaaaagacctttgtagaacagcgctttattattttagagttgtttgaaggttgtctaagtgaatgtgttttcaaggttgatgtatgaaatttccaggaaggttgatttagatttttttcttaaggtttttcatcaattaggaggcaatgttttgaaaacttggatgtcaaaaataatatttattagtctaacttttatattcacagtttaagttctaaagaagttaccaaataaatcttaagtgcgtg

SEQ ID NO: 129658 - DNA, 1031 bp, Homo sapiens
gtccaactgataaagctagtacaccaatatgttaattatggttattttgcagtactgggccagtagcatttttccttgttttactttctcattttctatatttatcaaatttgttatgagcacatattattattagttttgagacagggtctcactgtcatccaggctggagtgagaggtgccatcagggctcacagcaaccttgactcccccagcttgagcgatcctcccaactcagcctgccaagtagctgggactactggcacacaccacgacacctggctaattttttaaatgttttatagagacagggtctcgctatgttacccaggctggtcttgaactcctgaactaaagcagtcctgccttgctctcccaaagtgctgggattacagagataagccaccatgcccagccaatattatttttacactggaaaaatctgattcatttttaaggcagagacttgggatcatggcttttggagagacacccacgtaaactgatgtgtactggtcattgaaaaaggttaattctgttaattctggagtattagaggtatccaggaagtgtctgctttcactaccacactggatcttaacaaactctataatctgatctgatttttggccaggatctcagactcagtattatttggagagcaatggcagcaagctggggactttagcagatttttaagtcaattaaaataacacttctggtgttatgattatccattaaaatttcagaagggcccggagttcagaatgttaaattcaaagcagtgaacagtggaaccatgtgcagtaggtctcaggtaatattttgagtgacagtgatgagggatgatggaaagaatgaatcccctagccagtgtttccagggcacttatctgtgtagtatcacggtgtatctcaccagcgttcactacatgtgagagcactttaagaaagtactggctccctcagtcatttctgccagacgctgccaggatgtcctcatggcctgaatcagaaggttattgtgggtaa

SEQ ID NO: 129659 - DNA, 2370 bp, Homo sapiens
ttttaaaggtacactgtagttgggtattagttttcacaccagtattcacttgacctattgtagttcttagtcctgcaaaagagaaaagctgattcgaatttatccattgtttaatttcacagacgtttctgtaggtttttctactactaggaagcatgtgctttatgatgagttgctaaaatgcgcataaacacttgaggagtgttcgttttaatgatttacgtgctgtgagagagtggcagcggtgagtgagagcggagaaggttttcattatataagtgttagtgccggaattcctcgtgtttgccggtgctgcgattctcttcgctgcttctaccccgtgtgcctggtgaaatgatgctggctgtgactggttatgaccttgggcgacaaatcatgatgagctctatgcagagtcacacactgggggtccaggtgcggagaaacagggcagctttgtggccgcaggaggagtccaggagccgagcccgcctgcccttgccctgctgttcccacgccgcaggtgaccgcacgtctcccctgcagtcctgttggagccactctgtccagctgcccgtgctctcatcctactcctccacgtcttaaaatagttacagacccagaggctctgacagaatcgctgccggttgcagatttatttcactgttactttctgcctagagggatagccttctgctcagaagctttgaggggtttctcagggacgcagagaggaaccttttctctgggacctcttccctcacatgaggttttaatgggtctcttgcctgcatggctaaatgggaactgcgctatgtaacaggttgcctttcggcttggagcccggatgctcagtgatcacatccctagaatgttctctctctaaaggaaatcttgtcggaagaggctgtgttatgtgagttccagctgttcatctaaagtggaaggagcagtgagcaggagggatgccttcagcttccgtccgtcttaaaaacaagtgtaacataatgggatatggccctcaggaggaaggctgatttctcgggcatacggggtactgctgtcattatttagcatgtattaagcaccccacagcacatgcggtgcacaaggaaagcatagttccaacccacatgctacaacaaggcaggacacagaaactgggccccctgacattcagtaactacactggcagaaaaaaaaatgtgaaaatgaagaaaagggaaacaagatgagtggggtgggttgaggatacttcagcattcagctcctctgagcttttgccaaagacgattaggacagacagctgtgccacctgggctgtgccttccctttctcctccatagctgggaagtgatggggacaagtgacaagactgaccccagaagccttgccccccactctcagtcctctgttgcaatcctcctacaaagaggagaagcttcacagtttcacttgcacctaaaactattattattatgtggagggggtaaacttgttataaagtgcaataaatatcaaagcatctttctccataaaatgatatttagatagaaatctggagttccagattctcccttcctgaactggtttgcaattcaacaagttacttaaccctgcactggtttaggatattgagtcaactgtaatattagttagggaaatgccttcagcttctcagaggaaaggcattatgaaggtctactgagcattattgcagcttgtaaaggagttagaagcacatgaatcagaagaagggctgataggaaggcttgggtactggggagtaataacatgagcggcctgcgtggttctgtgagtctgtgagtccctccccccgtgcccaacctcagccagtctctaaggttctgggtctagttcatggctccacaacaaagagacttggctccacaaagaacctcaaaaaaaaaaaaaaaaccaattgagggttggaaaatgatacctatgataagagggtagggaacttctattatttagcctggaagaggaaacaaatgaccgggagactcttgaattgttcttcaagtatatgtgtgtctcagtggcaaagaatggtgacccactggtatctatttccatctagaataaaagggtcaggtccagcaagggttgggctggaacagaggtgccgacagtggggaccctgtttcttcagcgtcagcaccgcctggaaacatgtgagaaatgcagattctcaggccccacccaggccctgctgaatcagaaaacatggggtagggccagcagcctgtgtttaaaaaatctcccaagtgattctggtgcacgttgacatttgaggtctgctggatgagatgcaaagatggagggtattataaaatgggcaatctg

SEQ ID NO: 129660 - DNA, 2429 bp, Homo sapiens
ttaatagtttttatgattattacacattaaaatgatcatatcttggatatattgagttaaaatatattattaaattaattttacctctttattgttacttttctaaaagcagctactagaaaattttaaattatacatgtaactgctcatagaaggttggtatctgggttcattcattagtggacattcataaacatagtaattttctttaatttcatggattcgttgaactaaagatcccataggtcaccgccttccctgtccctcctctaccaccaaaaattaatgagaacaaatgggaagaatttactctgcttttcaaggtactctgatacagatttttatctactgtcataagtatacctagaacaaaagcactgttgactcaagtagtttcactaatgaaaaggaagcagcagaatgactaatgtaaattggaggagactcttttatttggaatgctttggttcttccactgtggaacaggtgtggctgctgttgaaacagcagagtcatactaggcatatctgacatgtgaggaaccggagcattgctcaggggcccctgccttccaatgaatggatgtaggatccatcatacatcagattgctcctttccaatacaaactctgatgcagaaatgcacttggtgtatttgctttttcttactttctggtttagggcagaaataatattttggcttagagacttttgtcctgaactatgacataataggatgagaatatcgtgtcaaaaatagccttacaaggtcctttttggcattaagacttctggagtgagtttgcagtggattattgagaataattctgttcattagcagctagccatctttgatgagtgctgacttctctcctttcagcacagagcaggaaatgcctgcctcccatgactctgggttggagtgaaggggaatgcataccagccaccctcttgcagaggtggggcaggtgctggcacagagcctcaggttaggccgaggggatgcaatctcagatcagcagccagcagtgtttgtaaacaacaggagggagattgtgctggtgatgtccaactcacaccaatgaagatcaaccggtttgtgctttgggcagcaggctgcagatggacagtgcctcctgagggcatcgccatgttttagggatccatgttgcaggatacctgtctgcaagagagagtcaaggagggctttttaagcccctggggttcaggcctggcatctgggtgttaagtagagtgaatctcctgaagtccaaactaacatatgacattttaaaatgaggaaaacaaatggctctgaaaaggtctataggattataggtaagtggttaatacggaagatgttataaaggtctcaggaggagatggggtgatccagggttggttgaagtcgttgaaatggaattaccctgtcttttacctgtctgtgggaaaaaaaaaaaaagaggaaaatgacatctcccaaagatgcttggagatttgattgatgtttgtaaagtgctttgatatctttcatagagtgttcaataagagcaaaatatgtcatcagaacttagtctaaagcaaactagtcccaaaccgtcttgagtagatactaagcggttttgtgtctttgttataagttgtacttatattttcgagagaaagtttttcatgttctgattttcttttaagtgtcagctgtatgtttggggtctttacctgttaacttgagttccaacatgctttgtagatggtcagtcacctacagaggacaatttttctagccaaggagttaaatccaccttaaaatgcttcttgccaaggacaatgcctttgcaaatatttgagatgtttattctcagttgtgatttattactgaatctgtgtcttcatagcgactccttgggaggtgcaggaggaggcagagccagaaagcaagtccctgcaatcagttcattatagagaaagaaaaagcttttatttcaggattctggtggatagacttactgatatgtatattctgtgtctatttaatttcacgtagtgctgcatctaatcacgctgtttaaataatcggacagaatgtccttttgctttgcttttgcttgtgaagagcacacagcactgccaccttgttgccaaagtttggtctgatttgaatgtgcttaaaaatcaagtgaatgcctgttgggaaaaagcttactccttctctttgtcagtacttgcaaaaacaacttaaaagaagttagtattattggactgaattcagtaattagcataatcatgatgctatgtattgttcaccagggcacgccccttggccgcatttcccattaagaggacaccgatgttgtcctagtgaataaatcccggcacacatgatgcaaatcagcgtgttcctgcctgctgcttggctgcagttaattttag

SEQ ID NO: 129661 - DNA, 1062 bp, Homo sapiens
gcctcaggcgatcttcccacctcagcctcccaaagtgctgggattatattacaggtgtgagccactgcacctggctgaagatgcctttctttctttctttttttgagacagagtcttgctctgttgcccagggtggagtgcagtggcacgatcttggctcactgcagcctctacctcctgggttcaagcagattctcctgcctcagtctcctgagtagctgggactacaggcatgtaccaccacgcctagctaattttttttgtatttttagtcgagatggggtttcaccatattggccaggctggtctcgaactcctgacctcaggtgatccgcccgcctcagcctcccaaagtgctgggattacaggcatgagccaccgcgccgggccagcctttcttgattaacacaactggaagcctcttctttgcttatgttcctattggaatgaacttttaacttttggaatgcttactaattactcccttatatgataagtttatggaccgtgggacagtgtcatgactcatcacattatgagcctcttaaaggcagaactgtcattgacaccactttctgctgtggtcatgggcatcctgccacttatacaaatcttgcaaatgcttgggagtttcctgatggtgctttaacagatgtttgttaaataggtggctgttctgaatgtagagcagtatgaaagccccaagagaattccaatataatttaaaaaatcaactatgttaaaatgagtattcaaacaacagcagtcataatgctgcctttactttcacaatcctgataaaaactgtcataaaattatgctgaattagctatttatcaaggttttttaaagaactgtcttgaagagtttgcgtcttttttttttttttagctgaagaggataccagtttcttctgtgtagagttagagctctctgtttgtatgtatgtgaactgagtccgtttctgaagtgtgaagactgcatcgctgtggatcacactggtgtagccctcctgagcatgcagcctttttggaggaatgtgtgttagtcagcttttgctgc

SEQ ID NO: 129662 - DNA, 2140 bp, Homo sapiens
ctttttcatacctgtataaaaaggcaagatcaaaatatatgaagtttatcatctaggacgaggaaagttaagaccagcttttaaaatacccccaaacattgactgtctgaatataacagcataaagtcatgtcatatgtgtctcccaagactccagcggtttctgaatgagaggtggagaggcagccactgtgatggtggcagctgttaattctgcccagtggattgttccaactgagttactgatatgaggatgcccttatatggacagttctccagacgttatatgtttctaattttgatctcacccctggcctttgtgttttagctgctgtctaatccttctcttggctatttttaatactttttttcctccatgcatctcagaattgtccagcattctaaagaatggcaagttaaatgtgatttattcttcctgttttttcagtgcctaggattagtttaagcataaaagtggttttgagagagattactttagtaaatgatctcagagatactctgttggatactgtttgaggggtgttttgtgttattcgttccttatcttaatgatttttcctgagcactgaccaccacaacactcttatgagaagaaatggtgtatttaaagttgatacaaagaacagtgactactaatctgatgttgtgatttgggaatgcatagttctgatctgctgtgtatgaacaacttgaatgctctttgtctaactagctgcttattactttaataattttaaataagaagggcaagaattttctttttcaaagtcacagtgttggttggaccttataaatatgttgcccttttacatttttatccatcttattgaaaaagagttttttgggctggacgtggtggctcaggcctgtattcccagcactttgggaggccaaggtggccagatcacttgaggtcaggagttcgagaccagcctagccaatatggtgaaaccccatctgtactaaaaatacaaatattagctgggtgtgatagcgcacgcctgtagtcccagctactcgagaggctgaggcaggagaatcgcttgaacccaggaagcagaggttacagtgagctgagatcacaccactgcactccagcctgggcatcacagtgagactccatctccaaaaaaaaaaaagagtttttcaagtttttttttttaagccgtaaagaaatctggatctatccagagctgttctttatggtttacataaaaggttcttagtttgggaaactaaaaaggataattttcagttgttttcaaagagcatttttaaaaaacagatctgagtcaaagaagtgggaaatgaatcctgtcctggcaattggagaggcaagaatataatgtcaaaaagaagaaaccaactcttaaaatgaaagcattaatgtctaaaatggataattggcttttatttcgcagtctacaatcaaccatgactatcccagtactgtttgtccactcctcttttgcgaaccatccccctgtattatgaaggaactggtctctggtatttctcagaatggtctcttggattattgtaattattgggctattacagttctgagagctgagttgttgatccttctgggtttggttttatggtttttttggtggggttttttgtttgttttttgcttatcacagctactttgaaaacgaacactcatttttttagtactttttaaatgaaatacttagtacctaaggatacaatcatgtacgtttatcaagagacctgtggaagtagtcacctgctgggttcttatagccaagtgcaactagatcctcttataaatattttatctcttaatttgagcttgactttgaactgcttaccctaacagtgaccacttcttttttttttttgagatggagtcttgctctgtcacctaggctggagtgcagtggcgcgatcttggctcactgcagcctttgcctcccaggttcaagcgattctccttcctcagcctcccgagtagctgggattacaggcacccgctaccacgcccagctaatttttgtatttttaatagagatggggtttcactgtgttggccaggctggtgttgaacttctgacctcgtgatccgcctgccttggcctcccaaagtgctggga

SEQ ID NO: 129663 - DNA, 1349 bp, Homo sapiens
tgccctgtttatcacttggtcccacttttatatttttcctcttcggtccagaatttcttatttagtttcttgtattttgcctactccctcccttctccatgattcagcctagtctttccgtcctctgtggacttgggtgtgccttcctctgggccacctcgtcttttgctgctgttagccctcccgcctgcgcacctgccacttcaccctcgcctgtggtccacttacgttccactcagcccggtcagtcctgctttgttcttctccaccgccttggtctcccgtgtgtcttatctagctctggttccttctcgtctccacatttattttgttttcttcctgtgcttgttagtccttgtgcacttggtccttgagctctttttctattaataggtattactagatggatttgttgtctgcctttacatagaacacacatccttactgtgcatttcctgggtagccaggatgaatcaattattattaacttcccttcgaacattgagcttcctctgttttctgtttctaagaattagattagtattctagaagactaatactactttaaagacagtcaaaacagtcatacgctgccatttcagccctttatttaagagtttgtgacatttatcactcccttgaaagattaaagaacacccaaagcaagtttggggtggaggtggggaaggcaggaagagaaaggtaagtgctataaaaggactcattgttaatttctagaaattggactgagatctgaaagcataagccttaacattttttagataaacggtccctgaaaagaataaaaagtatcagtacttccgttaactagctttagtattgggtcatttgtagtttacattctcctttaagttttaagaccttcagtagttaacaaagcagacagagactggccaggcacagtggctcacacctgtaataccagcactttgggaggctgagttgggtggatcacaaggtcaggagattgaaaccatcctggccaacatggtgaaaccccgtctctactaaaaatacaaaaaaaaaaaaaaattagccaggcgtggtggcaggcacctgtagtcccagctactcgggaggctggggcaggagaatttcttgaacccgggaggccgaggttgcagtgagctgagatcgcgccactgcactccagcctgggtgacagcgagactctgtctcaaaaagaaaaaaaaaaaaaaaagcagagacttaatcttgtaaatactcattttatttttgagaggcttaatgtctccttaaatattaacctgtgtcattttgtaattatactgtaatagtgtcagaatgccattaacaaccaacccttt

SEQ ID NO: 129664 - DNA, 1780 bp, Homo sapiens
ctggacgtgatctattctttaactaggaatgtacagcagaatgacccagggtttatcctgaaagtagcagatgtcttcacttaactcctgagacgcaaatttggtagagctgctgccacaggccccggacatcagtattaaaccatccttaagtgattctggtgccttttctccagtaagaagaaccagccctgtattttatatttaagaaaacctgggcaaacaaatgacttgcctagatttggttcagtggtaccaagatttagtcaccagataatacagtttcagaatcctatggctggaagaagtttaccaagtcatcaattcagtagttcatcttacagcggagtgtaaaccatgcttttcaattatttgcggttcttttactgtataccctgtgatgcccttttaagtttttttgaaaatattgtatacttaaaactgaagtgaaacattaaaatttcttattagaattatttttcagtcttagctgaaatacaatattgtatgaaaatttgcactgcattattagtttttttttttaatctagttgattttcaacttttcttttttaaaggcatctccttggaaacaatgccatctttgaatgtgagagataaacctagtttcagcatgtctgcagcagagaccagtacatcaggcttattcccacaggaagcctcctaaagcctgtggcgcggcaaccatttccaggactaaataataatgtgtcagatgcctgtgagtggactgcctggccaaatgactcatgaagatattcacggaagaatagtcaaaaaccaaagaaaaggcatattctagaagcaccttcaattccatcgaggatttttgagcagctgaagaagaaagttctgaaaatatgagtgacaggactccagcacattttttttagttgtttcttacattatctttgttaacccatccgcttttgtgtataatattaagttattttccactactgcaatggctagtaatttacttaggctcagagttttactctgtatggacagagaaataggaggtaacaacagtgggagaacaaataggaacagttcactgggatgttggtccccagaaattggctttcattgaataattcctaaagggtgtcgtgtgctgaattgctttttcatagtgatgtgctgcttcttgttcatactcttatgactttaatttcacctttatctactcccagcctctgtatatgcctacgtttttaaaaataatttttggcactgaagatctgattaccatattttttcagtttaaaaattaaatcctcgcaaatagatctttggtatagttgcattctaccctaggttattttctaggatcaagaatagaacaatttctgttctttccagcattactctttactattcatatgttcttgttcagtgttttgttgttctcatattctaggtggaaatgaagggtaatctctatgttctattttcagttttctaggaaaccagaaaaacatgggtagtagaaatgtatagaaaatgtatgaggtctcttaaccattgtgttaaacttgcattaagcttcttttttagcaatatcgatgtcagtgttacctcttctttcctttttatttattttttttgagacagagtctcattctgtcgcccagactggttggagtgcgatgatgcgatcgcggctaactgcaaccgctgcctcccaggtacaagtaattctcgtgccttgggctcccgagtagctgggatttttagtagagaacaggtttcaccat

SEQ ID NO: 129665 - DNA, 2673 bp, Homo sapiens
aatttctaagtgacattcctaattaagggtaaacaaacataatgaaacaaggctaattttccaataccaaactaaaaaaataaaaaacagtggactggctattactttgttgatgagtctagcacagttttactgggcatttaaatgttaaggatgttatttacattgtagctagttgtgaaagatttgtgtgtctaagtttttagtttgcctttaaatgtcttgaacatatgcttagtattgagtccagtactttgtgcattaatagtaagttttttgattggatttaattgaacagttttggcttccttaattttattttgaagatagaatttaatgatttgtgtaggcataacagttacaattaacagtgattccgagatgagcgtagggtttaacttaacagttcacattttcttgcgagttgaaaggactggagagttggatgtgtgtcttctttgtgattaaaaaagcatgctggaacttagctatcagaagattctggtggtccatctttgggaagaggaaaagattaagaatgctttgctagtcagtatttacaagagggtttctttacttaaaggcattttctctttggggaggggaggagttgagagttgtcattaatggaaggatcttagaataaaaaagatgtatacatgttttcctttggagtgaatttgtgactggagatggggtttcactgtgttagccaggatggtctcgatctcctgacctcgttatctgccctcctcagcctcccaaagtgctgggattacaggtgtgagccaccgtgtctggcctatgtgctttttaaagatggaactgatttagaatgcagtatattacagtacatgaaaaaattttggaatttctgtatgtttttcactgttggaaagccatagtgagtgtaataacagcattggctcctgttcataaggcatttaaatgatgtgtttcctatgacaggaagacaagcgtttctcattccttcaaaatttggctctcagatggagtgccctttaagctccctgaatgcagggacttcttctgtttcactcattgtcttttttctggggcctagaacagaacctggcaaactgagagtgctatgtaaacctttgtagaatgagcactttccctggggaatcctctctccactttccactagtgaagatcccacctgcttttaggtgcagggccactccagcctgactttctctgcaatctgcagcccacaatgattctttgaacattaactgtgtataccacactctgtgacagtgaatcttttatagctttatattgatacatgagtgtttcatgtattttgtttcctcacccaaaatataagctcttcaaggctacaggatatcctatttttgagaattgccttggtatccagtataatatataatattatataatacctataatatataatgtaatatatgtaatatataatatatataatatacatgtatatatacagagtaggtttatatttacctattaaatgaatgttacataccgtggggaaacatcaaagatactcaaaatggtaggttatattttagttaggcaaacctagtgtacacatgtgaaacagtactagaatttggagctaaataagagttaatacttatgtcgtgcttaaaatgtgaacctcacaacaatcctttgaagtaggtacaattatttcctcatttttcagaggaagaaatggagacacagcaaagtaattaagtttgttgctcaagatcgtaccggaaatcataagtaggcagtctggctccagaggcggtgtggtttctctggggagctttactttatacttcgaagggacatctaagcactacttttgcagctgtaagagatgctcttttaaaaatttcaaagtagcgtaagagattgcagtgtctctaaactgcagaaggaatgctggattttctatatagaggacattgataatggaatggttaaggggacattatatattgaaatgactaaagatggtggagagaaactgaagtttgaatctcaaagctgaggattatgattttttatagatactgaattctagaacagtgattcaccaggacataggacaatgattgcttgttactaatttagtatcaaaaaacttatgccaaataaaataatattgaatgacactggatatcttactgcatttctttttttaaacacttaccagatttgaagccctagtggtagtaatttaccttaatgtgggtattactaaaggtttcctatacacttctgtccatttgctttatctttttgtggaatctttttttttttttttttttttgagacagggtctcactctgtcgcccgggttagagtacagtagtgtgatctcactgcagcctctgcctcaagcaatcctcccacctcagcctccagagtagctgggactacaggcacgcaccactgtgctcagctaatttttaaattttgtgtaaagatgaggtctcactatactgcccaggctggtcttgaactcctgggctcaaacaaccctcctcctgcctcagcctcccaaagtgctgggtacgtcagtgagccattgtgcctggcctttttgtagaatcttttttttttttttaaacagactccggctctgttgcccaggccggagtgcagcagcgc

SEQ ID NO: 129666 - DNA, 1254 bp, Homo sapiens
ggagccgggctcctttcccctaccgcgccgcgacccccgcccgggctgcgcgcgccgcctcccgcgagcccccggcccgactcccgggctcccgcgggtgggggccagggctggtcggcgccggcggggctcgcggcggcggcgggttgcgtcccccgcgcctgctggcccacgtggacctggccgtcgcttgccgtgcggcgcctttgcgaaaactcgacggaagtggcagggaccgggcattacctgcgagtgccgggcgcctcctgctccgctgtgcgcgcttggggtgggactcggcgggggaggggtcgtgtacattgtcccaccaggcgcaatgtagccgggcggcgcagaggatttcttttttggtcttgagagcatagagtcccttttcatattcacgtgtactcttaagaaagcgtctgttctccaaactggctttccattctccccgtcctaaatggtgcgtggctgacaccgtagtgttttcaaaactggatatggccaggatgctatagcattgtcagtgtaagtcccttttgggtatttttatttaattgtgtagtgacttgacagaagtgtttcccagcttgacctaagtaatgaatttgcataggatttcagcatcagtatggaagtgatcagatgtcagtggctggtgccaccttgcagataaatggccactggtccacgtagttcgtctttactatacattttgattaagttctctaggaccagctgactggtaattataagtcacatgaaaccctgcagagatgagagcttacattgaacacttcttaacaagttttctattctttgtttcatctgttacaattaaactcaccttcgtctagggtaagaccattactttacgcaataacatactagcttaatttacggtatttatatgtatttatatatattgtatatacataatcatacatataattctataacatttagtttgactctaaagttggaaaatcaggaaaataacaggtgatgttgagtactgattgtttgccgggcctgtgccaaatggtgtgcatgctttatgtaacttaatctaaaaaaatttgaatacgtgagtttgatttcagtgtgtccaaatgtgaaacgtgtacattattgttattgttttgttttttttgagacggggttttgctctcgttcaggctggagtgcaatggcactgtcttggctcactgcaacctccgcctcccgggttcaagcgattctccttcctta

SEQ ID NO: 129667 - DNA, 1083 bp, Homo sapiens
gatcacaaggtcaagaaatcgaatccatcctggccaacatggtgaaagcccatctctactaaaagtacaaaacttagctgggcgtggtggcgcacgcctgagtcccagctacttgggaggctgaggcaggagaatcgcttgaacctgggaggcggagacgcagtgagccgagattgcaccactgcactccagcctaacaacagagcaagacggcatctcaaaaaaatttttaaaaaattaataaatgagataaatagataactagagctaatctttaatccaataggataatacaattgtaacatctttaataccaatgtaagatatttcctaagctggaaagtttgggtgcctttatttatttaaaaaatcaggacagataattgaattatgccttcttcttaggtttcctcttactcgacccagtctttgtaaagaatgggaggcagctgtcagaagaaaaaactttaaacccaccaagtatagcagtatttgttcagagcactttactccagactgctttaagagagagtgcaacaacaagttactgaaagagaatgctgtgcccacaatatttctttgtactgagccacatgacaaggtaatatgcattttaaaatattgggttgctttttgtttatcaaactgatgtgttcattgattaaaatgtggaaaattgagttagtgttaagagaataaatgtgcctggaaccttgtagttaacagtgatacacttctgaaaacacaaaatgcagtttattaaagataaatatcctcacactaagaaacttagtccagctttgtaacttagttaaaaaccactctgtactgccagttatatattgataagttttgggttttctttatcagtgacagtttagtttcaaagcatttttttctcctcagtgcttaatatttaattagatctgatgattcattttgtctctttcctgcaccgtccctctacttcaggtagaaaagtttattcaaactgaaactgttttctcattttggaatgtttctataccactgattcccaaaaaaagtcagtatttcttaaattccacagattcttttattatt

SEQ ID NO: 129668 - DNA, 1049 bp, Homo sapiens
gctacgatgctggcctcccatccacggcaagggcgaaaagtagtgatttcttcgtttaaaggcctttgtttctattttaaatttacccctaagaccatattaaaacacctggctgctctgtgaccctggtggtggcaaaacccgcgccaccctaggcatcgcccgtgggctccgaacgcgtcaacccaggccgtgagcgaagcctgcaaccagggcctgttccaggagcgcgagaaacggctgccgcggcgacgcgcgccgagaacgcgcgatcgggcggcggttcccagcgggacgcggtgggaaacgcccgacacggccggccccagaccccacccgcccctcgcgcggacacgcgcctggctccgcccccggccccgccggccgcgcgcccccaccccggctgagaccggccccgcgaggcgcgcagggtcctcacttgtggaaagaaacgggcttgtccttgtcgtagcggttcttgcagccgtaggcggagcaggactgcaccatccttccggtcctcaggcacttcacttctgccgccgcagaaggcaggggaagctgttctcagtgtcgctgcgctcggttggattccctcgcttcttttgtagctttggccaacagttacagtgatggtggcctccctcgggggtgactagtgtgcccgttttgttgtttgcattagcagaaggaccacagccatcgcccgtctcccatctccaagatggcggaggcagcttcaacctcacctctcgcgaggggtgcgtcccactgtctctgattagccccgaggtcagaggtaacgtttcctgggaagctaactattggctgaggccaggtgtttccggcggtggcttcagagttgccgaagtgggcggagccctgagcttccggcaggcaggaaggaactgcttgtggggggaggaggcgcggcgggaggccggattcctggggcatcctccagccccgggctgttcccgtgggttaattgatgcggaccttttctggggcagcttacagtagggaacaactagggcctcttggagaac

SEQ ID NO: 129669 - DNA, 1054 bp, Homo sapiens
ggggttgcagtgagccgtgcttgcaccactgcactccagcctgggcgacagagtaagactctgtctcataaataaagataatatcgattcttacataatatagtaattaatcctttatcacaaacccttgtagcaaagcacatctccccatgatctttttttatcctatatataaactaagtgttgtacttagggtggacgcgttcctcctcttactttcgggaatgccctactctgtctgtggagtagctgtactttcaccactttacgttcttaataaacttgcttttgctttgtactgtggacttgccctgaattctgtcttgcgtgagatccaagaaccctgtcttggggtctggattgggacccctttcctgtaacagttttacttcattccctgctccttttctttatatagatctgagccaggcagacctggagagcggactgttgagtaatcccttggcccttattctctacctttcctgcccttttaaatgttgctgtttccccagggttccatcttctgccctcctctaactcctaaacaccctgctccttaaactgaaccaaataccataattctctcatcttttatttcctttgtatatccgttctgcctttgggattatcatctgtgaattatcatctgtgaattatctgttcaacagttgtctaaaccagaaaccttggagtcatcttggattttttttgtcacccataaaacccgttgatgaccaggttaattttgtagactaaataaataaatgccccttaaatccatccctcttcatgtctcctcactgttgttgttgtttttttttttgtttttttttttgagagggagtctcactctgtcgctcagtctggagtgcagtggcacaatctcagttcactgcaacctccgcctcctgggttcaagcgattatcccgcctcagcctcctaagtagctgggattacaggcacccgccaccatgcctggctaatttttgtatttttgtagagatggggtttcaccatgttggccaggctggactcgaactcctgacctca

SEQ ID NO: 129670 - DNA, 1030 bp, Homo sapiens
acagcaattatttctacactaataaataataggaaaactgctatcttttaaagcaaattaataataaacaaacatgaagacatctgaatagattaaggctaggcaatttgcccattcttgcaaatatacaatctataaaataatataaggtaatttgaagctggaaagaagcccatgtttccaaaaagtaatttagtaatgttttatcacaatttcacatgcaaagggagctatcacatctactcctcaaataaatacatatacaatacctgttctgtttgaagctgttctcgaagtacccttactagctcctggttttctgggtgaatgttttgatgtacatttctgttgaatagaatataataaattttgaatagaaaatattatcatatgaatccattttcttcatgggtctactttctgacttataactactggtaattaatgtaattgatggcatacaagcacttcacttccaggactgtacgtttcaggctgtcctgtggtgagttcttctgagatcactgatcattagccaatttcaggttcaagcggcaaatggtaaaatccagaggcctagtaccttggaaatctattgtaaatggaagcttacaagtaatgtaaagaacatttgtttctttggtgaaatttcttcaaaataagcagctatctaattttacctactattatgcatttgaacgcttttccacatctaattagatccttctcctaattttcaggtattaggggaggggaacagagcagaaactaaatttaatgtagaaaagccaaaacttggccgagtgtggtggctcatgcctgtaatcccagcactttcggaggccaaggcgggtggatcacctgaggtcaggagttttgagaccagcctggccaacatggtgaaaccctgcctttactaaaaatacaaaaattagccgggcttggtggcgggcgcctgtaatctcagctactcaggaggctgaggcaggagaattgctggaacccgggaagcagaggttgtagtaagctg

SEQ ID NO: 129671 - DNA, 1054 bp, Homo sapiens
tctctactaaaaatacaaaaattagccgggcgtggtggcgggctcctgtagtcccagctactcgggaggctgaggcaggagaatcgcttgaacgcgggaggctgaggttgcagtgagccgagatcgcgccactgcactccatcctgacgacagaacgagaatctgtctcaaaagaaaaaaaaaattacacatgtgtgtctcgcctgtgtttggttcctgtgttggtgcctctggatatttgtcaaactagagttcctacattccttatcaggttatttctgtcgaatctctagcacttttaagtgacgtataatcttgtaggcaagtgaatgaagtcagtgagtatatgtcacattgacttactcctgactcacatgcagcttgtctttagatgggcagataagatgctggccctactggagcgactgtggttgtgccgtcctgagcacccttcctccagtggccccggttttcaaggctttgacacaatggacctaaagtctcctttttcaagcttggctgcatatccacagtgcttttgtgcatgatgttacgttgttctggaggtttcattttgtaattccagttacctttgatgaaagaaattagtaaaaactttttggatgtgagtaattgcagaagccatgtggctgctgagtttctacgtaagccttggggtaaaaagacactgagattctctcctttgttccaggaagtcccggaatttcctatttttctattttctctgtgtgttttattttttttccttccctgaaagctttggaaatgcctgaggagaggtgagttgaacttgtcttagctgtctggttactccggttagttggaggctagttctcacccacagctgcttatcagattaaagagggcatgtcctgtgtgacagtgctccagattgcatcctgtcttcccagggaacacatacttagagctgtgattaaagagagtttgagatgctatgtggagcagctctggggcaggcatggctagtttttatcatatcaaaacatggctagttttatcatgattccttggc

SEQ ID NO: 129672 - DNA, 1027 bp, Homo sapiens
tgcacgtgcagtattccaaaatgatgtaaatgttttaagtagagattgattgtacttctttaaaaataggctttaatggccgggcgcagtggctcacgcctgtaatcccagcactttgggaggccgaggcaggcggatcatgaggtcaagagatcaagaccattctggctaacatggtgaaaccacatctctactaaaaacagaaaaaattagccaggcgtggtggtgggcgcctgtagtcccagctactcgggaggctaaggcaaaagaatggcgtgaacccaggaggcggagctttcagtgagccgagattgcgccactgcactccagcctgggcgacagtgagactccgcctcaaaaaatctatatataggctttaatttgtaatggtaattcacaagtgattgagctgatgccagtgtagttggaagaaataactgccgtcgtcctatattccaacaggttgcagcattgcaggaagagaaaagtagtttgttggcagagaatcaggtattaatggaaagactcaatcaatctgattctatagaagaccctaacagtccagcaggaagaaggcatttgcagctccagactcaattagaacagctccaagaagaaacattcaggtaaaagacaactcattaaaatctgatttttaaaaatttgttagctgtcatttaaagttaagagtatattggccaggcacattggtccatgcctggaatcccagcactttgggaggctgaggcgggctgatcacttgaggtcggggattcaaaatcagcttggctaacatgaggaaaccccatctctactaaaaatacaaaaattagccaggcatgatggcaggtgcctgtaatcctagctactcgggaggctgagaaatgagaatcgcgtgaactgggggtgtggagatttcggtgagccgagatcgtgccactgcaccccagcctgggcaacagaacgcgactttgtctcaaaaaaaaaaaagaaaaaaaaaatataatgttaggacttctgggaaact

SEQ ID NO: 129673 - DNA, 1045 bp, Homo sapiens
acatgtcaccaacagatgaatgtagaaacaaatatgagaacccagctgtcttctattaaaacagataatagaatcacaaaaatataaaacagtgccactcttctcactttttttgttttagaaaatagttatttttcataaagagtatgttgtttttattaacataatgggtttattactgtaatccactgtgccagaccatatgtgttaattttataataaaaaaagcccttaaattgtatctgcaatatttcagaaaaatgttgcatgatgtcttgctttctggtagggaaatagtaaccagttgtcaccgttcccaagacttgggacagtggagttcatttttatgacagttagtgcttgagaatgcagcttgtggccactaacatgggagacatactcaagaaggctttattctcatgctttatatctttcttttactgttctaaggagaatgaggaggcagtaaatagtgctttcttggtctattttatatcggttacagactagaagcagccaaagatgattatcgaatacgttgtgaagagttagaaaaggagatctctgaacttcggcaacagaatgatgaactgaccactttggcagatgaagctcagtctctgaaagatgagatcgacgtgctgaggtaaaaacctcaccttcaccgcccagcacagtttggctctggtgttagaaactctagggtttctgaggatctagcaaacttaagagccaggctacctgggctgggatcccgggtctactgcttatgcaacctctgtatggctgttttctcatctgcaaaatggaaacaatacacatgcctacctcaggtttatatgaggagttgagtgaatttatatttgtaaacacttgcaacagtgtctggcaattaagcgatacacaagtgtttgtaaaatagaaattgtgaccatcacttcttacttgtacagctctggagctgttcttccgccacgcccgcaaggcctcattttcttgctgggccttgttattaccccttcagttctctcatgaggtgcctcac

SEQ ID NO: 129674 - DNA, 2577 bp, Homo sapiens
gtgttggcagtccttgttagattcccagattgatttctgattcctaaaactgtcaccaacatttaaacttccttatgcccttattaaaatttaaaacatgtttttattcaaaatgcgaaatcacaaagaggtgaaacaaaactaccattagtgtattgaaatattattaagcctaattaagtatcttagagatgaactgaatggggcaacatttcttaattcagtgaaatcactaggtcctttaaactgagaaaaacgtaaaatccattctggtctctaaaagtctgaggagacttttattgatttgttatgggagtgagggaagggcatgtggtacataggaagtaaaaatggtgaaatatcagaatcagcttaaacttcagtgttacaatgatggccattgtgcatggttctcttacattaaaacataaataaaagcatttattcttcaaaagataatttggcatagcttgattaggtatcgctatggtaatcaaatctaattaaatatgctgtgggccattactttaacagaacgtatttcagaagtgagatgctagccctgtcaagtactatttacataaactagtccatttatttgactgtccagatgccaatgtcttgctgtaaactaagcagaactttgctctgagttcttttctatatgtagaaaagattcagatagctgaaactgtgcctccaaatggcttagagaaataagtagtacaatacaggatatatggttcttgccccagcaaatatttttatgtttttgtcttacctttctctttctctaacttaaagtgttgcatctcgggaatgtgcaacacataaagcaacctgccaaaggaagtggtcccctctggagaagaacaacataatttctgccagcttctgttatcaaaagcacagtcctttcatgtgatcttaagtcggagtagaaggggttgcacatttttattattatttttatgtaatttgtttttagcatggaagcagaaaaacattgttatatccagccatatggataatttgagctagccacaatatataaaacttcagagaacaagacaggatgaggagacggtagaaaaaagaaaaatgtacatttcttttaaaagtgcatatcttgggctgggcacagtggctcatgcctgtaatcctagcactttgggaggccgaggcgggcagatcacgaggtcaggagatcgagatcatcctgactaacatggtgaaaccccatctctactaaaaatacaaaaaaaattagccaggcatggtggcgggtacctgtagtcccagctactcgggaagctgaggcaggggaatggcatgaacctgggtggcggagcttgcagtgagcagagattgcgccactacactccagcctgggcaacagagcgagactccgtctgaaaaaagaaagtacttatcttttacttctgttcatgaattactaaatcgttgcttctcttggctgctgtgtttgcttcatactaatttgtcctctctgtctcttggcatggtttctgctcaaggctattgtaagtatggcttccttttcatttttatatagtgagcagtttttggatttagactgccatcatagttgatggtgtggaaaattttattaaggtagttttgtgcaaaacgaatatctggattacttgcctcataggtttaagacctttacaattaagatactcaaaggatatcgagctcttaaagagtcagccaacaagaagtctgctcttggttttattccccattccactcctgttccatcccattattataattaattcacttatataaattatcttgatacagtctatccccctcctgccccatgctttggtaggaacagtcttcagtttggagaggcactgcagcataggaagcatagaggtgaaggacatgcatggactctggggtctggcagacctgggttttggatctgccacttaaaagctactaaatgttctccagcctgcccttcctcaactgtaagatggggctattgttacacaggctgtgaggtttacatatgacagtgtctatgacatgatttagagcattgtttggcatattaaccatccatttaactatgttactacatatcttctcagagttaaagttttgctagagtctaatcaaaacataagcacagaattaaagtttctaaaatgtatttacattttacccctgtgctaaagaaggaatgagcaataatcgaaagttaatagagttggccgggcacagtggctcacacctgtaatcccagcactttgggaggccgaggtgggaggaggatcactgaggcccacaagtttgagaccaacctgggcaacaaagtgagatcctgtctctatttttttttttttaattttttataaaacaaaggtaacagggttatctttttgtatatttgggaagcggtgatagaggacatgtggatctactgaggtaactatagttaacatattgaggaaagaagtgaaatttgaagtattatagagctgtgttagaatggaagtgaatacaaaattgtggtaattattatcaaaagaacttagt

SEQ ID NO: 129675 - DNA, 1056 bp, Homo sapiens
cacagatgaacctcaagaacatagtgtttagtgaaagatgcaagtcagaataatacgtaatgattaatgtataaaatttaaattgcacaaaattaagtgctctctctctctctctctctatatatatatataattttttttttttttttttttttttgagacggagtctcgctctgtcccccaggctggagtgcagtggcgccatctcagctcactgcaagctccgcttcccgggttcacgacattctcctgcctcagcctcccgagtagctaggaccacagtcatctgccaccacgcctggctcattttttgtgtgtttttagtagagacaaggtttcaccatcttagccaggatgggcttgatctcctgacctcgtgatccgcctgcctcggccttccaaagtgctgggattacagatgtgagccaccgcgcctggcctaagcaatatattttttaggaatagcacaaagacaataaaaccatcatgaatttaatgagaatgattcaaattctgactttggttacctctgggaagaatatagagacatgcatgactactaagttttggggatgatttgtatttatttttatttttatgtttttaaactatatttatttatttatttattttgagacggagtttcactctgtcacccaggctggactgcagtggcatgatctcggctcacttcaacctctgcctcccgggttcaagcaggtctctgccttggcctcccaagtagctgggattacaggcccccccccaccacacccagctcatttttgtacttttagtagagacggggtttcaccatgttggacaggctggtcttgaactcctgaccttgtgatccacccgccttggcctctcaaagtgctgggattacaggtgtgagccaccgcacctggtctatttatttatttatttatttatttatttatttttatttattttgagatggagtctcgctctgtcgcccaggctggagtgcagtggtgtgatctcggctcactgcaagctccgcctcccgggttcacgccattctcctgcctc

SEQ ID NO: 129676 - DNA, 1090 bp, Homo sapiens
tgggagagcacaggacccattctaattgaaaagagccccctgctaattgccaaatcaaggcattcatctctgagtcctggactgggggttaagggggtccattttctttttttttttgagatggagtctcgctctgtcgcccaggctggagtacagtggcacgatcttggctcactgcaagctccgcctcccgggttcacgccattctcctgcctcagcctcccgagtagctaggactacaggcgcctgccaccacactcggctaattttttgtattttttagtagagacagggtttcactgtgttagccaggatgggcttgatctcctgacctcgtgatccgcccgcctcggcctcccaaagtgctgggattacaggtgtgagccaccgtgcctggccaagggggtcagttttcttacagatgataatgctttgtgattatgtaagttaatatctttaaggagatttgtgctcaagtatttaaaggttatgcattatgaggcctgaataacttatttgggagactttaaaatagcctcccaaataagtaacagcatgtgtgtgtgtgtgtgtgtggagagaaatcaaatatggcagtgaagcaattggtgagtctaggttaaaggtaaatggatttttattctaccctttcaagttttctatgggcttgaacattttgatagtaaaagtattaggggagctgggcacagtggctcacgcctgtaatcctgtcgctgtaggaggtcaaggctggaggattgctttagcccaggagtttgaggtcagtctgggcaacatatccagactccgtctctacaaaaaaaagttttaaaaaattagctggtcatggtggcatgcacctgtaatcctagctgttcaggaggctggggcaggaaaatcacttgagccctgtggttcaaggctgcagtgggctatgatcacatcaccgcactccagcctaggtgacagagcaaggctctgtctttaaaaataaaataaaactaaataaaaatattgggtggagaagtaaaaagacctttcccagtagtcctctagttggccagccagaatcacatccaatgtccatgcc

SEQ ID NO: 129677 - DNA, 1920 bp, Homo sapiens
agacaattaagcctgaatttttccaaaagaaaatttgtgcctaattatgggaactaaaatgcctctatgagattttaatctatagtgagtagtattaacattcctaattgtgctttatgatacactgtaacaaattctgcatgatgaaattttcttttgtgaagtatgttccactattttttcattgattcctttttttgttttaatgttgcagggaatgaccctgcataaaaaggcagctgaagatagactggcaagcacaggctcagggcagtcatttctggcgaggcagaggcaagcgaccagcagcagaagatcatacccaggccacgtgcagccggccacagcaaggtagagaagttgtgccgctcaatcacagacacctgcacccacaacatacttctgttacacacaagaacatttcaggaaactcagccagcttattttttgtttctcttctatgtcaatacttagtgtttctcattttgaggactttttctctctcctgtatctttgttttagtttctttggtttttattttgtagtcctttcagttatttttaatgtgccaaaaatttgtacatgttcaattaaaaatgttgtataatagtgtaatacttttctttgtatgaaaatgtcctcttcttcaaaggtataggctttgtaatgaattagattttctgccaataattgatatacaatttatattctttattgtgcctgtgtgttaccatgctaagaatgtctttgtttaaagggaattaatctttttatgatgtattaatctgtgttttcaattgttttccaagtacagttcaaataacttgcatatttactatacaaaatggttgacaagtgttctttttgcaaagacttgaatacattggcagaggtgctaatcacatcttccctaaggcacctggaagaattatttgaggaaaaaatgagttttcacattgttttataggaaattaaatttgtccaaagatttggagactatttttaaaacataaatacataaaatttcattatttcctgctatcttgtttgctggcagaagtgaatgtttggtgaggttattttgggataaattacaaaagaaaaaaaattagacactgcattaatttcttgttcttttggaatatcttagtaactgaggatcattttctaacaatgtggttgacataccttcagttgctttccacatctaaaagagttatctttcatatatgtacaagttattggtagtcttatttttgggctgtttgttgacttatgccccatttgttttacttgttctttaatataaacccttccattttttaacaattcctaacacttgatatcttaatatcagtcactaacattagtaacttcttgtatgttatattatggcagatctctttacgttttttctcacatctatctgctagtccaggaatttgttactaaatagattttcttggatatttggttgcctcaaagtgcttacatttgttaacagattgtaaaccacatttatttacattgatgaatgggctgttgaataatcattgtaaagcactttgtatatataaggtgctatataagtgtgaaatatcattcatttataaatgaaatgccttctaactttccatattgacttatgtatttggtcccaaattatatttaagtcttttttcttgcaacgtagcccattttttgaaagcaaaacatttctgaaattaggtcatggtttttttgtttatttttaggttaggtcacttaatataggaggatgttttctcatgtacttgctatttgcaagttcaggtttcatttggttctttatgttaaatacgaataagtaacctcaaatcaagctaaatgtaattaagaattttcagcaactatattcaagtgtttgatttttaaattctt

SEQ ID NO: 129678 - DNA, 1420 bp, Homo sapiens
accacaaagcagcagaagttagggataaatggagatagccatgagtagaactgctgtagggcttcaggaggctacgcagacctgatcaactgcaaagtttccaaagtaaaagattaaaaactttcagacggttcttacctctacccgtgtttcacaaatagcctgaggatccaactatttttaaagcaaattggggccagacgtggtgcctcacgcctgcaatctcaccatttgggagacctaggtgggggtggatcacttgaggtcaggagtttgagaccagcctggccaacatggtgaaaccccatctctactaaattacaaaaattagctgggcatggtggcatgtggctgtaatcccagctacttgggaggctgaggcaggagagtcacttgaactcaggagccagagactgcagtgagctgagatcgcaccactgcattccagcctgggcgacagagtgagactctgtctcaatcagtcaatcaatcaatcaatcaaattggaatatgagcactaaccttggtaagttaaaattttgggaaaattgtacctgcagaatatgatggatgaaaacaacagccaggtgcagtggctcacgcgtataatcccagcactttgggaggccgagacaggcacatcatctgaggtcaggacttccagaccagcctgtccaacatggtgaaactccgtctctactaaaaatacaaacaattagccaggcatggtggtgtgtgcctgtagtcccagctacttgggagggtgaggcaggagaattgcttgaacctgggagacagagattgcagtgagccgagatggcgccattgcaccccagcctggcgacaagagcgaaactctgtcgcaagaaaaaaaaaaaaaaaaaaaaaaaaaaaaacagtctgtgaactactcactgaatgaattttgttctgtgagatgagaggttttcattttcattttctatttacagccccagtcctaatctcctacccatccacctacccagatattttttctctatctgggttggaaaggccccaggcttttagaggggagttttacttctgacttttttttccccccgagacggagcctcgttccgtcacccaggctgtagtgccgtggcatgatctcggctcactgcagcctctgcctcccgggttcaagcaattctcctgcctcagcctccagagtagctgggattacaggtgcccaccaccatggctggctaatttttgtaatttagtagagatggtgtttcaccatgttggccaggctggtctcaaactcctgacctcgtgatctacccacctcggcctcccaaagtgctgagattacaggcacgagccaccgcgcccagtcgtacttctgacttttcttcagcatctgttgtatgctattattttgatgtttacattt

SEQ ID NO: 129679 - DNA, 1772 bp, Homo sapiens
aaacaaatatctaatttattttctaattgtccttcccttcattgagtattaactaggtgcataatgtagttgtatatgtttactagtaaagggaaaaacacttattttcattttgagactgtttggctattactaaagctgagaaagtgattttaggtcgccaaggatactatgatttgatgagatgagaagaaatctgcggtggctgaaaatcgtgaccaacttggtgttatctagatctgctttatctagtttgcaagccataggctcaattttatgtccttcttacttacacacagtagccccacacagttttgttttaaatgaaggcaaaagtagacatttttaaagtatattcaacattgtgccattatttacctgataaaggtgaaatcagaggtgtccacggcctcaaagtttgggcccatgggactatcaaatccgaattatatctacttagagcttagaggaagaattaggtatcatgagaaaagcaactcctacttgagagaaagaagactaccaaagcatgttgaggctttaacatgggagacttccaggtaggcgttaacacttgagtggtaactagcttgatgaaggaaaataattactttagcagttatgttgtaaaattaataaaaaggactcatgtttattctggtgtatttgtcaacccatgggtagtgattactccgtgtacattctatagtgtgtgtattttatttagtgtcttaatatatagtctttatatagtatcttaatattatttactgttacttctagtcatttatgtagtatattttactgcaaaatttgtagcactttactaatattagatcattattttccctcttcccctctacctttctggcattttctgttatcttagagtcaggaatctaaaggtctaagtctagaaatctgttggaagctgggttggagctactggatatgagttactttttacatgtctccttaagaagactcttttataatgtaatacttagaagccaaatcctttcaaacgcaaacacccttgaaacttgatgctttctgaagttgtattcataaaaattatcccatcttacagttaatcagaagatgttcttacctttggtttgcctgcctcctgaaacacaaacctgcagattgcccctaacttcagcagtgcctccgtcactgcatgtacctaaaagacaggaaagccaagttctgggagctgtcaagtcggaggatcaggaaaatggtggggaagaggtgactggaaaggcaggcactaaagatggcaggctgcaaaagcattctgagttcccctgtaacagataggttttatgaactcagctgttttcttttttctttttttttcttttgagatggagtctcactctgagtctcactctgttgcccaggctggagtgcagtggcacaatctcagctcactgcagcctccacctcccggtttcaagtgattctcccacctcagcctcccgagtagttaggattacaggtgcccaccaccacgcccaactaatttttgtatttttagtaaagacagggtgtcgccatattggctaggctggttttgaactcctgacctcaggtaatccacccgcctcagcctcccaaagtgctgggattattataggcgtgagccaccatgcccagtgaacttggccattttcttacattcatatatagcaaagttttcaacttgtctaccgagagactttctttaggagccaggacttctacatttgtaacttgagtatatt

SEQ ID NO: 129680 - DNA, 1230 bp, Homo sapiens
aaataatataaattgatgttatatagttaacatttatcaggcaaattcatatgaatgcttatttcaaataaagattgatagatttaatgatatccttccttttaaatttatatagatctaatgaacattgccaacagttttttttgtttctgtcccttaaacatttcccctgaaagtccacctcaaaggtacatcaagatgcaaacaatttttttatcttcataacttcctgctcttattaacttgtattatgaatcaaattaagttttatgtataaggcatttactattccagtgacttagctaatgaaaacatttaaaaatatgtattaatttacttggcctgctactaaagtgcttaacataactaaatggatctatagtaacatgtctaaattttttaatggaaataagggactaaccataatccttttgagtcagcttggtgcttacaattattttgttaggaaatcttgatgctttcttctttctctttaaatttttgtaatcaagcaacagacttgatccagcagtgtcgaattccaagcaagttatgatgattcttattgtagttcaagtacagatgagtaagtggtgtgacttcagtttattatcttcttggtgacctactttagtatgtgttctgtagcgattcatattagttaagggacgttttcaatatgcttgaaataagaaatagcattttactctaaatacaagaaatgactgtacacaaatgctaatcagtgatttggggccttttaatgtctttaacagcaatcttttatttatttatttatttatttttgagacggagtcttgctgtgtcaccaggctggagcagtggcacgatctcgcctcactgcaacctccgcctcccaggttcaagctattctcctgcctcagcctcccaagtaactgggactgcaggcacatgccaccacatccagctaatttttgtatttttagtagagacggggtttcaccttgttggccaggatgatctcgatctcttgatctcgtgatctgcccgcattggcctcctgaagtgctgggattacaggcatgagccactgcgcccggcccaaatcttttattttttaacagccttagttatttataattcaaatgcactaaaatatcatcgctgtcatgaactttgctgtttacaggttctgtgtaattcagaatgctttgtacttagaaaataatttctaggcttatcttgttt

SEQ ID NO: 129681 - DNA, 1034 bp, Homo sapiens
taaattatacagagtacctatgtataattttttttttgggtgggggtggatggagtctccctctgttgcccaggctagtgtgcagtggtgtgatcttggctcattgcaacctctgcctcctgggttcaagcaattctcctgcctcagcctccccgagcagctgggactacaggtgtgcaccaccatgcccaactaattttttctgtatttttagtagagacgaggtttcaccacgttggcaaggctggtctcaaactcttgacctcatgtgacctgcacacctcggcctcccaaagtgctgggattacaagcatgagccaccgtgcttggcctataattgttaaattatacagattacctgccaaaaatttgtctaactgtattgctgacttgtagctgtatttgatattgttattagggaacttctgtgtaataatgcgactttggatgttgtatgtttgccctaggcatttccggagagttcttttgaagtcacttcagaaggatctacatgaggaaatgaactacatcactgcaataattgaggagcagcccaaaaactatcaagtttggtaagtttggagtctagctgtgtctcccaggctggagtgcagtggcatgacctcggctcactgcagcctctgcctcctgggttcaagtgattctccagcttcagcctcctgggtagctgggattacaggtgcacgcaaccacacctggctaattttgtatttttagtagagacggggttttgccatgttggccaggctggtctcgaacttctgacctcaggtgatccgccctcctcagcctcccaaagtgcagggattacaggtatgagccattgcgcctggcctagaattttatttaaaaactaccactgtagccaggtgcagtggcttctgcttgtaatcccagcagtttgggaggctgaggcgagcagatcacttgagttcaggagtttgagaccagcctggccaacatggtgaatccccgtctctactaaaaatacagaaattagccgggtgtggtgg

SEQ ID NO: 129682 - DNA, 1988 bp, Homo sapiens
ttcagccaaagaaaattataaaaatggaacccaatataaaatccttaagtattttcctagcgcagaaactcctggccgggcgcggtggctcacgtctgtaatcccagcactttaggaggctgaggtgggcggatcacctgagggcaggagtttgagacctgcctggcaaacatggtgaaaccccgtctctacttaaaatccaaaaaattagccgggcgtggtggcaggcgcctgtaatcccagctactcgggaggctgaggcacgagaattgcttgaacctgggaggcggaggttgcagtgagctgagattgcgccattgcactccagcctgggggacaatgcactccagcctggggaacaagagcgagacttcgtctcaaaaaaaaaaaaaaaaacaaaaaaactcctctgttgacaacttgcaacttgtcatagctacttgccagtgtagcagtaaattcagttctgcccactcatttgtagaatgagaagctgcttgtttgatgacactttgcacttagggaaaattgacaggcgtgtgttaagtagaggaacttatatatttgataaaataatagcacattttgtcttgtctctcattatacaatctagtaatgtttcttaattttttgacacaatttcatggttgttgaaagatactaccagatgtagtttgagataaactatctgaattttttttctattttttttgtgttaccttttctccacagtggagtgttaagaattagagatgaatttttgtttattgtgtgtcctttcatgtcacctttacaacatgtgcaactgatattttagttcatgggtaaattaacaaaaaacttctctcccttctttgggctttaggcatcataggcgagtattagtggaatggctaagagatccatctcaggagcttgaatttattgctgatattcttaatcaggatgcaaagaattatcatgcctggcagcatcgacaatgggttattcaggtattgcctttcttgtacagtgtttttcagattttttttttaactgaactaaataaaattactcttaaagtctgtttctaaaccaaaacacacacatacgtagatcattgcacccaatatataactaaaaattattggccatgtgtggtggctcatgtctgtgatcccagtactttgggaggccaaggcaggaggattgagtgaggccaggagtttgagatcagcctgggcaacaaagtgagacccccgtctctacaaaaaatacaaaaattagccatgcatggtggcacacacctgtagtcccagctgcttgggaggctgaggcaggaggattgcttgagcccaagaatttgaggttgcagtgaactatgattacaccactgcagtctaccctgggcagcagagtgagaccctatctattttaaaaaaaaacaaacattattaacatacttaaaacctgacatccttcatgttagctaacctttataatctctttggatgtagtaaatttttagtattttttagattgaatttgtatcatatttgctagcaaattgagtataaagagtagcatatttttactacagatgtattattttaactaacaaaggcatattatacatttttttcatatataaactttggaataggattttacagtaacttaagttttttatttctacccatgtgtcaaagttttatgctaaattctgaatagaatagttgtaactcccactctgggtattttatttattttaaacagttctagtattgtttcctgtgaattttttccagggattgctactttctgcactattcattagaccaagagcatttcaccaaatacttaaaacttaaaaatttttaaacttttccaaatttgattaaaaggataacatattctaaaggtattcaatatttttacttatctctgaaaaacttaatcacataaaagcatacattttacacatacagctctctccatcttccacaata

SEQ ID NO: 129683 - DNA, 1047 bp, Homo sapiens
ttcctattgtgaattgaagcttttagattagttttgtgtccttccctagaactgaattgacagctgcagccttaagggattctcgtgatttaaatatgactgagagaggtgccacagtacactaagaaacgctgacacaagtgaaagtgtgtttacaaagctgtgccacagtcttagtaaaactgtgtcttggccgggcgcagtggctcatgcctataatcccagcactttgggaggccgaggcaggcggatcacaaggtcaggagttcaagaccagtctggccaatatggtgaaaccctgtctctactaaaaatacaaaaattagctgggtgtggtggtgggcgcctgtagtcccagctactcgggaggctgaggcaggagtatgacttgaacctgggaggcggaggttgcagtgagctgagattgtgccactgcactccagcctgggtgacagagcaagactccgtttcagaaaaaaaaaaaaactgtgtctcatcattgcactgttcttttaaaattgtatatatatatttttcttgcagatacactctggaaatgattaaactagtaccacataatgaaagtgcatggaactatttgaaagggtaagaggttgtttttgctttttttatatataaaaaagaagtggctatatgatgcatcatggagtgtattccataatcagattccaaaaggatagtaaataatttttcatttttctgaacctaagagcagaagtataacagcattatggaaactctctgggagtttgcccttctatgcacctcccaagtacctaccaacactgttttcagaataatccaccagtaaataatgccattttaattgtatttaagaatcctgtagtctttatatcaaagaatggaacacacacacccccaggctctagttggctcaggaacacagtaaagcggggtagtttacaggtagattttgccagtgggcagccaacctttctgttttcatttctagagatctccgccttcaggttaacctactcctcaactagaaaaggtttcacttgc

SEQ ID NO: 129684 - DNA, 1062 bp, Homo sapiens
tcaaaggcatttgcgcttgaaattgaattacatattactttaatttttatttttcattttcagttatgtgaaatcctagctaaagaaaaggacactataagaaaggaatattggagatacattggaagatcccttcaaagcaaacacagcacagaaaatgactcaccaacaaatgtacagcaataacaccatccagaagaacttgatggaatgcttttattttttattaagggaccctgcaggagtttcacacgagagtggtccttccctttgcctgtggtgtaaaagtgcatcacacaggtattgctttttaacaagaactgatgctccttgggtgctgctgctactcagactagctctaagtaatgtgattcttctaaagcaaagtcattggatgggaggaggaagaaaaagtcccataaaggaacttttgtagtcttatcaacatataatctaatcccttagcatcagctcctccctcagtggtacatgcgtcaagatttgtagcagtaataactgcaggtcacttgtatgtaatggatgtgaggtagccgaagtttggttcagtaagcagggaatacagtcgttccatcagagctggtctgcacactcacattatcttgctatcactgtaaccaactaatgccaaaagaacggttttgtaataaaattatagctgtatctaaaaacaatgccatagaagtttgattttttaatagcattgaactatatattatacaagacacattgtctcagcttagaaaagcatttgagaaagaaaatattgctataaaactgtaaactagaaacatgatgtgttggaggaaatgttaaaatgtaaattggtcagttcttgactgaaagtgacaaaatccactcaaggtagtttaaacccaaagggtttattcaggtttataaatatctcacagaagaattgcctgatcttttagaaagacattcccaaaccatgctacacaactggaccgtcccgttgctgctgcctgtgccagaatcaggaaactgctggatgaggagtgaggaagccacgatcctggctgccag

SEQ ID NO: 129685 - DNA, 1092 bp, Homo sapiens
atatcaattatttcattgaaaaaccgtggtcacaggcagttatctaattcttgagaggcttaatttattcatctgtaaagtggggaaaatacctagctcataagattgtcattattatagggaaactactaaattcagtacatgtcacatcttagcactcgatgaatataagttccttacacgatcctttgatgcactagatttgagtggtgttgactgaatcctcttgtagtagagacatctgtgcaaaaggagacctgtgtgtgtgcacatgcatgcatgtgtgtgtgtgcacatgcatgcatgcacgcacatatatctgcgcatacacaaagtaatgtgtgagagaccccagaaatcccagagtgtaagcttttgagaagcactactggaagcaactgttcacacgaatgtactttgtctctaacacatctttcgggtgccttttttttttttttttaacttttcctaatttctaccagacttagacaaaaaaagacatgcagagctgaagatggatcaggctttgctactcatccataatgaacttctctggaccaacttgaccgtctactggaaatctgaatgctgttatcacgtatgtatcagttcacactcagttctgtttgctttggggcttgtttgatatgatccttaatgctctcatgtctaaagcccttcacaagttaatttcagttttgcagctaaagaaacaaagaagctatataaagagtcggaagaaatacagtcaggggaggatgcctaggaatgcacagcatctatttttatcttttcatctactcatcctttaaaaagccagttctcagggatgaacaaccttgatagactatgttttattttcctcctctctagtgcataaccctcttgctggaccagagaaggaaggagtgagacaccagggtattctccaggggccagcagagtggtgcaagttgagggagtggcagttattccagggccctgcctccctgatgataacaaatgcattttctctgaaggttttactcctattctagaccttgttgctttttaaggacaaggctattctttcatgtaaaataaaatattcta

SEQ ID NO: 129686 - DNA, 1051 bp, Homo sapiens
gtacttcaaacatgcaagttggaatggtaagatatttcctaaaagtaatgttgcttatatacgtccttcacagagcttcagggcaggagaatcactcagcattctccccagaaactccagaaatgagccccagcagcctcctctgagccactgagctcctgctccctcctagggtgacctgtagatgattctgcgagccctttagttttgttcctccttttgtgtgctgtgaatctgtaaagcttcactgtaataacagactctagaagtttctgctgtgggactgagggactctgcagaatatgttatggatttggttgtaaatgatcatggtcatattctagatatgccttctattacagccaccatgctcttgggggctctgtcttctaggacttatggtcctttttgagatggcgttgaactaggattggtctgagtggtggtgaataatatctgtaagtctggcttggtagttgctttacaaatggattagtgcttcttaaacataacaaacgtgtctacatatttctagtttggttttcctgtgtctagttatgttcataggaagtgtcccagccaggtccagtgcttggttgcagagtctcaaggaagagtttgtgagtttactttctttttttaaaggcagagtcttgctttgtagcccaggctagattgcagtggtgtgataatagctgaccacagcctcgacctcctgggctcaagcaatcctcccacctcagcctcctgagtagctgggactacaggtgtgtgccaccatacatggctagttttttaaaacaatttttagtacagatggtgtctcactctgttgcccaggctggtctcaaactcctgggctcaagcgatcctcccaccttagcctcccaaagtgctgggattacaggtgtgagccacaccacacctggcctatgagttttctttttctttttcttttttttttttgagatggagtttcattcttgtcacccaggctggagtgcaatggcgcgatcttggctcactgcaacctctgcctcccaggttcaag

SEQ ID NO: 129687 - DNA, 1016 bp, Homo sapiens
ttccacgggttgactccaatctcctgtttttcagatgatgctggagcctctcttctgagacgggcatgtgttatgtggttaggaagtccttccaaaagtcctgttactggatagttctcatacttgacccagtgcctacacgtgtgtataaaagagtgatttggggccgggcgcggtggctcacgcctgtaatcctagcactttgggaggctgaggcaggcgaattacctgaggtcaggagttcaagaccagcctggccaacatggtgaaactctgtctctactaaaaatacaaaaaattagctgggtgcagtggcacgtgcctgtaatcccagctactcgggaggctgaggaaggagaatcacttgaacccaggaggcgggggttgcggtgagcagagatcacgccactgcactccagcctgggcgacagagtgagacttcatctcaaaaaaaaaaaaataaaaaaaataaagtgattttatagggaatattttgttagtgtagatatggtatgccagatcctgaaaccttgtaggaaattatacattctgaacatgtagttcagttccattaatcctgaaaatacttataaaatcctatttcctgaagaattacagtatattggtatcagtgaatgctaataaatatgtaggtgggcaatgatagtcataaactaaaatttaaaataacagttgagtagctcaattctgtctctgatcattcatagcttcttattcttgtgaagggacattgcctatgtgatgtggaatttgtatctttgctatggtgtattaagtgacattgctccctcattagcaggtagtaccagccttattattgttattttttatttcaaattttaaatttttgtgggtacatagtttatatagtatggtagatatgagatattttgatgcaggcatacaatgtgtaataatcacatcagggtaaatggggtacccaccccctcaggcatttaccattttgtgttataaacaatccaattataattttt

SEQ ID NO: 129688 - DNA, 1096 bp, Homo sapiens
ctagacagtccgtatacatgaagtcatataacgtggctttttgtgcctggctgcttccacttagcatattttttgaggttcatccatgttgcatatgtcagcacttccttccaaaattgctgaattagattccgctttagggatacaccacattttgctcacccatttattagtcagtgaacatttgacttgtgtccccttttttgctgttgtgaacaatgctcctatatgtatgtgtacaagtttttgtgtgaacatatgttttcagttctcttgggtataggaatagaattgtctgctgatttcttttgaatgggtgttttgctgtgagatttcatggagagggaacatctggagaacctaacgtagtcagtaagtttttgtattactgccaaaaaggccaagaaatgagtcaccgggaatttcctaaagacatgtgcttagttcccttctatttgcatttagttcacccgtgttttatttttctgcccccactcaggagaggagctgcctttctcttcgagacatcacgtccagctggccccagtggctgctcatcctggtgctggaaggcctgtggctgggcttgacattcctcctgccagtccctgggtgccctacgtaagcgaacccctgggggtcatcccttgtgcatgtcctgttctgcccagtcagaggttctgggctttcacaggtctcgagtcagaggaattctctttccctcttccttctcctttgaggcctgctttgcatggggagaggagattggcacgtgtccagagtgatttccctgtgggtggtgtgagggtcagcttgaatagaattcgggcctcccaccttcatagtgtgggagcagtttgtcagtgagcgtgcatgagccagaaggacgttttagctggctcatgtttggggctctctgaattgggctgcatacatagccaatataaaccatgttttttttttctctttttggagatggaatcttgctctgtcgcccaggcaggagtgcagtggcatgaactcggctcactgcaacctgcgcctcccaggttcaagcgattctcctgcattagcctcctgagtagctgggattaca

SEQ ID NO: 129689 - DNA, 1015 bp, Homo sapiens
ctttattccagtaaacaaaaatctctggtatgtatggaaaaagcatgattttatggatgactgttcatgctgaaattggatttgttccgtacgagcactgaaacgtctcctccacccctcccaggtccctttcgtatgtcactacgctcagttcttttgccttcttcatcctgctggtcctgtacccagttgtggatgtgaaggggctgtggacaggaaccccattcttttatccaggtaagtcacctccaacctcaaacagagctgggatggtgaccaggaggcaggcccagggacctctggagcatccttggtgctggggtcttgagccactgccctagcggcaggtgtccaaaagccaggctgagggaggaagcagcagggcccacattgtcccagcccacaccagatgtcactggcctgctccagagcagtccaccccattttcaccgtgtaggttgtggagtcgttgtatgacagtttgtgactccacctgtttcttcaggctataccaaattgtggaggagcggaaatgattcagggcacattatccagtttctggttctttttttttttttttttttttttttgagacagagtcttgctctgttgcccaggctggagtgcagtggtgtgatctcggctcactgcaagctccgcttcccaggttcacgccattctcctgcctcagcctcctgagtagctgggactacaggcgcccgccaccacgcccagctaattttttgtatttttagttgagatgggatttcacagtgttagctaggatggtcttgatctcccgacctcgtgatccgcccgcctcggcctcccaaagtgctgggattacaggcgtgagccaccgtgcccagcctctggttcttaataatggtgctatgcttgctttcttaatataaatccactactatagagattgtgcattagaagaaatagcaagaggtgatatcaagggataaatggaatgatttagatgcagttccaaccgaggacttagaaa

SEQ ID NO: 129690 - DNA, 1452 bp, Homo sapiens
atttttagtagagacggggtttcatcacgttggccaggctggtctcgaactcctggccttaagcgatccacccgctttggcctcccaaagtgctgggattatagtcgtgagccactacaccaggcctttcaataatttttgatatggtttatatttaaatacctaagatatgcattacttatttttggcagtagccaacaatggaagtgcacactttctgttttttcattgaactggtttcaagaattaaatagatggttagatgtgactcatctgtgagaaacatgatcttctgtatgtctctctccttaaggaatgaattccattctggtatatgtcggccacgaggtgtttgagaactacttcccctttcagtggaagctgaaggacaaccagtcccacaaggagcacctgactcagaacatcgtcgccactgccctctgggtgctcattgcctacatcctctatagaaagaagattttttggaaaatctgatggctcccactgagatgtgctgctggaagactctagtaggcctgcagggaggactgaagcagcctttgttaaagggaagcattcattaggaaattgactggctgcgtgtttacagactctgggggaagacactgatgtcctcaaactggttaactgtgacacggctcgccagaactctgcctgtctatttgtgacttacagatttgaaatgtaattgtcttttttcctccatcttctgtggaaatggatgtctttggaacttcattccgaggagataagctttaactttccaaaagggaattgccatgggtgtttttcttctgtggtgagtgaaacaatctgaggtctggttcttgctgaccttgttgccctgcaaacttcctttccacgtgtacgcgcacaccaacacgaaatgccatcactcctactgcggctgctatgaagcttactggttgtgatgtgttataatttagtctgtttttttgattgaatgcagtttaatgtttccagaaagccaaagtaattttcttttcagatatgcaaggctttggtgggtccaaaaaatgtctatcacaagccattttttccttttcctctctcgaaaagttaaaatatctatgtgttattcccaaaccctcttacctatgtatctgcctgtctgtccatcatcttccttcctccctatctctgtgtatctggatggcagccgctgcccaggggagtggctgtggggagggcaggtactgtctttgcctgtgggtccagctgagccatccctgctgggtgatgctgggcaagacccttggcccgtctgggccttggcttcctcacttgtgaaatgagcgggaagatgactctcagttccttccacctcttagacatggtgaggtaacagacatcaaaagcttttctgaaatcttcagaagaaatagttccattacagaaaactcttcaaaa

SEQ ID NO: 129691 - DNA, 1072 bp, Homo sapiens
tatgttcagagatataaatggacagaggtagcctcacagagaagcccaaatttcagactgttatttgcttgctctgataaattcctctcagtcttctcacctttgttctgtcaccagatattctggatcacagccaaatgctgtggggagatgtgtttttctgtctatgctggggcctgatggcttagacatgcctggtctgaaggatttcctgaggttgagactgaccgtgccataccctgtgagttcagcttctaagacggttacttagcagtagacaaaaataaatcactttgaaaaggtgacccaaaatgctctcaacaaacagtatctatgattgttattttgaggtctgccacaattgatctggacagtctgcatatagcctacattaggtgccagttttttaaaggaagcattcagaacatagaggcagccttgatatctcatcacttttgctctcagctttctgcactgcagatatagcagtgagtataatttgtatctgcagtctttgaaacccttcagtacctgctaggaagcactggtccccattatggtgttaagaacctagctttggaatattgggctgggtgctgtcacgatggccaaattagggtaaaagtgaaatgagtcttcagctgcttcaaggatgtactgatggctggattccagcaagcccttttcccctttggtgggtgttgtttagagtagttatgactgagatgcagtggatgggttggtcatatctaacaagcctcaggaatgactagatgattcccttctgaggatctttcactacagcaatgcagaatgtttttgtttcatcccagagagatgttcacaacattttattcaatgagaaaaccaaataatagcagactattcagactatagcagactatataggatattacgtaatgcaatatccgggccccattataatattttctcctttatttttctccatagcacttgtcttcatttatacatgtaatttatgtgtctcattaatttctcctgttcccctgcaccatgaatgcaataagctccatgccccagaacataatac

SEQ ID NO: 129692 - DNA, 1020 bp, Homo sapiens
caattttttaaattgaggtaaaattcaccattttaaagtgtacaattcagtgatatgtaatgcatcacaacattgtgtgactgaggtattctcgtaagaaattttcagttacatctgcttatattgtgtaaaactagaaagttacatttgcaagagataaaattaaacactaagaaagttaattttttcaaactattattttctaatggtttttgttatttccatccccagttcagtgagatagaattgtagaaatctctcggaatattgggagtgttctgttcacctcttcaggtctgaaagagtgagcaaggctgcctagggttcagcaagaactcctttctggattaaatgctatgaatttggaggccaaatatgaatatagtccaatgataacaaaagctgatacattttgaaattttattgtgttccaactatcctgccagtttgcaaatcttcacattattcctaaatctcccaacaagcctgcctagttcttatcttttttccgcttggcaagtgaagaaacagaatctgaggggacttgctcaaggtcatatagtttaaaagtaatgtagctgaggtttccatatttgatctgtatgatgccatagcccagatcctcactccctcaactctctggactccagttgggtgtccaagcattcagttccattctaaccatttacctagagtaagcatgaaccccaaaggttaacggctcagtcccacaagactgccctcatttcagaaacgaatcccaagtcccaggcctcccatacttctgactgattggttgcaaactcgggttcacaggactccctcttcatgtttgataatttgctagaatagctcacagaacacagaaagtcactttacctaatattaccaatttgttttaaaggatatgactcagaaacagccaaatggaaaagatgcatagtgtaaggtataggggtacatggagcttccatgccctctctaggtgcaccacactctcagtccctggctgtgtttacc

SEQ ID NO: 129693 - DNA, 1003 bp, Homo sapiens
gcacagttgacttcgagaagggaatttattgtcagtgggcttgacccatttgccagagccctttaaacctgtatttagaggtcagaagctgaggaggtaagagattcgaagcaggagaggggtttatgtgctgttgctggcttggagatggagaggactacctggcaaggaatgcagcagtatccaggagcccagagcaaaccccagttgatagccaacaaggaaacagggacctcagtcctatcactgcaggagctgaattctgctagtacaaagaatgagcttggaattggatttttctccagagctcccagaggagaactaagctccaccaccaccttgatttcatctttgtgacactctgagcaggggacccagttaaaacatggccagacttctgacttctggagctgggagctaataaatgagtgttgctttaagccactaagtttgcggtaatttgttacacagcaataggaaactaacaaagtttttgaacaacagttgaaagttacaggtagtatagaccattatataaactcacaaatttaagacagtgggaatatgggactagaaagaagttaaatggttggtaagaaattctaccacttagcccacattgccacccttcccatggccagcccactccactcctttcatagcacttagtggagtgtgtccataacccgcccaagtcttgctcagtgttgtagcagcagcattgtagcagatacttggttttcagcctgaatgtattcagtgaacgaacgtaggaaggaattgtgaaatgctagttggagaaaataagcagctggaggaaagaaggcaagctggagattataggaacagtgattcaaagccaaattagaaattgtaggacgatgcttgttatcctagtccactggggctgctgtaccaaagtaccacagatcgagtggcgtataaacaatggaaatgcatttctcacagttctggaggctgggaagtccaaggtcagggtgtc

SEQ ID NO: 129694 - DNA, 1035 bp, Homo sapiens
caaagttattcttgactggaactctgagcccactttacatttctttgctcctatgtgctgagctcattgggagctttcccacctccatggcagcactcatagctgtccttgtgtccctggtacctaacgaagtgctaggtgccagcatatagcaggtggtaagtaagcagtgcttgttttaggattgaataaatgaactaagaaagaatagaaaaataggtaagctgatatttagctgtcatatttccaagaatgtgatgtttttggacataatattagcccatatttctaagaatcagaaaaccaagcttctaagaaaacaaaaaactgacttatgaggatatggcctctgggaagataatgtggtaacaaatatacgttaaaattttgcatgttttatctgtttgtctctggttggggggtatacaatataaatgttccagtgattctgaagttttccttttaactaaacttaatacattataattcattaaacagaggtggactagcagaaagactaaatggactgcagaatcgagagagatctgctatttctttgtggagacatcaatgtatttcttaccaaaagacactttcaggtaaggcttgtgcaggaatctgagacaatgtgtaaaaaaatattttagttaaaagaattcttacattaaaatatatgaagttaattgttaatattttcatgactttttaaaaattttttccaacattctaattttaacatataaaaactatatatagtaaatatatttaacttgatgagtttaaaaataagcatactcttatgaaaacatcaccacaatctgtgctataaatctacccttgacctccaaaaattttgttctattcttatcattaagagcactctaccctcttagcaaaatttattttgttttatttcattatttagagacagggtctcaccgttgcccaggctggagtgtagtgacataatcatgtagcctcaaactcttgggctcaagcaaattctctcacttcagcctcccgactggctaagac

SEQ ID NO: 129695 - DNA, 1199 bp, Homo sapiens
ccactactcatgagagcctgcctaagttcgagaccagcctggccacagttgaatactgtgctgggcactgaagatttagaggtgaatataaagaaaaggcaagatggatttaatgtctaaagtagaagattaggaggaaagcaattaagcagttacctgatttaaaatgttaccctacagtgttcatggaattgtttaaaagctatatcttagatacaaacatgtttgtctcttaatgtgtgggttaagtatttgattagatgagtatgtcctaattgagtaatccaggaggaaaggtcctaaatccctgaaagtaatagcatgtactattttgttaaaatgtaaggtctgtacttgaaactttccagctcttaaaaatgaggaaattccaagcattctgcactaatagatagtgttagtgggtagttggtggatgacgtcaaatgtcagaatggtgaacagcttcgttcatataaactgaaagtgtacaatctgggatcaagtgttctcgctgctctcagggatcggcgcacagcctgtgtgctcccatgtggcctgacttggatttcagagtttatatgaggcacagctgagagtctggaaaaggcacagcatcttctccttcctgtccagatgagccaagtgagcaggaagggtctcagcatctattcctgaggccctatgagaggtttcttcattcctttataatgattaagccctacattgggaatgggtttgatttgtcattgtacaaacttcagaggctttaatggtaattttattaaccttgctggaccttatggaatgttgataaaagcaaccactctttgttatgaaagcaaaaagagacattgaaaagttagttcaagataattggcaaagccagctgccatgatgagattgttgaatagtgatggtggtaatggcagaaaaggtgaaggctctttcttgaaagacagcacaggaatcaccgctctaatgctatctttgtgatgttactgttgaatatatgtgaggtgctgctgtcttctgactgacttcttggtcactatcacagtgttatgactgctataaggtgtaatggtcttttctcgtcattacattctgtttaggttttgtattgtatgagagagatctggggaaagagatatataattggacatttgtatatataatgttaagtgaaaaactgagagttg

SEQ ID NO: 129696 - DNA, 1048 bp, Homo sapiens
ggccatgatatctgcagtttattatctgtggttcagcaatataataatatcagtagccacagtgaccacaactatatatatatatatatagttcatgaatctggcatgttttctataagtctgaaagaatttcaaaaaaaaaatgttgaggcagagcagctacctgaggtagccaccaaacctacgtgcagagatcagaagaacacaaatacagtaaacgtgctgagggccaggggcagctgttcagagttgctgttctctgctgtctgctttggtgttccagaagggtgtggccccagtattagcttggcatggtggcgtacacctgtagtcccagctgctccaagaggctgaggcaggaagatagtttgagcccatgagttcaaggctgtagtgaagtatgatcctgcactccactccagcctgggcaacatagtgagaccctgtctcttaaaaaaaagaaaaagaaaaccagccaatattgaaccttttgtttttacagtgatcctatgccgaggtctctaaccacacagcaacctacaatgatgtgagaaggagccaggccccagaaggccaggcagtacaggaggaacgaggtgacgctgtcttatggttaaccatgtgacactacctgtggatagtgcccaggtctctcactccccaacctgaaaagagaagcctgcataactagacccctgtgcatcagattcaccccttccctgtgctacatgtgaaaaagctgggtggacatgatgtgccaagaatggcccaggctgttctctagtagcaaactcccaacctacataccatgtctttagtgcatggtatgactctcccctgatttccatctgccagacacagacgtggcctggactgcacctacacataattttattcttcccaaggtataagaccagtatctggcaagcaggcaggcttctcacaaaggccatttcctctacggaggggttggttttgaaaatcagccaggtctctcatccccaagaaacagataaaccatggtgcattttagccctaatgaattcac

SEQ ID NO: 129697 - DNA, 1045 bp, Homo sapiens
gttcaaacaaatttaagccaatcattgagagaggtaaactctattttagcatctgctgcagaatgtcttttctcaaaatatttacacttccaatgttatttctgtacattactgctcaaaccagatattcaaaacaaaacagattcttaacaaacaggttttgcccaagtcttacaactctgcaataatatgtgtaatagaaaaatagacagtaattgaaaagtttgtgtttttcttgtcttccagccactaaagtacctctgttcaaaatcactatacgggtttagctaattacaatctatacgtctgtattttaaaataaaatgttatactttttaaaaaaacaacttgatgtctttcagtagatttggactcattttgatataacagcagttacattaacaacagttctccagtttaggtgaaatctgtttgaatacttcctgttatacattgaaatggaaagttggcttcctcttgtaggtcatgttgctggtgaggaatttccagaaatctggagaagtgctgactcatagtatacagtggactgatccagcaacagtaggacttgagggggttttttgagctattggctgaggcaagcaaaatatgtggctgtaatgtttcattttatttttagatataagggtgagggaggaggagagactattgcttggcatgggatctatgttaatagctttaaaatggctacaagttctagggttagaggtgtgtctaaatgtgtgttttcctacagtctattattagaatttggaaaacaggttgtttttgctatagtcaccctactgttgttctctctgcctcttgcccacaggtgaaccatgtgccttcttgggctgtggttggtgactcaccatgggttctataatgtgaaagtcacatagtacttgcattcaggagagtgctgcagaaaaaggtccatggcattgcaccttttgtatctgatcaaaagtccgtgaatctaataataacaatttaagtattagctgacaggagtacagagaaaaactagcatttgttgcct

SEQ ID NO: 129698 - DNA, 1080 bp, Homo sapiens
ctggtgatacaattttactttttgagagctgttttgaagtcttcccacagaactgcaggcctctctgttttcccgtatgaggtgaggagatggcagttttgtccacacacctatgaaaaaacacaatgacagattaagtgtcctgaagtgtcggaaggatacctggtgtggtagcttctaaaataccaccaaaagttattttagagatgaattaattagaattgacatctgagttaggttaccaaatgaaataaagggtgccaggtaaatgtaaactttagataaactatcaggcacatgtatgctaaaaaaattattcattgtttatctgaaatttacatttacctgggcatcctgtattttattaggtaaatcaggcgactctccacctgaaactagattatgcaaactaagaattaacataaaaagtactgtcattgtgtggatgagaaatctcctcctcctcttctcctaaaccagtttaggaagcctgtgcttcgtcatttctcatatactctcctcccatgtacatccagattaaaatgtgtgtatttggcatgtggctcactgtttcacatgcctaactgcagcccctctgggatcctatagtcgcagcactattttggtaggtcagccatgggcagcaggtcctgtactctcctgaccacccccgaggaactgcaggctctcagcatttgcgtgtgtccctcctcagagccgtgggacaaccccagccagctagaggcagagagacaggcacgtaaacctcctggcacgtcttgcgggtgcctgggccaaagtatgcgactgtcctgattctctgaaggtctcaaagcattttcatattaagttattcaagtgacccagagaacaagaaaggagttgctactgcatgatgtcagagaacactcagaggttggaagggaattgggagaactaagtaattattaataaattctaaaagtttaatactcagtattcaaaggagaaagagtggagctaacactttgtaccaagggtgctggtcttgggaattaagatatctcctgcaagagatttctgatacaatttagtaaaatg

SEQ ID NO: 129699 - DNA, 1005 bp, Homo sapiens
tatgttctttgaaagagctatcaaaatttctgaaggttttatttgtacattttatttcattgtttgggcacttttttgaggctgtgacagtttttgtttatcctccgtatttccccctgaggggtcttgaggccatactgggagggcacaagggagcccaagcccagggacttagccttcttccatcccttcctgacacagggctttcactagaacagtgaagtcagactactggtggccatgctggagcatgaaggacagctgtgcctctgtgggtgggcttggctttagctgtccatagcaggcgagtcattgctctttgcattcctgatttagcaagaatatgaggggaccccaatattgcaaagaaactgttgcatgtctttctcttttccaggcaaaaactgattattccaagtggaagttgccctgttattctgaatacttacttttgtgagaaagttgttgccaaagaagattcagaaaaaacttgtgaagtgtactgtccggacataccccttccaagaagaagcatctctttggcccagatgtttgtaattaagggtctaacaaataattcacctgaaatccaggtaaactcctattggcctaaaggttttatgcttgtaataatgttagtgactggatttggaagggcttcagtgtaagtgaagatgttagccttttgtctccctccaaaaaccccaccacaaggatgtatgctgcatgaacttactgttacgcctgaatatattatagttcagttcagcatttagtggtgctcttgttacagtatttcatctttctaattatgtgtctttaatctttattctaatttattaaaatagagtcatgcatcacttaacagggatatggtctgagaaatttgtcattaggtgattttgtcattgtgtgaccatcatagcgtgcacttacacaaacctagatggtccagcctactacacacctaggctatatggtatggctgattgcttctaggctaca

SEQ ID NO: 129700 - DNA, 1010 bp, Homo sapiens
ggagggaagtcattgcaagataagactggaaaggtagattgagatcatgttgcagagggcttgagaattatcttatgggcaaactgctgaggcatttgatatgatccaagtagtgtcttagtggcaggcaggaagcagagttcagagcttgaatgtccagggcgaggtgctcagccctgtcagccctgcagggaggcccagcagaggaatggatgcaagagaagggcttcttgagtgatgaaaaaatctggattcagcaatggttaggatttgaggagtaaggaaaacaaaaaggtctaaagatggctttgaagttttcaaccttgataacttggaaaataataggcctggggagagggcaggagaaggtttagacttgaagtcagagacccaccgcttggagcagctgtacagcctgtgacgttccctaagcttctggcctcctggccacaggaggcatagtcctccaagggctgattagaggtaagactcggcctgagtcaggcctatactcaggcactgctgacctgacgcgggtctcctttggtgctctgcctcacctgctgcagcctcacagccagctagggggtgcacagaaggtggagttaatgacaggatgtcatgggaagtaggggctggcgtcccaggaggatgggggtgactcgagagttagcatctgtactacagattaatgtcccaggcacagcatcggccctgcatggatgaggcgaaaaccctttcatccaccaggataactaattgaatcacactttgagcctcttcaagaaaatgaaaaaatgtcaggtcaactccctaaattttcagttgacgttgcaagtaacctcatacattaaaaggctaggttaggtcaagcccataatatgaaattatccaggcaccctctttggtttattcttggccatgttcacttagccacatctagaatgagatggagtagaaaaacacttgtgagtgccaggacacccatgttctttttgccactaagcagc

SEQ ID NO: 129701 - DNA, 1027 bp, Homo sapiens
aacccatggatcctctgactctgaagtgggcagacgggcaccctagacccaaacttgtgactgccccaaggctttgtaaccatggggaaaagaaagattgcagtctttagttgaagactttgcattctctgtgccctcggttataacaataggtttttagaaaaatctgtcttagggtcaatttatagttcttcaaagtaagagctgaggcttttgttgacagtcaactgggtcttacctcctggtggttgcatatggcatgcattaataaatgaattctaaaaccacacaaatattactgaatatgttcaaactaaaaagcaacacagaaaagtactggatttatgattcatcacaataaatttatcagagaaaatggtgaaagaggaaatgtgtgtctctaaaacagatttggattttatttatttgggacatataaaagaggaaggaagagttgataaagaattcttatttgactcttcaaagtcactgttcaccagaaattcagagaatcaacatacaaattacaatggtagtttgttttctggaaggccagtgaaatacagctccttaatttataatgaaatttactttctaacaaattaagtctttctaatgagaccaacattgagaattcagcccttacctcgggatggtctgagaaaaccaaaaggccaactgttttattgctttagatcagttaggtgatgataactatgagcatttataataatattttaaattggccctgagaggcttgaagacatagaactgaatgtactgccagatatttttgcaggagtcacagatgtaaaagagaattctgcacacacatccccctccccagcacccaaatgcagcatattttcagttaaatcctctggaatggactatttttagagaaatggcagggggaagggtggctaggaagcatgttcttcacaacctttttcattatgtactacaaaaaatatttacgttttaatttaatcacgacatgtgctgtactgtggttcaccctactgag

SEQ ID NO: 129702 - DNA, 1113 bp, Homo sapiens
acacctggcttcaggacttaggagagctggcccttaatgagagggaaccctattttcttgtcagttaactgcatgtgtaacaatgcgcatttgtctggtaggtgaaggaaaccaagattttgagcacagaagagatgcaggcacttaactgggtgtgaaacaaattcacataatctggattgtgcaggtacccaaactcctagtgtccgtgtccattcgtgtcatgtggtgcctgctcccctgcaccaccgtcttatagtcatgaaagtgggggttattggggtgtgtctgtggcagaagcattgatcttaaacattaaataagtggaattcacttgacggactgttattccaagaagttttgaatggctctctggctgatggaatcagtgcagttgtgagactctcattctaaacacacatgtcctacttctctgtgagatattttatcatggctgttctaagcacttatctaagttaatcactcctatagatagcagcatcccctcacaccaggtataagggacccaccaaccatgctcagtgctgcatagggcagagaagtcgcctgcagcccaagccttagctcaagatcgctagcagcggagagtgtggtgtactggatgcatacctttgccttggcagtgggtattctatggcaggacagcaaaggaatgtactcaactgcttcccaaagtggaagctccgttttatgaacattaatcagataactttaagatgtcagatctcttgagcccgccgtggcctggctagccactggttcccaatatttcagagcttactaaggatcgtgctggtgtctgctggttgtcttgcagagcacaaccacacacagtgagcgtctgctcctcaacttgggtgctggtgcctgagctgcagctgcagttgcagccttctctatagatacacaaagatttaacgttccttaaacaaaaataactgaaaggacttctagagaatatccacttgtcttataaaaggactctcagcccagagagcttctgtgccttgtcgatagtggcagagctgggatcccaatgcttctgccctgctggtttgagtcacattctccatagagcagtttgcccttccc

SEQ ID NO: 129703 - DNA, 1013 bp, Homo sapiens
attctatattttctattcattaattctaatatctcaagtccccagcaggtctggtgttacttcttttgactattcccacatgatggtttgtttctttgtgtttgatttttatttgagcacatctttgtttggtcttattccatggtgaactagcaatccaagtaaaggtgctttttttcagacaggatatatttctgcttctcttgcaaaccagctggccctgtgggcctggaagacttcattaaggagtctacagttcttgacccttttgccaaggcagcacttaaggctcctggcttcatctgttctcctccaacatgtgcttttttcacattcttatctttagaacagtttttatgtccattttgtgatgttatttactgactataatttcttcaggctccgtgaaatgttttctgagaatatgtcattttgtgataaataagcttcatttacttcagttacaaaataagaggattggaaattcagtcataaataggctctcatgagtaacatcatctaaacttaaaagctggggggaatcccatcatgtcgctggctgtccatcatggctgtgttgctgcaagctgggacaccaggttttatcctgctgggatatgcgtgtctaaacgtgtactgtcgcagagaatgcctcttattgttgttcttatcgtaatgttatcctgcagcttttctcagtatcgagcatccacacaaagcaaatatttctttcatgggaaacggtaaaaatgggaaaaggacactctgtttctaggtaatgtatttggtttaagagaatggtcatcttgaggtacttttcagccatatttggcttaggttttagtttcatgcctgtggatggtggttcaaacacctgcatgaacacatacagaaaggatatcttgaattcaacgtttttttaatcctgactcacccatttaggaagatgactacagtggatttcttttttttttccccccttggtttttctttactttctttaaattatattg

SEQ ID NO: 129704 - DNA, 1019 bp, Homo sapiens
ttagcagggtatcacaaacatgtttccatgtccataagtattttctttgtaaccatttcagtgaccgtatactatttcactgtgtggatggatcctaatttagtgagcaagttcctgttgtgcagttggtttcccacagtgtctgtccatctgtctgtgtgccttcttccccctctgaatcgccacacatctcgaattgtagttccatggccttaggcattagagtctgttaagcattctaccagctcactggccaagtactcagtaagggatgtctgatgatgaatacctttgacttttcttgttccaggacagcggggattttcagtttgattgacaccctgtggcccccagcgatacctctgaaaacacctggccgcgaccagccctgtgaagaggtaagcccggcactggaaaaacttccccagtcacagactactccatgccaggtgccaagccaggcgtcatcactgtcactcacatggtctgtgtcccctgctccagtggcaacaaggagcccccatgcagtcagttcctttgtagtgatgcatgaatatgagccaggattgggattcaggtgcctggagaccaagctctggctgccttccctactgtgctgcacagcattttcttgaagttaacttatgatgaatgcttaaaccacaaccctcacatactgttggaacagttggggtctcagccttgtactaaagtaaacatatagaatttttcccacgaacttctagtcattcatagaaccaacactcagttaccaattggagcaggaactcaatacaatccatagacattcgtacaacgtcctgggtagccaggaacttccattgtcctgcttgtttatgagagtgtctcagaagcagcaaaatggatggaaagtgttccctcctctccctcctgagccttttccagcaggctagccagctgctgctttgggccagaggtcccaaaacaaaactggggctgtcttccttaggttgtggctgacttcttagtagtgctaa

SEQ ID NO: 129705 - DNA, 1080 bp, Homo sapiens
aacttggtggcatcaatattcattctgtgcacagaactcttgtttggacagggcttcatccggatagctccactgggcattagcgggtgcccccaaggccggtgggagtcacagaaggctcctacgtccaggccacagctctggccggaccccctcacagcatgtgtgtggatcccacgggccagctggaagctgggcacctttcctgaccaggcgtggaacatcacttggtgtcccttccaccgcactgtgttcatgagaagccagacactgaggccagctcaaactcagggaaaggcagtgagactcacacctttgaagggaagggcaccaaggagccacattctacctgctttggccacgttgtctggcttctccagcctcagtctctttggccatgacaccataacgatgggaggggtgagttaatagacaccaaacagaactgctgtagcaactgccaaatgccttgcacagaggaggagtgtggggtgcccatgatattactctgcaagtgacattgccttctagggctttaatctcccagaaagccagagatggaatatctcagtgcttctgagcctttattttcagccctacccgcaacagcattctgcagcttgatctataatggggtgcaccacaccctctcagcctggtcagggatgggggccaaggactccctgtacctgtctcatctggagacgaaactcacctgggactaaccaaaaagaattagaagaaaaagcgaagtctcattacaaaaacacagaggattttagcccagtataactctagaagaaatggaatcctattaaggaaggaagtttggggcaaagcaccaggaaatccctcaaccggaagtgttgctagattgaggaagtgtcctaaaggaagtgggagacagctgtgggcactgtgtgcccagccccggccttcccagcagagtctgtgtgcatcgtgtcccaagtaaaaacaattcagttaccagaatggggtagttccttcacttgctaaaataaatgggtgtgtgggtgtgtgtgtgtgtgggtgtgtgtgtgtgtgtgtgtgtgtagtggc

SEQ ID NO: 129706 - DNA, 1031 bp, Homo sapiens
tctggctctctggttttccgtgttgttgggaacagtacgtcccaggctgtttgctttaaccagcgtgccttttatcactgcagagctacgaagtgaagagtgtcctcggaaaggaagtggggttgttaaattgttttgtccagtccgtaaccgcccacccgaccagctgcattggattggaggaaatcgagcttctgagtgcaggaggggcctctgcagaacactagcggttgccgcaggatctgtgaactttgcaatgtggctgcaagggtggtggtggtggtggtgatttggggtagttatttgttaactatggacacagtgaacgtagtttacgatcttgaaatgaaacttagatttttctggggaaatgttcagatacagttttgtgaactgtaaatcaaaatacctttttctacagtttatcttttattttctgcaaatttaggaacatatttactcgttttcacattgaatcttaagtttaagctcttcatttggtatttaggcaatatatgagaaaaaaattttttttgttcatttgtaattttaacaagttgaacattttaccatgattgaacatgtttttattacagtatttaacattcccccaaagaataccctgcaaagtgtaaacctttgtcccatactgtgatattactgttctgctacaataaatgtcaaacctaagcactttgcagttcactacttttgggaaaatgttctagggaactgtatcacaggtgaaactgttacccataaagtgtagctctctgaactggtgtgatcgtgtctctgctgaatggtggtggggatagctggctccaccacacacacctgttttaattaggctgggtaatgtgcacggagagcaaagatcacagactaaggagcagtcagtcggatatttgctttgctggcaaagatttaaaccaagaattaattatctttggacactataaagattttgttcccttccttatagcaatataatcatgacaggccatggttaactacatcagatacacgta

SEQ ID NO: 129707 - DNA, 1062 bp, Homo sapiens
tgccggaggccggccaggtcccgcgtgagctgctccacgcgctggtgcagcttctcgttctcagccgacagctccaccaacttctgctgcatctcctggttgcgccgcttggccttgtcgcggctcttgcgcacggcgatgttgttgcgctcgcgccgctgccggtactcggggctgccgcggtccgggcccctcttgccggcgctcttctcccgggcggggccgggcgcgggggtctgcctggggctgctgcgcggcggctccggcgacgtgggcggggtgggctgccctgcggccgccaagctcaccacggtctgtgcgcacgcggccacctgcgcgggcaacagcgagccgggcgcgtcgccgtcgccccagtcgggctcgcgcttgagcaggcggggagcggcagggcccgggcccaaggggcgcgcggggccgccgggaagaagctccaggggccccgcgccgcccgccttgtgattgctgttgaagaggtcggcgaagagctcgtcgtggcacagctccagggtgggcacggcggccatggagtcgatgtaggcgctgaagtcgatggcgctctcgtcgtcgtacatggcgggggcggcggcgcctggctcgcctagggcccctggctcggccccgcggcccggcttgcccgcccggcccggttcgtagaagggcgcaggctccgcaggccagggcgcgccgcgcgccgggccgtccaggctgaagagcgcggcgctcatggcggcgtcgggccgggctctgcgtccaagcgaggctgtcacctcgctgggcccagccccgccgccttttctagccccggctgacgtgcacgccccgccccgactccggcaccgcgggggcgccccggggccgcgggggaaggggcgggggcgccctgggagccccccggagccgccccgagccttcccggggcgcgccccctctcagttcctccccggggccccctccccggccctggggacccccagcccacgttgcaggagggtgcccgcgctgctgctccctccccggcccgggccggcctgcgctgcgctg

SEQ ID NO: 129708 - DNA, 1016 bp, Homo sapiens
ttctagtcaatgcatcattttttctacttaggatttgtccatgctattagaatagagtgctaacttccataatcagtcaaaatgagaaataactttttttttttttttgcgatggagtcttgctgtgtcacccaggctggagtgcagtgacgcagtctcggctcactgcaagctctgcctcccgagttcacgccattctcctgcctcagcctcccgagtagctgggactataggcgcccaccaccacacccggccaattttttgtatttttagtagagacggggcttcaccatgtaagccaggatggtctctgtctcctgacctcatgatctgctcgccttggcctcccaaagtgctgggattacaggcgtgagccactgtgcccggccgagaaataacattttttttaaagtcagttccctttaagtgaaaacttttcagtaaaaggttttatcatgttagattggctttttaaaaagtagatcaagaggcatgttttaaaatacaggcggttgtctaacaagctgttcctaagcaaggttctggtttgttttaggtcagtatgacggtaggggaaagccattgccagagtaccacgtgcgaatcgccgggtttgatgagcgggtaggtgtgagggtgtgtgacccagtccctgtcctgatgaacgttcttcagatgagaatgatctgtttgcctttagtatatgagacaacggcccatgttgatcacagatatatcaagtttagcatatttactgaattcctctttttttttttgagacggagtcttgccctgttgcctgggctggagtgcaatgggacggtctcggctcactgcaacctctgcctcccgggttcaaacgattctcctgcctcagcctcccgagtagctgggattacaggcgcacgccatcacgcccagctctgttttttgaatttttagtagagacagggtttcaccatgttggctaggctggtcttgaactcctgacctcatgatccatccacctccgcctc

SEQ ID NO: 129709 - DNA, 1040 bp, Homo sapiens
atagtatgaatgtggatcaagatggagaccccagtgacaggatggaagtgcaagagcaggaagaagatatcagctccctgatcaggagttgcaagttttccatgaaaatgaagatgatagacagtgcccggaagcaggtgggtactcgtgtctgtcctccctgctgtgtcacaggattttgctaaattagcttttctctaattttagcttttctttagagtctgaaccttaaaataattggtaggtgttattttttttctctctttataagtaaacttggccgggtgcagtggctcacacctgtaatctcagcattttgagaggccaaggcaggcggatcacttgagcccagaaattagagaccagcttgggcaacagaatgagagcctgtctcagagaaaaaggaaacttgaaggagcacttattcaaaactctccagaaagcctctagagtttattatattcctgttaatcatttcaaaatgattgttagctgttacttgaaaagcagataaacctaatgtcaagtttgatcgttaacaaaatgaatccttaccagttagttacaaattatttttaggtttactttgtaggaattatcatttaatactaggaccccttcttgatattaagtatacattgcttaaaaattgcatgtaatctatttaaatgtatataatctttaaacatactacagaagcttgctatgttaatgaccctctatcaattgctattgcaaggcaaaggatgatattctagtagaaataatacttcttttttgtagctttaaatgctcatttatagatttttctttggatgagtgtaatatcaagtaagaatttttatattgcaaataacagaaaatccaattagaggcaggcagagcaggaactggatgagagaaaagcagggtgtggccagaaggggcgatctgaactgaaggacttagtggtgagggagttggggtcatggggagaggacccagtgtagttaggaaactgtctggcatgatgaggggaaagacatgttccctgccattgt

SEQ ID NO: 129710 - DNA, 1368 bp, Homo sapiens
gcgcaatctggttcaagtgattctcctgcctcagcctcccgggtagctgggattacaggccctcggctaattttagtatttttagtagagacgaggtttaaccatgttggccaggctggtcttgaactcctgacgtcaggtgattcacctgcctcagtctcccaaagtgctgggattacagacgtgagccaacgctcctgaccaagagtagacttttctatttggggtagcggaatggaagtttggttgctttgtagagaagagcaggggttgatctttcctgattgtttgctgccactctttctttcctttttgcttttctgcgaatcttttcctgacagttgtttgtttgtaagtgaatgtcttgtataaagtttattaataacatttagtataggttagtgacatttagcatagaagcatattcattcattgttttcatttttatttaatgtgttgaagttgattagcactcttgaggaagtttatcaaaaaaagaattggcttctgtagtcagcagttttacattataggatgttaggattgttaaaacttggtggcaagtcgaggcagtgatagcctggtgatgtcagttttattgatttcattgagccaaaatgttattgaaaccttaaatttttttttaaaatttaaactatttgttaactgtctgtgatctaattattaaccattctgaggcatatttatagaataattgctacatttcataatttagagtactgttaaaaacttaaagtcacagcttgattgatttataacatggcatttgtaaatgccctttttttttttttttttttttaagaattattctagtattgatgtcctcttacaccaaagtagactcaccaaattgcagtctgtacaggctttaacagaaattcaggagttcatcagctttataagcaaacaaggtaatttttttcatcggtctttttttttcatttctaattgtggaagagttttagcatctaaattattttctgcttagtgaaagtgcatgtttcttaatgtatgggttggaaactccatcgaatttcctctacaaatacctattttcagatcattgaaataaatgtttaaaatggtcaggcagagttctaggcatcagggctgcaaagtgaaagaaaacatgttgcttaccttaatgaagcttttggagtagcggggtgactccagaggatacctgcccacaaggatggtggggcccaccctggcctgagagggtgcaggactcctggaggagggtcctgagcagtggggaagaggcaggggcttgcagacggaaagctgtggtgcccctgaggtgcacgctgagggctctgggtgccctggcttgaagggagggca

SEQ ID NO: 129711 - DNA, 1059 bp, Homo sapiens
gcctaggctagtctcaaactcctgggctcaggtgatccatgtgcgttagcctcccacagtggtgggatcacaggcgtgagccagcgtgcccagctgggtttttctattcatttagtactgtaggattccttttggtttttcttccattcagtgttactctgaatagcttctcttttctctctcctttccgtaaatctgaaaaggattgtttttagtgtgattgttacattcctcctttttacgtgttctcattggtattctttccaactttgtaaaataattttattaacttttctccactaggctctcaataaacaagactgggtagatggtgagcccacagaagccgagaaggatttttgggaacttgcatcccttgactgttacaaccaccttgctgagtggaaatcacttgaatactgttctacagccagtatagacagtgagaaccccccagacctaaataaaatctggagtgaaccattttatcaggtgggtaaaattattttaagtgattgaaataattattttagataggtgttttctacttaacaaaattgtttaaaacatttcaaaaacaggtagtacttgtgaagcactagggaattgcatgacctgagtccacctacaaaccccatagtattgttaaatctcttatcacttttagctaatcatcttttcaaagtgaatgcaatgcattttaaaataaatattaacattcctagtatgactacataggagcatatttcctgttgtctcttatattacaagaagtcgccccggatcactggctaaacacaggcctcccagctcctgtgacaagaggctctccgcttttctccacaccatacctatcctgactgtgcttgtaaattcctcagtttgtacgtaacatccaaatcatcttccagccaaaagtagttcccattttttgtagaacgtgttcctatatattttgtggttacaaaacaagctattttagatgaatttgttttaaaaattggaggtttactgtttcagacatcaaacatcatcgctttgactttaaatcttgacctg

SEQ ID NO: 129712 - DNA, 1156 bp, Homo sapiens
tgaagcaaacaacttttaagggcctaaactttaaacatttttttctaactgtattaagtacattctcatacttttgtgatatttttgcattccttgcagagcattgtgaacatagtttagctttttttttttttttttttttttttttttgagacagtcttgctctgtcgccagttggagtgcagtggcacaatcttggctcactgcaacctccacctcccgggttcaagcgattctcctgcctcagcctcccaagtagctgggattacaggcacctgccaccacgcccagctaatttttgtatttttagtagagatggggtttcaccgtgttagccaggatccgcccgccccggcctcccaaagtgctgggattgcagccatgagccaccacacccggccttagccttttttttgatatgtcatggccattgttctaaccatgttatagtgaacataatccagggacaatggaaccagtataggggtatgtaggtgatctctttcctgagtctatgcagaatgtagctctccctcttccctgactctggggccatgagctgctgctccatcacctacctacccacccacctttactgctgatttattacccctaacattctgtaatcagggcaataagagagctgcatctactagattttattgaattcagaattcataagctctaggagagaacctgtagggctcttttgatgtaaatgcaagaggcttagtacccagaagggaactgaacagcaggagaactaaggagggagcagtccttggctggctggtttaggaagaaataacatttgggttgagactgcaagatggaaagaaatttcctggaggaagggaacaaaccccataaacactttgagaatatcatggactgggaagcttgattgaaagggtcaagccagaattttgttaaggtaaagagatgaatgaatgctccaacaaattgagatggtccatagaacatggattaaacatggcatcagtagtcaggattattttttcttttgcttctgggttttttggagctagacaaggattccaaatggttcgcctgtagatattataatggattaatactggagaaccttatgtaatgacacatcttatacactgtgaacctttgatattttcagatt

SEQ ID NO: 129713 - DNA, 1050 bp, Homo sapiens
actttccttagaacctgtcgtgatttggaggttaaggctggtgtctcctggtggggtactaaacaggcatttggaatcatacgggttaggagtgttgcggtcacctgtccctggtcaggttgccacagtcccgagggaggctggtctgcaccaggtgttgaagcctccgaggcagctcctctctagttcagttagccagaggcaaagcactgccaggcgagttgggcgggggttcagaaggtggctgcgtgccctccctgggcctccctctggaggggcctggcccgttcagcgctcatgcctgctgaatccactgctgagcagttccagttgcagctgtggcccctgcactcctgctcccggtcgctgcctctgcggcacctgtaggttttgtctttgaggaaacccgaggtgaaaatgaaccagcagagccaagtgtctgggcggcggggagtaactgggcctgctttccctctccaggtgcggccggccggacggacctactacgactgcgcagacggtttatgagggaccaggagaagctcagtttgatgtatgccagaaaaggcgttgctgagcaaaaacgagagaaggtttgtatcttgtcaagaatttgatcagaacgatgcagtttctgtcacaggatacagacgaagtgaacaggcttcctgccagacactgcctccaatgtcacctgcaaaccaggttgcgggactgctccaaaccagcctcctggggctcccccacagggatgcagccctcatggcgctctggtgggggtccaggagtgcgcccagttctctccgcgggtggaagtgtggccggcctgggatcagccggctgatcccaggcctacctcaaggcccgcgccctggcaggacttcactggccctcgcttcagggaccaatgcggcgggagggcagctgggggctgggacccacggtgccccgaggacaggtggccaggagggccttcccgtggcgtggagactccgtagccgcggcgtccattccgcctagaaatgggtcattaggatgcatttgtaagaa

SEQ ID NO: 129714 - DNA, 1467 bp, Homo sapiens
cagtgagccgagatcgcgccactgcactccagcctgggccacagagcgagactccgtctcaaaaaaaaaaaaaaaaaaaaaagtcaggggttcttagcacctttcagtagataacaaagtgttattcctgtggtgggagcaagtggcgtgtttcttactttacaaatggggacactgcggtccaggggcactgaggcgcacgtacctggttttccttggggcataccctgggacctgacagagcctctgcccagggttggagttgagcacggaggcctagggtgccaccaggtgtgtcctggcaggtggtcctgccccgtgcacagagctgggtgatgctgagtgcctgacctctctgattgcatgtcacagatggaagaagctcatttgattggctgaccgggagcagcactgacccgctggtcgaccacaccagtccctcatctgactccttgctgtttgcccacaagaggagtgaaaggttacagagagcacccttgaagtcagtggggcctgattttgggaaaaaaaggctgggccttccaggggacgaggtggataacaaagtgaaaggtaagctgggttgctgagtgtgcttaaaatagcttccccactaaattactgcagagctcaggtctggggacatttctgactgtatccatgtttccttctcattcgtaatcaagccctttaaaattcagttaatgttgcctaggcactcaccatgctgaagaaattgttttctgggagttccagaagaatccttcagtaagttatactcgatccattgttgagtgatcttctggagcagtaagagtgggtgaggcatttataaaggggtgattgtaacaagaggtggaattagcaagcatggtctagggctagagggcttaatacaggtggagaatgaggagagcgtccaaaaagactgggtggaggaagagcatttgagaggagccttggagctgggggtgcaggaagggaaaggatgaaaaggacagggatggagaagtgtcagggtgggtaggctcagatcgattctgcagtccaggtgaagggacgcttcggggcatgctagagtaacggcaaagggtgctgtgaggacagtcttgtgggtgtgggggtgtatgtcgaacttcagctttaggaagcagccttgtaacgcaccgagcagaggaaggcacggggactgaatgcccttctctgaggtttgtgtggggcagaagtggagtgatggggactggaggcaggcaccaggacctggtcttggctaacagatgaccagaactagacgggtgccgagaggctggaagcagctttttgtgagaaagaagtgaggctctgggagggaacaagggcccagaggaaggacatgtgcagagaggaaagggcccatgacagaaccctgggggagcgccagcagggaagctcagctctgtggaagtaaacttagaagaacttagaagc

SEQ ID NO: 129715 - DNA, 1788 bp, Homo sapiens
tcaaatagttaatattatgtactcatcgttgaaaacttcccagagaatagagataagagaataaaatcacccagtttctcccctcccctctgtggcataaaaaatatgctacattttttgtaatattctcttccttcagtggatatgtttcataactcagactatatttttgatatagttgaaggtggtttccctctctgttaagcttcatgtgggtgaagagctgtgccttctccacaggacaccctgtacagcacattctttcccatttgccattgtctaagcaatatacttttttctctttgcttttcagattaattattcgaaatttctggagccatgaaactaggttaccttcaaataccttggaccggttgctggcactaaattccttatattctcctaagatagaagtgcactttttaagtttagcaacaaattttctgctcgaaatgaccagcatgagcccagattatccaaaccccatgttcgagcatcctctgtcagaatgcgaatttcaggtaatgtggtcttctctctcatagtagtgaatattataggcttttcctgttcatgaacatttttaatagctttgactggctctttgccttctcagaatacacattcctttctgaaaaggaaagggaaggctcgtgcctctgcttcagccacctggaggtccactggcctcaccctcttggcctccactagatttcccttgtcaggatcgccattgctttccctcccctcattcctcccaatccacagtggatgctgagcttgtcctgtctcgcagcagcctaaacagtgggatgatgggcaggttgcagggagctcctggggtagggcccctcctgtcccactcacaagctcaggatctgtcccagtggcacgtgtgtatgtggacaagctgggtcgcttgactcattgcatttgggttgtggtgctgagcatgatatcaaacctttttatgcaaacattaagaaagctgggttttctcactcgatagttaactagtttttctagttggcaaatcagttaaaacttttaaattagagaaggttcttcttcagctgcatatgaagttatggtacaaatatgctgatggtaccattagattttaaatagaaatatatcagtgttcctaaaaaaggagcattatttcatttgaaactttatttcatttgaaactttcttatgtacaggaatataccattgattctgattggcgtttccgaagtactgttctcactccgatgtttgtggagacccaggcctcccagggcactctccagacccgtacccaggaagggtccctctcagctcgctggccagtggcagggcagataagggccacccagcagcagcatgacttcacactgacacagactgcaggtaacagtgaccctgcccgctggccatgtatacagcaccctgacctctgtgggcagcttctgtcacaacagtgttgggcttttgtgagagaagtaagggataatagcaaaaagcgttaagaacccaaggaagatgtcattcaaaagagggggttcctataacagtcaaactcatggaaacagaaagtagagtgccaggtgccagggtctggggaggaggaatggggatttatagtttaatgggtacagaatttcagttttgcaagaggaaaagtgctgtggaggcagggtgcagtgactcattcctgttattccagctggggcaggaggatcagttgagcccaggagttccgcaccagcctgggcaacatggaaagactccatctctacaaaa

SEQ ID NO: 129716 - DNA, 2386 bp, Homo sapiens
ctttgccattattaggtttttctaaaaataaactttttatattgaagtaattttgcatttacagaaaagttgaaagatagtacacataatttccatatacaccctttacccaactttcccccttacataatcttggtacatttgtcaaaagtaagaaattaacattagaacattactatttaccaaactagactttacttccatttcaccaatttccttctaatatcctttttctatttcaggatccagtgtagggtagcacatgaagtaatttgtcttatatttgataatctagtccatgatcattttaagaatataagttttatataagtgtagcgttatctattataactaattttgaaacaaagaagaaaaagttgcctgtcatactttgaaagtgcaataataaaaatagctaaatttgtgtgtttttaaaatctctcccatagagatgatgaaagacaaaaagtatgtttggacataatttataagatgatgccaaagttaaaaccagtagaactccgagaacttctgaaccccgttgtggaattcgtttcccatccttctacaacatgtagggaacaaatgtataatattctcatgtggattcatgataattacaggtaagctatacattgactattttattttgttacttttttgagataaggtcttgctctgtcgacgaggctggagtacaggggcacaaacacaggtcactgcagtctcaacctcctcctgggctcagttgatccttccatctcagccttttgcgtagctgggtctatgggtgtgcaccaccatacctggctaattttgtttattttttgtggagacggggtttcaccttgttgcctgggcaacattaacattttagggatcatttgggtccccttagcaatctggaacataataacacatttttttttaccatatgattaataattaaaacatgtattttggtatatctaattgtatccttttaaaaactcatttcacatatgtgtgtgaaaaaatcagagtgaaaaagtgtggtgttgtgcttataaaacctattttcatagttgtccttttaagatcttgcaaagactaaggagatgaactctgccaggaccaccgggcactaccacaccaccacagctgagcgtcacaggaccgctgggcctcctgtgggcccatcctcctgttccactcagctcctgctgggagcaaggatgggttctcaaggcttgtgcacacacccatgagtggggcaagctgtgatttggagatctaaagtctaatgggaaaacaagccttttaaaattgaattctagatggtgttactgtagttgaacaaaagggccagaagagagcattaatgttgtgacattttgctgttttctcaagcagagatccagaaagtgagacagataatgactcccaggaaatatttaagttggcaaaagatgtgctgattcaaggattgatcgatgagaaccctggacttcagtacgtgaataactgggctgggacaattaaatgttaagggtattgctttcaaaggtagcatagagtatttttcaggagttttagaaatgtatttgcagtattagcattttctctgctttctgcatttcacaatatttagtaaaagagtattttaaagcacattatgaagagtaaggctttacaatcctgacaacttaaaaataacactcttgaaaaagtcatatggaccaaatgctgtatggtagggcagtgagttaaagtgtttcaaaatgaaaagaaagtctgtaatgacaattcttctgtttcccatttaacacacatagttgagatcatgctgtaagtattaatgttgaaaataaagtgtttgaaactttagaaatgagaggaaactgtaatattagttatatatgaaagtgtgaatgatgattgttaccctctaaaatgcctgtcctgagtaagtcagttatatgtgtttcttaccaaatactgattatataagaagaggggtaaactttttattattattatgttttttagagatgaggtcttgctctggcacccaggctggagtgcagtagtgtaactgtagctcactgtagcctctgactcctgggttcgtatgatcctcctccctcagcctcctgagtagctgggactacaggcataacgccaacaggcttggctgattttttattttttgtaaagatagggtcttgctatgttacccaagttaggcttcaatgcctggcctcaatcctcctgacttggtttgccaaagtgccgggattttaagtgtgagcactgcacccagcctcaatataagaagccatatactttttatatgtttctgtatattacttatttttccattctgctataattttaaattcattga

SEQ ID NO: 129717 - DNA, 1050 bp, Homo sapiens
gcacagtgatgtggactggctcaccgaggtgtaggaactcaaggatccagagcctaagggtgtgcgatggtcagtgtagaccagcagacatccccagcacctactgtcccatcatctaccttgtaggtgacaacattgagcacctttgttgggctcacttaaatactcaagataaactttgctttcaatgcttaacctacatttccacttttgtgtatttgaaaataaacttaatttttcagatactggaggagtctctgtgtgaactggttgcgaaacaattgaagcaacatcagaatactatggaggacaagtttattgtgtgcttgaacaaagtgaccaagagcttccctcctcttgcagacaggtatgggctgtccagggatcctttcggggcaggagggtcctcggccctcctctcaccagttcccttccccgccaggttcatgaatgctgtgttctttctgctgccaaaatttcatggagtgttgaaaacactctgtctggaggtggtactttgtcgtgtggagggaatgacagagctgtacttccagttaaagagcaaggacttcgttcaagtcatgagacataggtgagtgaacactagccctgctcttgggtcccactggctcataaagcgttaatttattaagacgtctccaactcaagaagaacctgtgggtttccatgatatacacatttgtgaagttggaatctctgaagaaaaggtgaaggcaccataagaataggatatctgctgaggtgggcctgctctctgctcccttggcctggcatcttggggagccacatcccagggcgtgtttttcatccataaatgaaggaggtggcctatggggttaccttggctctcttcagatttaaaatgtatgcttttgagttctgtacctattttgccaggtgagagcttctgttaatgtgtttaaattgttcatttattttcaaaattgcaacataacataaaagtatatgttaaaagagaaagctgctgatcacttacattatattatttccctgtccctgtactctttt

SEQ ID NO: 129718 - DNA, 2112 bp, Homo sapiens
cacaccctgggcacatggtctcagggtgccatactggggggactcagacagccgtggcctgagatcaagctgctggcagggttggttccttcgagagctatgagagagcctggtccaggctactcctagcatccggcagcctcaagcactatgtggtgtgtcacaggcattctccctgtgtcttcacctcatcttcccccttgtatctgtctctgtgtcctgatttcctcttttaataaggacaccagtcatatttgattagggcccacactaatgccttcactttaacgtgcttacctcgcttttggctttaggtccagtcatagtataaaattttagctgatggaagatacagtcttgtattaatattttggcaatttaagaccattctttgatgtttgacttttacatcctcttgtaggtctttcgcccttacgcgaagcactggcttagccccttgctgcagctggctgcttctgaaaacaatggaggagaaggaattcactacatggtggttgagatagtggccactattctttcatggacaggcttggccactccaacagtaaggattgatgcatcttttatgttaatatattatcctttgccaatagcctatagagcctatgacacataattcaggtccctctcactgactgtgctatggttttcagcatttgttgctacattgctggtgtgctcctaaaccaaatggcctcagcctgctttggttttgttttgtttcctttgcctttggtaattcgtctgaccttgcttttattatgaagctgtcaggtgtttgttttgttttgtttgctgcctttacttgccttagaaatgagattgcaaatttattaaaactatgtgtaaactgaatttcaaccaaccctgaatgggaggctctgaggactcctgccttgaagtccctggattttggcatttgtgccatcttctctactcccagagtattgactaataccagcaatggcaagattagggctaaagcagtagctgccagatgataacaccatgttatgttgaggcaaatgcagtacccaccagtgtagacatgtgtgtgtgtgttggtgctttgcctactcatttaaaactgtggacactgacagcatacaaacgttttcatgtgaggagatggtaagaacagtctgtattaaatataatatacacatgcggggctaggcatgatggctcacacctgtaatcccagcactttgggagaccaaggcaggcagatcacttaaggtcaggagtttgagaccagcctggccaacatggtgaaaccttatctgtactaaaaaaatgcaaaaattaactggacatggtgctgcatgtctataatcctagctattcgggaggctgaggcaggagaattgcttaaacccgggaggcggaggttgtggtgagctgaaatggcactactgtagctccagcctgggcgacagagtgagactacgttcccccagctccaccaccacccccccaccacaaaaaaatacgtggagctttctcacacgcttgtctctggatgtacctatctcatttgtttcacagttaaccaaatttagatttctttgtcttagtgtaatgaaatactttgttttctgcttaataaaatgaaaaaattaagaggggttcagtttaacaagggtccgttgaaagagattgatgtagctgtcagtggctcagctgaactcaagagagtggaactgccgggctcgaggtagctgaataaagcaacagcaagccagaaaggttgccgtgaagcttttactcactctggagtcatgggagtgagaggctaacactggagggagactccccttgttctgtttgcccctagagtggtgcactgctcagcagccagatggattagcacagacaagggccgtctcaccattgagaggccctgaacaggaggctctgcagttttatagggaagagctgagtcagaaagcactggatactgagtcggagtggggaaagcaccttcatgctgctcccctgccctgcaggcgacccctgtccagggcctcagataaagagtcctaggcatggaggctccagggaggaaggcagaggtgcatgcatggggca

SEQ ID NO: 129719 - DNA, 1155 bp, Homo sapiens
acctccgcctcttgggttcaagtgattcttgtgcctcagcctcccaagtagctgggatcacaggtgtgcgccaccaggcctggctaatgtttttatttttagtatatttcaccatagtggccaggctggtctcaaactcctgacttcaagtgatctgcctgcctcggcctcccaaagtgctggggttacaggtgtgagccaccacacccggcctagaacatttcttttaaagtataagattatcatatttggatgaattaacatttgtgtttgcatacatattatttaaattggctttttgtgctataatgactttattactcagtcatttttctattaaaataatataaaaatttttggtgatttttagggtcaagaattaataaatactgtcattttaagggttactaattttaaagtcctagaacaattagattttaaaccctactgaaaagtggccttaattcaagggacctttttactggataaaggggataattctttggaattttctgctgtgtgattaatcaagtttcccatttctccatagacagtcttggaattttctgccatgcgagggagaacaggagtcaactcctagttcttgttaagctcagtatgaagttcttctgtagttctgcaatgtgtagttgtaaactcctccttaggttattcaaaatgttctttctacacaaagcttgtacagtacatttttactaggttcattatttgtagaagaggaagcacataccgaatcagcaccatgtcccatttatttatgtgtccatagctggcgtcaaccaactagcctgggtaagagtcaaagctgaggtataggctgggtgcggtggctcacgcctgtaatcgcaacattttgggaggccaaggcaggtgaatctcctgagggcaggagtttgagaccagcctggccaacatggcaaaaccccgtctctatgaaaaatatgaaaagaattagccaggcatagtggcaggcgcctgtaatcccagctactctggaggctgaggcagggagaatcacttgaacccgggaggcggaggttgcagtgagcctactaagatcatgccactgctctccagcctgggtgacagagtgagactctgtctcaaaaaaaaaaaaaaaaaaaaaaaagctga

SEQ ID NO: 129720 - DNA, 1053 bp, Homo sapiens
atgctgcactcccctaataatagaaatacatatgtcacttgcaggtgtctctagaaactgtggaatttgggtagtaaggttttagctggacaagtattgtatgatttgcatgagccaactttctaaaagattattttctcaatagttaaaaaaaaaaagaacggaatagaacaacattctttttaaatagaggttttgtctatcccactttgtttccaaaaggaattagctagagaacgttttgtgactatgaagctgagtcatgttgacatgtggcctcttctcctctccttggtggtccttcacatggatgattgggagggcctctgaaggataatcccagaggaaccagagtctccaaaaaaatattctcatggctctttgaaccatgcagggctggccttaaatagtccctgctgtagctgaaatctgcagccagccctctgtgttcactccatcccaactttctttcttctgtagcagaaacccctttttcacccctttgtccgattaatgtaaacaattacatatttaaattgtctaaaaatactcacccttaatagactatcctcaaagcaacaacactggggtaggcagatggcttgagcccaggagtttgagaccatcctggacaacatagcgagaccctgtttctacaaaaaaatttaaaaaattagccaggtatggtggcacatgcttgtagtcccagctacacaagaggctgaggtgggaagatcgcttgagcccaggaagtcaaggctgtagtgagtcatgatcatgccactgcactccagcctgggcaacagagtgacaccctgtctttaaaaaacaacaaggctgggcagggtgacttattgcctgtaatcctagcactttgagaggccaaggcgggtgaattgcttgaggtcaggagttcgagaccagcctgaactacatggtgaaatgctgtctctactaaaaatacaaaaattagccaggtgtggtagaacgcacttgtaattccagatactcgggggtgctgaggccggagaattgcttgaacctaggaggtgg

SEQ ID NO: 129721 - DNA, 1012 bp, Homo sapiens
gataatttaacgagatcagagctcacctaatttactgttttgtcacatggccagcattgaggagctttgtgccgtcaacttgtatggccctgacgcgcaagtggacaggagcaggctggctgctgttgtgtctgcctgtaaacagcttcacagagctgggcttctgcataatatattaccgtctcaggtaactataacttattgtttttacatttattttagctttagtatgataattagtgtatttatttatattatttcttaaaagtcctttatgtattgagcatgctgaaatgggaattatagaaatacttgctcaagacatgtagatattatgtatctgtatatctatgatatatcaatataaatatgaaagcaaatgtaaaaatttataaatataaaatgaaagtaaaataaaggacatttaggtatttacagagcagctttctgaaaaactttaggaactgctgttgtgcctttgtggcaagacaacacaaatgaagaatctagcatagaaagcaaggttgagccagatacagtggctcatacttgtaatcccagcactttgggaggctcagataggaggattgcttgaggccagaagtttgagaccgacccaggcaacatggcaggaattcatctctacaaacaattaaaaaacaacaacaacaaaaaaaaacattgtccaggagtgggtgccgcggacccgtagtcccagctactcaggaggctgaggtgggaggattgcttgagcttggaagcctgagaatgcagtgagccacgattgtgtcactgcactccagcctgggcgacagagcaagaccctgtctcacaatagcaagaacaacaaaagcaaagttgaattaaaatttttctgaatattggaaggtagttgtcagtgctatctgaagtgggttttttatttaatgagaggagtgaagttgtttttttctaagaaatatctttttgctaggcatttcagtgttggcttccttttagtccacagatttgc

SEQ ID NO: 129722 - DNA, 1031 bp, Homo sapiens
ttgctgggctggccccaccctcaatttctgtgtacccctggggtagggccagataatttggatttataacaagtgcacaggtaatgttggaacagctgtccagggaccacactttgagaagcactgctttacaaggtatattgcaaaggaaacatgaaaatacttagtgctgttcttttaaggagaactttttaatttttccccacatgaaaaaatgaacatgagcagcatttaggacccatttcacctatgttattttgattgcatctaattataatacattaaaaataagtcgaatgccttttagtgagatttctacatatatctgtgtgataaagatgagtttatgatttctagagccttggtagctgaatgttgcatgttggagagggactaatgacagtatgctgtctctgtgcagaggatttccaccttccgcatcattgtgtttattggatctggtcaagtggcttttagctcattgtgggaggccccagacagaatgtcgacacaaatccattgaactcttttataaattcgttcctttattgccaggtatggtaatctgtatatctttaatttcaccacggtgctttattatcccatttaaaagaagtaaagaagaattgagtaattgggtatcattgcagttaacatggtattcagttaagattcagaatattaacagttgatgaggtaatgcagttctgtttcagcatgtgattaataagaaattgccagcatcctaagtctgaatgatctcaaatcatattaaaggaaagcagtgaacctgtgcttttcagtaattactaaaccattaaactgcttatggactgaaataatgacaagtttctcaggaataaatgtattgctcagttttgtccattaagtccaaacctaggtttgatagcttgggagtggggaagctgtgctcaggacagatcaagccctgccttcccccattgtgggctgtcacagccctgtgccatgtgtggagagtgcctcaggttagatgggtgtgctggttcctt

SEQ ID NO: 129723 - DNA, 1020 bp, Homo sapiens
atgcctccataggattttcctttatggagcagtacagtttctttggaacttcaaagggtcttattctctttgacttcaatatgcaaagtgtctcaaaagctgttatggggtaaaatcaacaatcaaaattcctctggaattcttaggatatagccattttcttttttttcagggaagggaaagattgttttgttataattaaagttttctctcccctcttcatggcttttcagtttattaatttgtttaaaagaaaatgttttcattatatcagaaggaaatagttattcaagcctagattctggatacactatggagattggttttactaatgtttatttttttcttgactagtgctataaattaatttttaacatactttagttatgctcagagatagaccaagggtattcagttgtcagtggttataaaaattagtacaatcaaggtctctttgttttgtttcaggatggaattgtggaccctgttgacagtactttaagagatttttgtggtcggtgtattcgagaattccttaaatggtccattaagcaaataacaccacagcagcaggagaagagtccagtaaacaccaaatcgcttttcaagcgactttatagccttgcgcttcaccccaatgctttcaagaggctgggagcatcacttgcctttaataatatctacagggaattcaggtttgtaagctacacaacagagaagagaaacttgtggttttgaaaggtgacttggagtttcactctgtgtatccgtgtgtcatatttcctgcatttagtaagtaattatgtgctggatgctgtgctgtcttctggaaattaaaaagtgaattaaaattcagtttgcactccagaagcttggaaactgctgagaaatgcatgtaaacactgtctcagccattttggaaatgcaacaaaagacacatatacaggggctttgggtgcacagaggaggagtagctgatccagggtgagcaagtttgctgtggcctcttgctagggttta

SEQ ID NO: 129724 - DNA, 1116 bp, Homo sapiens
actgtgcctggccaaaagtctacatttttgattagtaaaaattcctctgtatttttacttttgaaatttggtgttaaatataccagtgacttttggttatttagggagttagagcctgtatttggaaagtgtttcaaagagattttttttttaagtaaaaattttgttcattgactttcttctacaaaatactttaagtaactcttactgaatttggatattaaacatttgagactattaggcttgtttaaaagtaattttactttaaattaaatcgagtgatttctgatgttgtaattacatatctgaggcaaaagaaaagggaaagatgaatgaagtgcttcactttaatagaatgtagaacagctggcattagaaatgttttgatttgtgaataattctgacactaataaaaagaaaaaaagtgtttcattcttcttaaatcttttctaacagtcacgtcctcagatgagatgatgaagagctatgtggcctgggacagagagaagcggctgagctttgcagtgccctttagagagatgaaacctgtcattttcctggatgtgttcctgcctcgagtcacagaattagcgctcacagccagtgacagacaaactaaagtacttctatttttcatttcacccattatttagatcctattgctttaaaaatacatattgcttaggatatagagaacatgtttcagccattccaatattagtaattttgtattttctgtaatatagtaattagaaaactacttacttattagaagtcagtgtcattgataaatgtaagttaagtataaatcatcttaataggtaattgggctgggcatggtggctcatgcctgtaatcccagcactttgggaggccgaggcaggcagatcacttgaggtcaggagtttgagaccagcctggccaacatggtaaaacctgatctttactaaaaatacaaaaattaggtgtgctggcatgcgagtgtagtctcagctactcggtaggctgaggcaggagaatcgtttgaacctgggaggcagtggttgcagcaagccgagattacgccactggattccagcctgggagacagagcgagactccgtctcaaaaaaaaaa

SEQ ID NO: 129725 - DNA, 1097 bp, Homo sapiens
tccactgactattcttctgaatcaggtattactttgatggttgcaaaatggtgattttctacccccatcatttctttcatcctagttgatgttctactgcaagaaacaattttccccgttatttatttatctgtattagtaagatttgtggattcttattttttcagtgggtctaatcttttgccatcatgattggttttgaagcccacattgtcccagatttggcccgagtgtgatgcgtgggagccactcctgctccatgagatgattcatgctcttctcgaccctggagtcagacacttcccaaggagccatgttccttttggcagacagtgatgtttaaaagcaaccaccatttatattttttgttttagaaacttaatttttttaaatcataatttaggattttaatgtttctatttgacaatatagtttgttgcctctaatgtacattaaatgaatgaatgagtgctattttaaatttattttcgtttactattgatagatgagaccaagaataactgggaagtgtcagctctttctcgggctgcccagaaaggatttaataaagtggtgttaaagcatctgaagaagacaaagaacctttcatcagtaagaagtcctttgtattttctgtaccttacataatgcagagatcagattctaacacttgtgaaaagtaaaaatcttcatttaaaatgttagttgtttttgtatacaaagtagagtacaatataaaaataattttaatatattgaccaggcatggtggcgcacacctgtaatcccagcactttaggagggtgaggtgggtggatcgcttgagctcagcctgggcaacataggaagaccctgtctctattaaaaaatacaaaaaattagctgggtgtggtggcgcatgcctgtggccccagctacttgggaggctgaggtgggagaatcacctgtgcccaggaagttgaggctgtagtgagcaagatcacaccactgcactccagcctgggcaatgggagtggcctgacaaaaaaaattaatatatttttagctatgaaaatataaactatattaactgttttgtttatttttttggtcttgttt

SEQ ID NO: 129726 - DNA, 1016 bp, Homo sapiens
cttgtgcaacattttaatttgaatacacagttgtgtttggtaacacaaatttggtgacacaaacttagcgtgtttaaaactgatcttcatgcacttccaaaataccacatttttcatttatctttcttactactgttaataatttctctatttctctttttcttcacttgaaatctctaggtcacctattaaaattctatctctgtcaaggcattattgctagctccctcaagaagtgctgcccacctctggcattttcctatttgtcccattctctcatcacttcctgtgagtccttttggttaacgctttctgcaagtcctgcccttcttatcagaccataggtcttgagcacccatcttggtctttctcgctgttgcaatctttcttcgtagcatcaggccttgaccatgaagtcagttggaaagttatttgttgagtgattcgtgattgaatggtacaatgtttctttgctacaattactctttaagaatggagatgaggcgcctggtgtttggatgatcccaacttcagatccagcggctaacttgcatccagctaaacctaaagatttttcggctttcattaacctggtggaattttgcaggtatttggtaaaattctaattatttaagaatgaaaatgattgttagttattggctgtaatataggaaattccttatatagatgtaagaaatgaaataataggccgggttcggtggctcacgcctgtaatcccagcactttgggaggccgaggcaggtggatcacgaggtcaggagatcaagactatcctggctaacatggtgaaaccccatctctactaaagatacaaaaaattcgccgggcatagtgtcaggcgcctgtagtcccagctactcgggaggctgaggcaggagaatggcatgaacccgggaggtggagcttgcagtgagccgagactgcgccactgcactccagcctgagcaacggagcgagactccgtctcaaaaaataaataaataacaaataataaa

SEQ ID NO: 129727 - DNA, 1036 bp, Homo sapiens
catgggccgccgcacccggccagatactgtattttatatctgtatttcttcttaattaaaaagcttgtggctgggcacagtggctcccgcctgtaatcccagcactttgggaggctgaggtgggcagatcacctgaggtcgggagtttgagaccagcctgaccaacacggagaaaccctgtctctacttaatacaaaaaaaaaaaaaaaatagccaggcgtggtggcacatgcctgtaatcccagctactcgggaggctgaagcgggagaatcacttgaacctgggagttggaggttgtggtgagctgagatcacgccattgcactccagcctggacaagagcgaaacttcgtctcaaaaaaaaaagaagccttgttaaacttgtgtttataatcacatggcttaacatgacaccttaaatattattttgatcttgataagattgatgaagacttctgttttaccttttctaaagccgtgcaaggttataaacgcaaaagatgttgacttcatgtacgttgagctcattcagcgctgcaagcagatgttcctcacccagacagacactggtgacgaccgtgtttatcagatgccaagcttcctccagtctgttgcaagcgtcttgctgtaccttgacacagtaagtgaactaaactgagcacaattttaagtatttaatcttcatttcttcaaataatttgatggagtcatacaatacatttagtgtaggcactgttgggaacaacatgacagttttagttagtactttgtggcaatagaattattgtcatgaaactcgattttttgttatccagaacaggaaaaaaatatttgtttctccttccatctttctgaaagatttggaattgttgcttgggatagaattgcacctcaagacaatttttactctgagtgtgtgttttttttttaaggcaatcacagtaatacatgttaagcagcaggttagatgacaaaccatgtttttcttttaataagtatctaattcagttgtaattactttgaatatttgtattat

SEQ ID NO: 129728 - DNA, 1288 bp, Homo sapiens
ctttgaatacctgtattagttcttgcatttaggctcttgtctcttggtttggtaaataatgatctatttgcttctcagacgacattttccccttgcatcacttaatttaagctttatagtttgtagcttatttttttgaaaactgagatgctttgtctttctgattgttctgaactctatttattgatgacgtctgaagtcactggtcccctgacagctctctttcaccctgtgggtgacaggtgagattgttctgaactctgtttattgacgatgtctgaagtcactggtcccctgacagctctctttcaccctgtgggtgacaggtgagctctaaagactgctctttgcttcctcagagagccttaattcaaaacctgtttttggttttttttttttttttttttcagacttatgtgtatccttggtctcttagtcccttctctaggaaaaatgtatcacatagccttatttaagacacttttctgaacctgatagagactaagcaaaatggaagcaaagggtctttatgattaaaagcaattgcgtgtaactataacagtacattagtagcatctaaacagttctagtttttccatgtttgtatagattccattgctattaaatatttccaaaaaaataaatattatgtatttgcaggtttctaatatggtggcgaaaaatgcagaaatgcataaaaataaactgcagtactttatggagcagttttatggaatcatcagaaatgtggattcgaacaacaaggagttatctattgctatccgtggatatggactttttgcaggagtatgtctcattaacttactctattttgtcttggtttcacgtgattgtttaaaggaatctaattcattgcattttgaatagtgtctaatacttgtaacaatacagtagacccttgaataacatgggcgtgaactgcacaggctcacttacatgcagatgtttttctaccatacggatcaaaaatacagtgtgtgctggatgtgaaacttatatagagggctgaccttttgtatatgaggcttccacagggtgactgtgggacttgagtatgcatggatttaggtatactgaggaggcctggaaccaatccctcccgcatgtactgagggtcactgtattagtattgtttattaacagttaagatttcttcagtgtctgctgtgtactagaattctttacatgtggtatctcaaaatctcctaacccttaggagctcagtattactctgttttgcagattagcaaactgagatgcagagaaa

SEQ ID NO: 129729 - DNA, 1085 bp, Homo sapiens
aagcttttgcttaaactttgaatgaaagcaaatgtgataacatctgtgatgtttcacacacagttatttacagggaggctttcggtgacttagtaagctctggttgaaatgctgatactcaggttacatggttgaaagcactttattttagggtatctttcaggggatccaggctgtttgattctgactttgcctcaatgaatcctgattccacttctgacccttgttttgggatttgtcagccaagttatgggcctgttaattggtagtgttagagctctgacaggaatccctgggttactgtagtgtaatggtactagatcttcctgagcacagtgttgactttgacatatccctgcaggtttgttggttttctgttctgtgttatgtcgtctgattttaaatataatggcatttgcatttgcagctggcttgcgcctatttgccctgcatgcatctcagtttagcacctgccttctggacaactacgtgtctctatttgaagtcttgttaaagtggtgtgcccacacaaatgtagaattgaaaaaagctgcactttcagccctggaatcctttctgaaacaggtaccacaaattcaactgtcatttaacaatatttctttcacacacagaattaaattccctttgcatgcatgcatgtttgaaaataaatacaagttgatctgtagcttctgtagtatttaaagcagaaagatgttgatcagccagccatatgggaggcagccagactgaaagagagctagggagatgccagatttgattagggcctcagagcctagattgagacaagtgtaatggagcaaagacgtggtgaggtgatggccggaagggctgggaggtcagggctggagagtgggtggagggctgaggggagccccatctctcctggaagaggagggctagctgtctccaggggatagatgcttgtgtgtcaacttgaaaacaaggggtgcctctttgccattgtggattttccacctggataggaggtggttacagaatctgtacctgcgtatgtggaagcttgtctggtcggctgaggagaccgtgcttgtcattctgag

SEQ ID NO: 129730 - DNA, 1271 bp, Homo sapiens
gcggagcagggcagggaagccgggaggcgggcccggcccgagcttgtccttgtcgcgcaggtactccgagcactatgtcgtccccggcgtcgaccccgagccgccgcggcagccggcgtggaagggccacccccgcccagacgcgtgagtcccccgagccgggcccactacagcccccggcgccgccccgtctgccctctcgccgcagctggcagcgctgggtgggtgcgcgggacccgggcgctcagcctcgggctgggcgctgccgcttggtgcgcacagacacccacagcaggctgtggcctgggtgctgcttaattcgattgccatttgcctctgtttggtttggttcagtggtgagtcataatgccccaaggaaaagacaaatccaggaaggccggccctgaaagttaatggctgtcttttctgttttgtgtgacacaagctcggagtgaggatgccaggtcatctccctctcagagacgtagaggcgaggattccacctccacgggggagttgcagccgatgccaacctcgcctggagtggacctgcagagccctgctgcgcaggacgtgctgttttccagccctccccaaatgcattcttcaggtgcgtgtctgaagatcttggttttgctgtgcttgatacacagctgatgctttatctgctcaggtttactggctttataacagttggcataacgcctaaagcatcccctctgcacgtgactgagcatgttcttaaccagaggagctgaacggagtgcagaaaatagtagttttagggcttagtgagcagaggaagcagcttctctggtgcttttttttaatagaacatttaagagtgctcagaatctcagccaccgcaggttgcaataaatattcagtttgctgttgcgattagatggtatagatcaacagacaacatgctgtaatttcaggtttgatatgccaccagaatttcctaattttgtttttatagctatccctcttgactttgatgttagttcaccactgacatacggcactcccagctctcgggtagagggaaccccaagaagtggtgttaggggcacacctgtgagacagaggcctgacctgggctctgcacagaagggcctgcaagtggatctgcagtctgacggggtgagtatgcagtctcctgaaaccatcttatggcgggtatcatgtgggtaactctgttttcatgattctgtcatgtttttctgtgtaggcagcagcagaagatatagtggcaagtgagcagtctc

SEQ ID NO: 129731 - DNA, 1016 bp, Homo sapiens
gctactcgggaggctgaggcaggagaattacttgaatcccagaggcagaggttgcagtgagccaagatcatgctgttgcactccagcctgggcaacaagagtgaaactctgcctcaaaaattaaaaataaataaataaaaaacttactttggtatcacttcattatagaaggaaaataaagtgtgaggtcaaaatctttttcccttctaatagaaagcaaagaatatgccagtatacatcaagaaggcactttcgtataaattatgaaatttaacccaattgaaaatatgcagaaatagatagttcagcatacctaaatttgaaaacagcacgtgcatgattctgtagggtaatactttggggacatgacatgttgtctttttatactttgctaatctgacatgcctttattatatttaacactgagatatgaatacaaatacatcttcatatttgtttttacaggaagttattccaacttttgacatggctgtcaatgaaatcttctttgaccgttaccctgactcaatcttagaacatcagattcaagtaagaccattcaacgcattgaagactaagaatatgagaaacctgaatccagaaggtaatgtatttttcataggattacttttgttgaaggaaaatgccttacatgaaaatagccttgttttcattgagaaattatgaaagaagtaattggcggtggtagtcaaggtgacggattataaattgacaataatatagattcagttatcctatatacttatgaaccccctatactttttaaatttaattgaagtttctgatataagagatgtgactattggccgggcacagtggctcacgcctataatcccagcacttcaggaggccgaggcaggcggatcacctgaggtcaggagtttgagaccagcctggccaacatggcaaaactcctttactaaaaatagaaaaattaccagggcatggtggcacacgcctgtagtcccggctactctcgggaggctgaggcagga

SEQ ID NO: 129732 - DNA, 1054 bp, Homo sapiens
aaggggttctcctgtgtggataataatgactttaaagtatagaggactttttctctaccaggtgctcttactaggcttgaagtacattggcacgttcagtccttggctctgggataggtgctgataccaccccattctataggggacacaaaatgtacacagaaaggctagggtcaggactcagtccaggctgtctggcttttttcctgacacagcagggtgtcatacaggaggccaggtgagtgaggcaggaggcagggagcagggtaggcagacaagaagggaacgagggatgcctgctggacaggggccctgaggaagaagggccagaggttcgctgggcttgagagtctcctgaagacatagcctgcagatgactggacacagaaaggtcgccctaggcagagtcttgggcacctagctcctgtctgtgatcccagctattcctggacctccacacctcaggtcaggtgtgctgacctctcttctcccctcacagacattgaccagctcatcaccatcagcggcatggtgatcaggacatcccagctgattcccgagatgcaggaggccttcttccagtgccaagtgtgtgcccacacgacccgggtggagatggaccgcggccgcattgcagagcccagtgtgtgcgggcgctgccacaccacccacagcatggcactcatccacaaccgctccctcttctctgacaagcagatggtgcgcagccaccctggccccccaggctatgctttgcctgtctgtatcctcaaaaggccaactataacttgtccctcggaccctgagcctcacttcccgaatggcatccatccctctctggtcttgtgggtttcgttagtggcctatgggctaaatatgcagagcacgcaaagcccctgcttcagggcactgtccctgtgctgttgccagtggcactgtctgttgttagagacactgtattttcatggcctaaaatgcttcaaacgtttgagatgagaatacttggttaaatgtcattctgctttttccattggtaaaggattgaggaattttt

SEQ ID NO: 129733 - DNA, 1163 bp, Homo sapiens
attgagctagaagcacagcagctccatttcaccctcagggtgactgtgcccgtgggcatgctcacgtagctacagttgccctggagcactgctgactagtgggcccaggtgaacacgtcctcgggtctatcatttgcagaaacctgggttctttctcttttgttttgttttgttttgttttgtttcattttgttttgttttgtttttgagacggagttttgctctcgtcacccaggctggagtccaatggcaccatcttggctcaccgcaacctccgcctcccaggttcaagccattctcctgcctcagcctcccgagtagctgggattacaggcatgtgccaccacgcccggctaatttttgtatttttagtagagacagggttctccttgttgattagggtggtctcgaactcccaacctcaggtgatccgcctgcctcagcctcccaaagtgctaggattacagacatgagccaccttggttctttcgagcttgtccgtttcctgctgctatttccctgcttgctcatagcaagcgggagctttgcaatgtgggcctgagtcctgggcttgggagggtcatttaagagacggtggagctcaccctttccagggccagcccgacgtggtgcctcgctctgaagtgcacctgttgcctacgctggttgctgagccactcggaggaagatatgggaaggtaaaagtgcatctcctggttgtgccctcaggcatctatcgagctgtgcctattcgagtcaatccaagagtgagtaatgtgaagtctgtctacaaaacccacattgatgtcattcattatcggaaaacggatgcaaaacgtctgcatggccttgatgaagaagcagaacagaaacttttttcagagaaacgtgtggaattgcttaaggaactttccaggaaaccagacatttatgagaggcttgcttcagccttggctccaagcatttatgaacatgaagatataaagaaggtaacagtggattttaaactaggggttgggatttacaattctttgggatcaaatagtataaacatccactccgccactcgagccatccgccataaaggacagagttgtggcctgttagagcaagtgctggcaacctgacttgccattggttgagaagaatcatagcattgtcta

SEQ ID NO: 129734 - DNA, 1155 bp, Homo sapiens
atctctggtctaaacttaggtttctaaacagaagaggccacacagtgtcagaatagggacttgcatggccaccattctggtgtaatgataggtgctgatgaactggtcagtgataacttaaagcatatcaagcactttcacgagcctttttataccttcctgtgatttcttaattgtagttctttataagagagaaaagtacctctaaagtttaaactacatctcagttaactgtgcagaaaatgaatgtttagacatgtctctgattatttagggaattttgcttcagctctttggcgggacaaggaaggattttagtcacactggaaggggcaaatttcgggctgagatcaacatcttgctgtgtggcgaccctggtaccagcaagtcccagctgctgcagtacgtgtacaacctcgtccccaggggccagtacacgtctgggaagggctccagtgcagttggcctcactgcgtacgtaatgaaagaccctgagacaaggcagctggtcctgcagacaggtgctcttgtcctgagtgacaacggcatctgctgtatcgatgagttcgacaagatgaatgaaagtacaagatcggtattgcatgaagtcatggaacagcagactctgtccattgcaaaggtgagtcgccttctccaccgtgaacatggacgtgtttaaaatatgtggacccttgaaagacagggtctgtggaactgtgctgtgctaccttggttctaacttggggagattgataagtgctttccacatcatatttcagctaaatctcaacatgtcttctacagggtgtcacgttttgtctttattgctgtactagccttgaatttgtcctaaagctcttgcaaggtgcctgcttcctgagaaagatgtggttatagcacacattcatctaaactcagtccttggcatgaatctgaggacagggcttatccaggtgaactgctgaagtcagtaaaggcaacatggctcaggcaatagaaactcagtggagggaatatgggtttagtaggtggccgggcgaagacggtgcttgttaattgccagcgtcagggagaggcttctaactgcactctttgctctgataggctgggatcatctgtcagctcaatgcgcgcacctctgtcctggcagcagca

SEQ ID NO: 129735 - DNA, 1065 bp, Homo sapiens
attgactgcacatctgtggtgctcaagcagtctttagtacgtcgtttgtaggtgtattggtgtctcaactaggaaaacagtttttttgttgttgttttgggtttttttgtttgtttttttgagacagagtctccctctgtcggccaggctggagtgcagtgacgcgaacttggctcaccgcaaccttcgccttccaggttcaagcgattctcctgcttcagcctcccaagtagctgggattacaggcaggcaccaccactcctggctaattgttgcatttttagtagagacaaggtttcaccgtgttggccaggctggtctcaaactaccaacctcaggtgatccacctgcctcggcctcacaaggtgctggaaaaacagtatttttactttgttttcttaggtttgatttgatcttcctcttgctggaccctcaggacgaagcctatgacaggcgtctggctcaccacctggtcgcactgtactaccagagcgaggagcaggcagaggaggagctcctggacatggcggtgctaaaggactacattgcctacgcgcacagcaccatcatgccgcggctaagtgaggaagccagccaggctctcatcgaggtaaccctgctgaaaaaaggcttactgtgcctgtagcccacagcattaatgtaactgaccaatcatctcctttaaaatattaattattttgttacgaataacatactgttctcttccttgttttgagacagagcctggctctcttgcccaggctggagtgcagtggcttgatctcggcttactgcagcctgtggcctgtgcttctgggttcaagcgattctcctgcttcagcctccctattagctgggattacaggtgcccacaaccactccggctaatttttgtatttttagtagagacagagtttcaccgtgttggccaggctggtcttgaaatcctgacctcaagtgatgcgccagcctctgcctcccaaagtgttaggattgcaggcgcaagccaccatgctgggcctaagaataataaacttttcttttttttttttttgtgagacggag

SEQ ID NO: 129736 - DNA, 3834 bp, Homo sapiens
gccaccctctccaagaattcttcccaagcatctcccagttggaatatgttcacccaccactgcacgctgcacgttgatgtcttcacctgcgatttctgtggtctgtctgtgtagtctctaccacttgatgagctccggggcccaggaccatatctgagttccgtttacttaatggaagcctaagtgttcaaaattcacccacaaaactaaagttgtcaccaaggaggtttgcttttgcttttgtttttctacctacaataggcttatgtagacatgaggaagattggcagtagccggggaatggtttctgcataccctcgacagctagagtcattaatccgcttagcagaagcccatgctaaagtaagattgtctaacaaagttgaagccattgatgtggaagaggccaaacgcctccatcgggaagctctgaagcagtctgcaactgatccccggactggcatcgtggacatatctattcttactacgggttcgttattttcagtgaacagaaaagcttttgaaaattatttcaatatgcatgtagtttatatgtcagatttaagctaacagttaaatcatttgaaacagaagttcttaaccttttttggattaggacccctttgagaatctgatgaaagttgccctttaatcttatcttgataaaaatattgattaacacacacagttttgtgtatagtttttttttgttttttttttttatactttaagttttagggtacatgtgcacaacgtgcagtttagttacatatgtacgcatgtgccatgttggtgtgctgtacccagtaactcgtcatttaacattacgtgtatctccaaatgctatccctcccccctccccccaccccacaacaggccctggtgtgtgatgttccccttcctgtgtccgtgtgttctcattgttcaattccagttttgtgtatagttttaaggagattctgtctccttgactgtctgggaagttttgttaacccattttagagaagttgtttgtttcttagcagcagctgcttgctgcacagatgtgtagactgttaaggaaagcagcagctagtggcttacagaaatttccaaataattaaaaactcattcccttcaaatgtactcagcccctgtcgccttatctttctaggtgatactactaaaggaatatttttgagaatttgaagcatttcatttcataatagcaaaaatgttttcattgatttctttttaaatcagggatgagtgccacctctcgtaaacggaaagaagaattagctgaagcattgaaaaagcttattttatctaagggcaaaacaccagctctaaaataccagcaactttttgaagatattcggggacaatctgacatagtaagtgtttatatgtattttttgtttgatagagctttctctttttccttaatattgcttttgggtttttttcctttatttattaaataataaatatagagaagaatgaagaaaaggaagatgaaccataagccatcatcaagaaataatcacaattaaaatttttggctgggtgcagtagctcacgcctgtaatctcatttgggacgctgaggtgggcagatcacttgcagccaggagtttgaaaccagcctgaccaatatggtgaaaccctgtctctattaaaaatacaaaaattagctggatgtggtgataagcacctgaaatcctagctactcaggaggcttaggcaggagaattgcttgaacctgggaggcggaggttgcagtaagctgagatcccaccattgctctccagcctgggcaccagagcggaactccatctcaaaaaaaaaaaaaaagaaaaaattgttatgcccctttcatagttgttataagtttgctttaggtatgaaatatttgggtgtccttttgtaaataagtaaggtagttgtttagtgaaaagaactatgcagtctttcagtgctggtccactttccatcgctgtgttgtgactgagagggcagagttgatagttacaacgtggactatacagatgccaagtctaccacatggaccatctggctactccactcctgatttagagcataaggcatgtgtacagccaccaaaaagagaaagattctgggtggtactttaacattataattattgtgtttctaacaggtaaaggagggacttgacgtgtacaatatttattttctttctcttccccacaggcaattactaaagatatgtttgaagaagcactgcgtgccctggcagatgatgatttcctgacagtgactgggaagaccgtgcgcttgctctgaagccttgtgagcaaggaaggctccctgcatgtcctgcttgctgcacgccacatgggtgtggtctgcatctcagttggccgccatcagtgtaaatagagcttaaagtcatggtttggctgcataaaaattttctaacttgggttcaatatttgtagtgaagtatctgttttcatttttttcacgttataaataaaaatactatgctggccgggcgcggtggctcacacctgtaatcccagcactttgggaggccaatgtgggtggatcatgaggtcaggagttcaagaccagcctagccaagatggtgaaaccccgtctctagtaaagataacaaaaaattagctgggcttgatggcatgcgcctgtaatcccagctactcgggaggttgaggcaggagaatcgcttaaacccaggcggcagaggttgcagtgagccaagatcgcgccactgcactccagcctcagcaatagagtgagactgtctcaaaaaaaaaaaaaaaaaaaaaacctgccaattttcaaacataccgtagagattattttcaggtgccattttatagtatagcagcagggcttttactctgtgtatgcacagatgcagtctggggcatggtttgtgtgctggactttctcatggccatcatcagtatgcttatggatttgatgacaggcatagcctgggcatatcacctcattggtaaagggctagagcctttcttttttatggcacttctttttttgagatagggtcttactctgtcaccctggctagagtacactggtacaatcacggctcaatgtaggcttaacctcctgggctcaggtgtatgtcactatgcccggctactttttgtattttttggtagagacggcttcgccacgttgcccaggctgcaagcgatatgcctaggctcaagcgatctgcccacctcaacttccggaagtgctgagattacaggtgtgagccactgcacccagcctttgttttattttttattttttgagaggtatgattctttctagagattttttctcatggctactattagatcaggaatgggtgattggagattattagattctaggttaacttctaccactttaccctaatacataaaactttttcctaaataaatgatggaaggaataatacttggttacctggcattatttttcagtaagaaaaaagctttactaaccactacatttatggaaatttgtaggggtaagtattttataggtcataaaaaacaccataatataacgaatctcattttctttaaatgtgaattaaatcctaacagtcatctttataaaatgaccataggctaaaatcttacgtgtaagtactactacaataaataatttctgaaacctttaaatcatatgagttgggccttttttataacttggaatcaacattttttaataaagtatccatagaaaatgatagatctggccgggcgcggtggctcacacctgtaatcccagcactttgggaggccgagatggctggatcatgaggtca

SEQ ID NO: 129737 - DNA, 1022 bp, Homo sapiens
atgaattttcaaatctatatgtactgaaatggaaggctttgaatatatgttgtaattgttgctttagagtaatacctcaggatacattctgcatacattttaattaagtggtgtcttttacatctttattacatataggtgtcataggttttaagatctttagcagttctagtgttggggtagtatacatacttgggtcagctagctagtaaggcaaggattgttttaaaagtggaattttagtgttatgactttactgtgcttgctgaaatctaatctgtgctcgttaacggggccatatctttataacagttgtgcttaggacctcttatagatttttgaaaatttagtaataaaataatgcattttaatttaatacttttcattttccttttgtgggttgcattattaaacacaattttttcataacactatacatgagtgtatgttaatattttgaaaagaccaaaggttagatgatattaatggcaaatactttttgttaatcacttttagttgttttggaagttgaatataaattataaagattactgataaattattagcatattgtacatagggagtctgtattttttttttttttttgagatggagtctcgctgcattgcccaggctggagtgcagtggcatgatcttggctcactgcaccctcctcacctcaggtgatccacccgcctcagcctcccaaagtgctggattacaggggtgagccaccgttcccatctactagttttttttttttttttttttgagacgcagtcttgctctgtcacccaggctggagtgcagtggcgcgatctcggctcactgcaacctccgcctcccgggctcaagcgattctcctgcctcagtctcctgagtagctgggacaacaggcgcgtgccaccatgcccagctaattttttgtatatttagtagagacggggtttcaccatattggccaggatggtcttgatctcttgacctcgtgatccggcctcccaaattgctgggattacagg

SEQ ID NO: 129738 - DNA, 1039 bp, Homo sapiens
accatgttatccaggatggtctcaatctcctgacctcatgatccacccgccttggcctcccaaagtgctgggattgcaggtgtgagtaaattttgtttttataaattacatttttttctgctatatttcatcaattctaaaacacattgaaatatccgaagtggatatatgtgttgtagtttaattggtagagtgtttaaattttttaaaattatggtatcatgtagttggttatgccatcttagatttgatcaaagacagtatttaaaaaaactgttaagatgcccacattgaggtgaatatataatagatttcaaatactggattctacaaacatactgacgtgttctcatttgttaactgaatactaagcaattgtgatcaatttaaacttaaatgtattctattgaaatatatttttaatctcatacaattttttgaaatattttagaggctaaagttgaaaattggtttatctggtaaaccttcatttcagcaaaagaatattaccttctgattttttttggtgaattatataaatatagtttttagtattaaatctatttgtataaattcacagtgtctgaatgatggatgtatttcaaatttaaagttcagaaaaagtgtagctgggcatggggctcacacctataatctcagtactttgggaggctgaggcaggaggaccccttgagcctgggagtttgagaccagcctgggcagcctagcaagaccttgtctctactaaaaatattttaaaaattagctgcgtgtggcggtgcatgcctgcagtcccagctactctggaggctgacgtggaaggatctcttgagcctaggaatttgaggctgtagtgagccatggcgacagagtccctgtctcaaaacaaacacgcagacacacatgcacacacaccccagcatatgctttgatgtcaataattgtgtattattgacattattgacattattaatgtcaacaaatagtgttcttgagagtggggttgtaactgatgtttttgaaacagccagtgggggtt

SEQ ID NO: 129739 - DNA, 1035 bp, Homo sapiens
gttataaattatattttttctattaatacttattgttaaagttagcatttaattttatactattgatattaaaataagcaattatgataacttctaaaatagttcctttttattttgtttacatttattgatgcttcccacgtgcaggatataatgctcgattacgtagaggattggggggaggaaggttgatatggtcattgccatcaaagttttgcagtttagtaagggagaaaaaatcagtacaaatgacagattctaaatatgacagagcaagttcactacgggactttagaatatgtttcttctagctggaataattgaggaaggctgaacagtggaggaagttgcctttggaatgatccctaaaggactgactggtaggatttcagaaggtggtgatggggatggagaacattccagatagagaggagaaaaggtgaggaaatggagggggtatgtggggagagcagtcattttgacgtaacatgttacctcttgtgtgaacctgagggtttctaaattggtttgcattgagtgcatgttgctatttgccctctgacacttcacatgccatagaaatgctgtaggtctcagcttcttcatctataaaaagtctatgattcttacatttttttctagtatggttggcaactggcccattgtactttgtctttcttgggtttatgaagttttatttttactcaaagtcttttagtctttttttctagcttgggatttttttttttttttacattgcattccttacttaatggtcccatccactgcactccctgcagtgaatctttgaaatttgtctctctaatgtttttggcttgttggaaagagcacacatttgaagggttttttaagtctttggttttgtatactggttgctaccttatgatgagagcattttaactgttttgctcttgggtagagtttagagttcctcctgatgatgatgatgatgatgatgatgatgattattgagacaacatcttgttcagccacccaggctggagtgcagtggtg

SEQ ID NO: 129740 - DNA, 1050 bp, Homo sapiens
aattttagtggatctcaaacttgtcttaaatcaacaaccttctactcatgttaatgtcttgattaaatatcacaatgcaaaatacacattaagtaaaagaattccagctggtaaacatgacctggacatttgtaagaatatatttaatatatgtacacccattatgttttcaggtaacaggaggaaaaatgcagcacaattttttttctcttgaaaggcactgtcatttaaacataaacctggagtactcgaaatagaattcaggtttacaagatgaaagcgtgtggagaagtgtcagatggcagtggaagcatgtgtgtttctaaaaagtaaaaatctcaagaaaacagaaatggcatgctttacccatcttacttagtgaaagagagctgcagttgaaattgtttaaaaagtagcaggtacaatgaatattgtcacagatgtgttaatttttgaagcaatgtgggtgctgactactagtagtatcaaaaatatgttcaggattgttttgatacctgtatttataataaaaaatgttggggggagttgatgaattcctgttaaaagctgttcttgtgtgttacatgtaacagacatggtaaatatttgtttacagtctttgtttaacaaaccatgcatttaagtttaagtgaagtcaacaaaaaggaaataggtgtatggatatgtgattttgagattaaagttagtcttaaaatgtaaataaaatgtgaaacgtgtcctcagagactgtgccatttctattatgttgatgtatatgtacagtaccttgccagggaagcaaaaattggaattattgtagcttttcatgtatacacacttttatttaccctattttgtgtacttcttgtgaattataatttgcagactatttcagaaaagaaattatctagtttaatttcttctttggacaaggagtcctaggtattatattttgagtttgatttcaccagaaataataatattaaaaagatctttgcattctggcagttcttttaggattataggttgcaaattatccaaatatatatc

SEQ ID NO: 129741 - DNA, 1944 bp, Homo sapiens
tgaaactgtagtctaatggtaactgatgatctgaatccgtctctctgataacctcctttccattttgaaaatgtgtcttattatacatggaagctagtaactacgtgaatgctgttggcaggatgagggtctgggtacctcagtctcttgtcctgtttccttcccccaaatccaccattgtgaagttgccaaccccctgccgccttcccctgccaagtacatgttgtcagagtcagccctataatgttcatttcccctcttgtttgtgggattatggatctctgcagaaatctgcatgccaattaacccatttctaaagcagaatccattttgcatgtcacaatcaagatgtacttggcaatctaagacacactgggagactgtaagaggaattaatatagaaaagctcttaattataataacatttggaagaaatttttcctttgttttgtaaagtggctaaggttgtaggagtgtgtggtatttattaccttttaaatgaactgtaaatttgccttagaaatttgtttaaaaggctagcaagtgagacccttgaggatgatcatatactaataaagattaccaaaagaaacttcttgtcctgttaggtcagtgttatgatttaatggttttaattacttaaccaattttaagaattgacaatttttaaaaatatttttttctaccattctaaagtaatgtcttttgttgtgggtttatgtgtaactacaggattttggaacataaacattttgaaggatagtcaatggtatttagtcttggatataaaaatagagaaaatttatagctttatgttattaaaataatttatcacacagagtgatttgaggttttcgcagagtagatttgtttgactcatggtttattagtctggattacttaagaacaatatgttgattttaatgttaattcccactaaatatataatattgataaatacatgtgaaattaatattgtttggaaaatgtagaggacacagctgggaattatgaatgcttttttcttaataggtttggtgtgtgtggctttgaatggttctgctgatgcatcatggaaagacagcagggaactgtagcctgccatcaaaactgtatcaactcttttaatgagcatgtgactgtattaggtacattttgaagaatataagtactgatgataaagtctagtatgcataataggattttggaggcatttcaggaattttccttttatagtatgctttttaggcatctgtatgtgtaatatcatagtatcatttattgctgggatggatcgaaaagcactgcttttacttttctgataagtatcaaaatgattttccagtaccaacttgactggcttttaattattgtcacacacacacaaaattcaactcctcaaggtttgggaaaattgtgtatttttttgtatacaagataaaagtgtcataaaaaggaatggatgaattgttgataggaacattagcagttaatttttacctgatactgagtttactgtaaaataggaaatgcataggaaggaatacctcctaaataatatgccttatagaatgatgaaatcttaccatagttcatactgaaaatgttgtttatttaaaagtattgtggagtgttgaaaataaagatacacaataagtattttctgaagagaaaattaatgaaggtatttaatgatataggaaataagtgacaagttaaagtccattttgtttcaataaaggagttgtgcaaactcaaggagtgagttacatgattgaaaaaaaccattggatatgaggaggttgctatggtgtttatatccttaataggatcttttcatctaaaaaattcctaagaatctgctccatctcatgtttaaaattaaattttttttttttttttttttttttttttagagacagggtcttgcactatcacccaggc

SEQ ID NO: 129742 - DNA, 1132 bp, Homo sapiens
cacttctctctccaggttgtggatatttactctctgctctccaccccactgctgggcagtctgttattccctgtcatcaaatagctacttaactagaaatggcatctctcagtgtcaccaccattccctccacacatctgtctttctcagcatagtctcaacttcaccctgtttcacaaccatttgccatcatgcttcccctcagtgttattatacaagagatgaacggacggtgcattgcaggctgagaagtgaggaccagcatccccatagctgcctgggttgcagggctgcagacacacagagaccgcaagaggaggggataccattaaatattttcaaggagatagataaggtcgtacaattattgtttttcatatcaatgaacactctgaggtttgccaaggttgtgagtttccaactaatcaaaacctccctgaatattaaaatacacacaatgtaacaatatggaattgtatttggatagcttaaagtctggtacaaagtagatgctcaataaatatggaatgcaaggatgaatttccactccagtgtctgattacagtcttctgttattgtcatctgaggtatgataccctaaagaagaagtgaaccatccctgaaaagaggacactttacctttggcatccccatagcaaactgacacacctagcaagcaataggtactcaatgagtgctcaatgatttgaatcaaggcctctcttaccttttttgcatgtctgcctaaagtaaataccatattccatgccattttgcgctcagtataaaaccatcagcatggagaaccctctgcaggaagtaactattctgtaaataaacaccctttctccactttgaatccaaattttctaaatttttgaacctacagtggcttgaatactattgctcatttcttgtttgatgacaagataatgtcggaggtttcatgataactcctatacgcaaaggactagggaaaagtcactctccattacactttggagaatacataaaactcagtggcttttaaattaatcatttacatctaagagaaaatatcgtggaaaaaagagtagaaaaaagataagcaatttccttatatattatgccaataaagcattttttaagaact

SEQ ID NO: 129743 - DNA, 1101 bp, Homo sapiens
catgtagaaaactaaataatggagaaaaaagtgaaaggataaaaagaaaagtaggaagaatgagttgaatgagcccaaaaagctggtgccatggggtctgtatttttgtcagagatggagcagacactgagcgctgcaacttccagcaaccagcacagcaaggaaaagctctccaggcgtgactgccatggaaacacccttgcacagaggactcccatgtattcagccaggtgttgggagagcctggacttcagatcacatccctcacacacaggaaggtttctctaccatggccctcagcacacccacccctccccagacccacagagtaggggaatttctggaaggaagaggaatccccccacctcacagggagcgactatcctcacatcagaggttcactccctgatgagctcactcaggagctctgcagtcctgcctttttttcctctggtgcagagactaattacagggttattggtcctcccatttgatgtaccagtggatcagaaaacaagacaaacaaaacaaaacataagccagctgagtgctcagaattatctcacacaacctcttcctgcaatcctagagaaggcaatgcctttaacacacttggtgtccataagccatgccatgagtaactgaatgaaggaaggaaggttccgacattctcccttcacactcttcgccccagcatgtgctttctgaaacactcactctcagattgaaccccagccagtgggtgaaaatgatagctatttgcatggaaacttgtgggggctttgatttcattaatcctatattatattgtagcttagtaagctatagatcttattaaagacaaccagagacttctggctatgtagcatattcccttgcaagctgcatttgtgaaatacagtttacaaattatcaaaaacaatccatttggaaaattttcagctgccattttgtttaaaaatggagcactcaaactaaaattaaatctaaattcaacccaaacatcttttaacagagtactcatgctccacccaaatcaatcaactttttaagttgccatggagcagagataaaatatgaaatactgggcaagcaagttac

SEQ ID NO: 129744 - DNA, 1047 bp, Homo sapiens
gtttaaaaataatgttgaggctctccttcctcaatggggacggcgaaggcactggcttggctgcactgtctgacttcagagcacctatagctccgtgcagctgtcagcctatgtgtgcattaagtacagtaactccgtaggtgccagggtggaaatgaaacattttaccagtgtgtatgccctcctaaatgggtctatcttcttcctaagaaaatcacgtgtgtgttgctaaatatctttccagtgtgtgtatacttgcgtgtggatttatttttaattatttttgccttaatcttctctccctcccttttctttcccagtgattatttccccgtatctctatgagagttactccatgcctgtcataccacaaccagagatcctcagctcaggagcatacagccccatcactgtgtggactaccgctgctccattccacgcccagctacccaatggcctctctcctctttccggatactcctcatctttggggcgagtgagtccccctcctccatctgacacctcctccaaggaccacagtggctcagaaagccccattagtgatgaagaggaaagactacagtccaagctttcagacccccatgccattgaagctgaaaagtttcagtgcaatttatgcaataagacctattcaactttttctgggctggccaaacataagcagctgcactgcgatgcccagtctagaaaatctttcagctgtaaatactgtgacaaggaatatgtgagcctgggcgccctgaagatgcatattcggacccacacattaccttgtgtttgcaagatctgcggcaaggcgttttccagaccctggttgcttcaaggacacattagaactcacacgggtaagagaaaaaccataggcaggaatgttactctgagatacaatgaagccctgggctggctgttggatttgcatgaagttgtgacatagtgcttttaatgatggacagtcattgatagctacttcctgactactcaaaaagttgttagggcacaaagtgctccatttcttgctaacaacct

SEQ ID NO: 129745 - DNA, 1234 bp, Homo sapiens
agctgctgtttagatgatgcttttactatgcaggagagagtttttgttaaggatatatttgaagattggcttttccatattgtccttcattctttgaccatggcaaagtgtacagtagattttcatgatcattgcatatttcttgtcattgaaatgtatcttttatgtttttaaatgcattcattttacacttgtgagtttatcattgactttaagaggtagaaatgaaaaatgaaaattaaagctaaagcctttttatctattaatgcagatatattagaataagaatattttgggtttgtgtttattttttaatgaatttatgtttacttgatatggaaaattacgctttataggtggaaaagtagcaaataaagattaagtaaaagtaagtgaaaatgatggggaatatagtattggaattttatagctagttaaaacagtaagtatcatctaatttgggtgtttattttgcagatgagaaaacagacctagaaccgtggcatgttttgcctgaaacatacagtgagttagagacagggcctaagatagcttctagcatcagatcaatcccaagaatccatcagcaacctcagaccaacccaagaagataatttaaatctatactgcttattggtcaatatatttggttctagtattaataaagaaaaatgttattaaaatagcatacatagtagtaaaataaaatacaaaaagtgtgttgatttatagctgtttgagatgataaaagtgaagcaaagcctgttaaatcattggaagacttggaaaattattttaaataaacaattacatgtaattaagcatttttctcccatggcctgacttttatgtttgtcttcttctttttaaatttaggcaatctcagtacacctatggatatgctcaattatggcatacaattgtctttatttggacatctcactgtcttttgactattgccacttctgaagagtatggaagttttttaaaatttatttttataaaataggtagggaaatttataaaatattcatgaaatataagaaataatttagtgtacatgtaggtacatgtgtgtgtacccattaggttcaactaatagctttacagtctcctgtgtgccccttcccatccacatcttaatccctcccttctcaggaggagggattttgtgtttatcataatctgcctttttgttctcaatcacctgcctgcatctctaaacaatgtattt

SEQ ID NO: 129746 - DNA, 1288 bp, Homo sapiens
aaaggtagagttttcatattttctgtattttctaaaatatgctaagaaacacattttgttctatgaaaaaaataaacaatagataatgttttattgttaatattttctttcttgcgttttatgtttgtttttagctccctgtgctgtcaggaatctacaggacttggctcgtatttacattcgacgcacacttagaaatttcataaatgatgagatgcaggccaaggggattcctcaaagggctccacccaaaaggaaaagaaagagagttaaacagagaattaacacttacgtatttgtgggtaatcagcttattcctcagcctctagacagtgaagaggatgaaaaaatggaagaggataacaaagaagaggaggaaaaagatcacaatgaagcaatgaagccagaggagccacctcaaaatttactgagagaaaaaatcatgaagctgcccctccctgaatctttaaaagcttacttgacatattttagagacaaataacttagatcaagaagaaaaatgcctactgataattcctttagtcttgaaaatgtagcatttgttaggagttaaaagagagaattatttctttcatcagagcaaattatagtggaaaaaaaatcacttgtttctgtcagtaacacaaatgatgtattcagtgaataaaagaatcccttttataaaatctatttttctttaaatcttggaaaaatgttgttttagctcagagtgatttcaaagtggaatgcaacagtagtcaagacttgtgtactataaatccttttctgattccttacagatttgtagtgatgaggtttagatttaattttatatatggtttaaataattgttaagcttatataacctgatctgaattgcagttgtttgcatttcctctatgaaaacttcatttatctaataaggaagtcaaatgctttgtagactatttaccttacttttgttgcaatcactgttgttgggttgctgtatatatattccgggcaatatatgagtgcaataacaatacaagatattgaataatttagctttaaaaaatcccacaaattttatgaaattttacagccctgctacttttgcttttgaatctcttgccaaaagacatgggtaaaatatctgcctctctcatagagattttaagagcacagcaagtgaattattaaaacaaagtctatacttaatacaactctttatatggaccctttacattttcagtatttaaaaaaatgaggttatcttaactctatagaattttaaaagtatatttag

SEQ ID NO: 129747 - DNA, 1199 bp, Homo sapiens
ggcttagttctgggtgctttcttctactcttggtctttgcatgtcacgatgggctgatgacatgagattagcatctccagccccgaccttgcccctgagctccagagtcataatcttatggtggcttatggtgggaaaggcagcacacactctgcagtcaaaacctgcattcagtacgtaatctcctagcattcagttattacttgtaaaacattgaaaatggtgacgagtataacattgtagttattattatctctgaaatctccactttggataaatgatagacaattcacatctaacacaaagtaagtacactttaaaattttcttctcaacctgttctcccctgtatctttgtcatgtcagtcactgatatcagcatctgcccagttgctcaggccaaaaccttagatgttttccttgattatttttttttccctccctcatcccctacagccaatccatttccatcctatcttcaaaatatattatacctgaaatttgtccatctctcccatctatactgccaccctccgtcagagtgtgttcatatttctagtggattaccaaaatattccagctgatctcgtgctcccaacttcatctgcactagtcttccttcggctccttggacatgctaagctcatttaccttttaggttccctctgcccgcaagatgtttacatggctgttatatcatctagatcttagctaggacaggatcttctcagggagacctttatgaccacccaatagaaagcaaccagggccaggcacggtggctcacgcctgtaatcccagcactttgggaggccaaggtgggcggatcacgaggtcaggagattgagaccatcctgactaacatggtgaaaccccatctgtactaaaaatacaaaaaattacactggtgtggtggcacatgcctgtagtcccagctacttgggaggctgaggcaggagaatcgcttgaacccgggaggtggaggttgcagtagctgagatcacgccactgcactccagcctggtgacagagtgaaactccgtctcaaaaaaaaaaaaaaacaaaaccagaaccccactttctatcatatcattggcgttttgatttttttcttgtattccttatttttcttctttataattgatttttgtttagcaactcctccctgattatgcaagttgcataagtgcagggagtgca

SEQ ID NO: 129748 - DNA, 2167 bp, Homo sapiens
ctcctagtctctttgtaattacatttatttgtgaaatatcaagttgggggtcgaattagaatctatattccattaatatcatggaagagcatgaagtcaacatgtagtcaaaatatggtcttattactataatgccttaaccaaattactgcacctgtctcagacatgtattttgaaaggcaatggcatgtatagattgtagtgcttctcctagacactgtcagaccacagatctaacattgcagactcacttggccatatttgagtatcccatttgcgttaaaacatctgtattaacagcaaatatttccattccttttatatcttatagtaaatatttaaatggaattaatttggtcacatttacatttaagtgattgtgtagctctaactggcagttgttcccttaaaacaaagttttgactgtaaggtgaccacattgttgggattaagttgttcactttctttcttttttttctctaaatagttaacacagattatgcgaactggacagaacacttgggaaagtaaaaatatccttgctgtttcatttgctccacttgtgcaaccaagtaagaatgataatggcaaaccagattctgtgggactccgtaagtagctcttcatattttctgattgaattatgacttatggtgtttggcttttatgcttgggatttaagactatgtaattatgaagaattaaatacttatgcagtaagatatttggtggatttattcaactttttttttttttttggagacagtcttgttctgttgcccaggctcgagtgcagtggtgccatgtcggctcacagcaacgtctgcctcctgggttcaagcgattcttgtgcctcagacacccaagtaggtgggattacaggtgtgcaccgccacgcctggctaatttttgtatttttagaagagacgctgtttcaccatgttggccaggctggcctcaaacacctgacctcgagtgatccacccatctcagcctcccaaagtgctgggattataggcgtgagccacccgcactgggcctcaatttttttttttttggtaaaataaagccctcaccttgtaccagacactgttagctaccttcatggaaacataagaagaaggggcaggtcaaaccaaaaccaaatttattaattatagtttgtgatgtggtggcaagttactggttgtgggaagggcatctactgtaggtatggtggtaaggaagaactttctgccaaggcaacatctaaattatgaccagagtgatataaaagaacttgccacatcaagatttagtggcagcattttttcatacagagagacaataaatacaaaaggctttaggctgaagagaactttggtcattcccagatcaggcataaggtccagagtggtggaagctcattggctgcctgtggagggtggattatcataggaaaaaaaggcaggcaggccagtcaggtggcttttcttacacccacaggagagtggatgttggtgtggatagtgttgtctaaaggcagaagaatagctgactcgggagtgtgggtagagggaaaagaagaattcattttcccttgaggctagctgagtgctggcattatttactgttgccaggaagactggaagtggcataatttggaaataggcatagaaaggtctgacattttcctttcaccgtgtttgagttgtctgttaccatacagacaaatgtcaggtggcacgaacctgcttcatgagcaagttataaatggagacccctcaacatgaacatggcattttaggctagggttagatagaaatggatgagatcatttagcggagagtggagataaagaggagatattggagttggacctgaggtccaccaatttagcgataaaatggtggaaaatggattagcgaaggaggggccaacaaaggtggtgggggcaaactagggtcaggtccccagggtgttgaaaaccaagaaagaaaagtttcaaggagggagtgatgaacctaatggggcaaatgagagcttgaaatggagaggagaggtggtattaattggtttgacttagatcatagtttttttaaccatgaggtaaaattctttaccaaaaaggaacctcttgacttagtttgccttttaaatgaacttattgcataggaatttgggttta

SEQ ID NO: 129749 - DNA, 1047 bp, Homo sapiens
tctttgtcccattcagtgatgttcctcagccaaaatttattagaaactcttcctaaccttactggttgcaggggtatgtggtcaggacactcgtatctttttttgataaagctctcccactttgaccttcagcaaaaatgtcaaactgagatgaattctacacaaacccttctcatttctgctggcccctcaccttttttggaaaggacaatgcaaagtgaagccttttctcatttattgatccttatgattctcattgttatgttattttggggggtgtcacaatattgaggttgtgatggacttttcattatatttacttctgaagacctaagtgaggtttcagtgtgggcaaaaatgttaatgttttgaaaacacatgtccgtcctatgtcattgataatataacaatacatttgatgagtgctaaacttaataaatattatatttaaataaagtttataatcattttatccttataattaatttgggtaacgtcattatttcaaaggactggattatggtaaattttttagatctaatgttttgcttaattgaattaaaatgtttgtttttcaatgcagatttgagttctgtgaacctgcatttgttgttggtaattgcctccagatagcttctgacagtcatcagtatgatcgaatttattgtggagctggagtgcagaaagaccatgaaaactacatgaaaatattactaaaagttggaggcatattagtcatgcctatagaggatcaggtaacttccactctccttttctttagtggcctaggaagcaagcaaatttgtttaaggttaagaaattttattcagtgaaaggtatattgtaacttttaaagaaaaaattacttttcaccagatttatcttatttgtttagaaaaaacttgaaacatcttaattatttaaacaaaggagatagagaaaagatctctctactatgactggaggtaacttgggctttcaactcagctcagctactccctgtgcctggtgttcagcaagctgcttcctcctttgttttgcttaccc

SEQ ID NO: 129750 - DNA, 1304 bp, Homo sapiens
tatattttaatatgcaaatataaagaattagatattttacattgttctaaaaagtctctgaaaacccatgcgcattacagatgatctaaacttgaattagccacattttaagggtttacttgtcacagtggttggtggctttcatcttgatagtgcagctctagattgtcctgtctcatctttcagatcccagcttgccatttctcagggagcccttctctgatccccatgcctgtcagtttccctttaagagcatttatcacagttgtaatttatatttcaattagtaggattgttcgatgtttgtctcttccattagatatagacacgagtgtctcccattgtattctcagtcattgcacaaagctagtgctcaataaatagtatttgactgaaggaagtgtgcaattagtggtataaggtaacttgcccagtgtcacacatttaattttagaatcacacactaaattatttctaatttattttgctgtgatgaacatgtataaaatactactaattaatgaaaagtggttttaattgtaagttgtcattacctgtaatggtgatttccttggcagtagttctgtaagctaccacatatttttaactagtaggaagcttttaaaactgtaagcatattttttagttgatttaacatgtttgataaagtggtttaataattcaaaaatttttaattatttaaattccctagtcacattcatcctgaaaattatgaggttgaaataaattattataaaattaaagcatttaaaatgaatttctgtaaaatttttagatagaccatactgaaatagtccaacttattattaaagaatgcttactgtgaatttgataagatgattaaaccatgtgatctacagtatctaattacttaaaagccaaaaattatattttggccatattttaaacaatccgagattatggcatagttttgaatataaaagagaaattaaatatgattctctaacctaggtaaattcacattttgtgtgtgctgtgcaagtagaaaggatgagatgctattaaagaattgagtaagatttcattgcaaagctgatatttcaactatatcttgaagggatatcaggcatttattaagggtagaaggagaggggaaggatattttaagttaagggaacagcacatacacagatacaggatttcaaaacactgtgtgatggttcctgtaaggaattagaagcaagtaattcagtctgcctgcagagtagtacgttcaggctggggcagagacaggaaaggagtctagtagaaagacttgatgg

SEQ ID NO: 129751 - DNA, 2700 bp, Homo sapiens
tttcatggcttcaaacacatttttaggagaagaaattgttgaaatacaatttcagcaataaaaggctcacctttatatgacttacctgtcacatttcctgtaaactgtttggagattgtttttgttactatgaatttctctgatgctttctttaatgaacagtaactgtatttacttgaaacacattgcttggaataatgcttgaattattctgagatgactttgattcatttgaaatggaaaacacttgaaaatgtaaaggtttgtttttcaaaaaattgtaattaaatagcttaattattgattgcaagagtccttgaatggtatcagtgtatctggagatcaagagtttaacatttcccttggttttcttcacaatggaaaagtctgaagttttattttgtcttaataaagcagtcatggctcttaaaactcaaaatgtgtattttgacaaagtatttcaagaaaaagaagttttttgattcatttggcaggttgttttggatgaggtgtgagaacaaggtaggattcttttccacgtccttgaaatttctctattccactggaataattgtctaaaatttcaataacagcatcctgtggcacgtgataaactaggtgtgcaaattgtcagccccacttcaacagtgtattgaaggggaatgttgttttttctactctcagtcagctcctagacctagactatccgtctaagagggaagctacagggcaaggctaggtcaccctgatctcctagcagcttatcaaaagaattatatgggcaagttggcaaggtccctgctgtgaacgaaatcatctgtccatctcaagatgaagatattccaacatgcacctataaagaaaaccactgctaaggtaagtgattagaatcctggtgttattttgggcaagtcttcatgttctaaaccgagatatctgtgtgctctatatttttttcataaatgattttcagggtacattttattaagagtatgtcaattacttttccttatctgcctaagagagtctgagaatattcattggattttcaggtttaaatcaataaatgattataagcttagaatgaatgattttgtggttattatacacatttcaggactgttgatttttttttccttctgtatacatataacatttttggtagtgtaatttaggagtgtgggtcatctctatcttggaaattttgttttgaacattttttttttcaaagaataaaaatgattgctactttttattttacttacaaacataaaattttaatgaactcctaaatcaagtataacaattagggaaggaacacgccaaccattcttttacgagtaattataaacacatattaagtatcattttagtagactttttgccatttttttccttctcagatttcatttattgtgtcgttgatataaaaaggtagatttcagattttctctttcaccatttttaacctatgtgtgtaattttataaatagtgtagtattattttgtgataaactgagaactttcgttgaatttattgttcagtcttagagattatacagaaattgtatttgtagtttaaaatatgtcctttacctctataggtttatggaaacttaggtaacatacagttttcagaagatagtcaaggcctaaggaggaaaaatgtttatttttttctctactttggaagaatcaataggagttgtaatttactgtgttcgataacatggtagccaccatctgtgtcttgaatcagtcatctagttattcacatatataaatatatatataaatatcagtaaacatttacctgaattcttttttttctttgagacagggtcttgctgtgtcgcacaggctggagtgcagtggccatggtcatagctcaccgtagtttacagcttgtgggctcaagcgatcttcccaccttggcctttggagtagctgggactataggcgcgtgctaccgtgcctaactgatttaaaaaaaaaatttgtagagacagggtcttgccacattacccagactggtctagaactcctgggctcaagtgatcctcctgccttggcctccgaaaatgctgggattacaggagtgaagaaccatacctggcctacctgaaaaattgtaatcatagacttttggaaaaaatattaactgaaattttggccactctataacctgattggtatgaatttgtttacatgaaatgctgtataaaagtaagttatgggccgggtgtggtggctcacgcctgtaattctagcattttgggaggcccaggcaggtagattgccggagttcaggagttcagaaccagcctgggcaacatctctactagtacagccccatctctactaaaatacaaaaaattagctgattgtggtggtccacctctgtagtcccagctactcgggaggctgaggcacaagaattgcttgaacccgagaggtggaggttgcagtgagctaagatcgcaccactgcactccagcctgggcaacaaagcaagaccccttctcaaaataaaaataaataaatagatagataagtcatgatattagtatcagaatacaaaacgtctaagattcttaacagtgtgcccagtcagaaaaacctaagttcatattataagtactttattggaaagttaatccataatcgctttacagattgaaaaaaagtgagaatatgcag

SEQ ID NO: 129752 - DNA, 5634 bp, Homo sapiens
ctgtgttagcccatggttttaggtattttgaattaccaattttttagcaaatgataaaataatagcaagtaacttaaacttcacttagaaatactattcttttggcagttttgtcctgccagataagctactctcttgggagaactctgtaggtttcaaccttatccctggtagtagtttttgatagaaaactcaggcgaacttttttttttcccctttttttacattaaagcaatgtacgtggatttccattcaacttttaagtctgaggctaggaagtatttgcatatttcaagccatctttaaatactcctgtgatgtataaatgagcagaacttaaaaaagagctctgtaagggcatattattaatattttttataaaaatgctgctacgattgcaggtccttttggaataaatcatgggattgagcttcattcagatgtggtggaatatgccaaggaaaaactggagagcttcatcaaaaatagtgatagctttgataagtaagtattcatatctatagttttggtttaaaatcacttaatagatacatgcaacatgtctattcttgaacactattattgatcctgactggctcaattgaatgcagcaaaaatcagtgcaccataaaatgagaaaaagttaagattattctgtggtataacttttactatatgtaattctatagtaaattataaataatgtgattttttgctactacaactttattagtaatgttgaattcattaaacattcagctatcttttctggagatacagtgtaataatgctgtgattgcaatatttgtctggaactggttttttaccttttggatagtaatttagtagttctgtcctcttcaggacatgagaggtggtaccagtcagtatacaaaggactttaacatattcagctactttgtaatatatccagaagaaatgatcatagaaatacattgatatatcttgtgataggattgttaataagaaattggtttataaaaccattgttttgaactcacaatataactcctcttagaagaaacattgcacgggctttggtccttgggctggcaggaaaagtccatttggtgtgtaatcctaaaattctgcattgctatagagcaagagcacttacgctgaaatccatgagctctttgaaattgtgtaaaatttggagagcttttacatctctcatttcactgtgtatctgattttcaaagagaaaaagtgttaaaaaggatagaaaacacaagcttagaacagtcactttaaagaacaaagttttaggcaaaaacactgagaatttcaactcggcttgttgggagttggccctcatttatatccagcccttggctatgaccatcaacaacttgagggagggggctacatcagaactgagggcttttctctagaaagatctagattgaaggacaccaccagagagaagaagctaaaaaaccttgtgaatatcttcagaggaatgtttattttccccctcctgcctttgcccttcctccccttcctgcctttggccttcctccccttcctcttgtacttttgtttcattcccctttgcaatcccagtttgtatttatcgtctggcaagtggcatttgattggttgaagaacagaaacctgatgtaatggagcaaaatcctcagtacttaacagtgaaggcaaggtcttgtgtctacctaggtgtgattgtaactgttaaaaattgcaggcaggcatggggcagttgggaaatgctcaggtttttttttactgtagttcaatgaatttaagcaagccacttgaattttctgcattaatttactgagcaccatcctgtatcttatttatgcttgtctttataaacaacacgtaatgcacattttgattcgtttttcaaggcttactgtgttggttcatatcctagttccaagaaaagcacgtttggcagaaataaaagtttttactccaaattatttgataagaaatttggattcaattttagcatctttttgtgtctttattgtttctctctgtcttaaggattatagtggcatggtaagtgcttaagatgcagtcatgaatgtatttttatacaattagaactatagaattttgttcattttatttaattgctattaagtatttgttttgatcttgaaacttcatgtacacagaagggctttttgagtacatttgaatttagaaaatataaaagtattagtgaaagcaaatttttaaggtctattttaagctctgttatatgttagttattaatagatttcacctattaatacatgaagacacagataattccattttgggtcattaattgagcagaacagactcaaggaagactcttgaatcagtgaagcaactctgtgcaagtgtctgtggagctcaagcttattgctggcaagagggtatagtcctgggaaacaggaaaatatgttgtgatttgaagtgtttctatgttgatgtaatttaaataatcacaacacaaataagtttgaagaccacttatataagtatctcaatttttaaaaattctcaaattgtttttttttttgttattgtaaaatactcaaatttccctggcttatgtttctttagttttattttcattactgtgttacccaggtttgttattcataatatgatgaatcgtaaaatacagtgatatgactggtataaatgtttctctgtaatttttaatggccttgttttagttattatatgtagttgtttctaaagtgtttgttacagcttatttttgaaacagattcttacattcatgaactagtcttgaagaagacagttctgaaaattttattatcctaatcttttcagtgtactaaaacattactcttatgtattgcagattataaagtagcttatatacaaggagtagtaggtactagggaaatgtttcattttgcataatgaaacattttgcataatgagtggctggattcaatggtttttttttttgttccttttgtacagtttggtttcaatgacaaattataaaaatgatattgttcttacatgtgttttgattattttcagtttgtcttgatgtttgtggataatagttaaacttattttcaagtttaaaatattttacaaacttgctatgcaaagtggttttaaaaatctcatttctaagcagttttatttaattatgtatggttcatcaaaatatatgttaacaaaatataagataactgaggaaaattaattgccatttgtatattccttagtaccagattatcgttgattatgtgtaatggagagagaataaatagctgaaacctaatattcttccagttttttttatgctgccggtttggatcttttttaatcagtccccttttcaaaagtattaccatgtcatgatttgaattgcatttttaaagttttcttatatacatatatttaagatcatagtaaactcccaaatacagtagagggggtaaaatccatatgctaatctgcattagaatatataaagttagatgacctttttaagaatacaaatataggctgggtgtggtggctgacactataatcatagcactttgggaggccaaggcgggcagattgcttgagtccaggagtttgagaccagtctgggcaaagatggcaaaaccctgtctctacaaaaaaaaaaaaaattagaaaaattagctgggtatggttccacatacctgtattcccaactacttgggaggctgaggtgggaggatgcagaggttgcagtaagccaagattgcactattgcactccagcctgagcaacagagtgagaccctttctccaaataaaatacaaacatgtttttatgttgtatagagcttgattcctgtgttttgaaagtagtattctttctttaaaaaaaagtattgtaagtacttttaaactttgtatgtcttagtcttatatcatcaaatgaaataatgtggagagtacatagcactagatttactgtactggagatgggagggaagggggaagtttcatgtctgatgtattccgttgatacatatggtattttaaaattcactgaaattctcttataaaaatgatgtgatttcaagggtcctctgaaacattggcaagtttttcccacaaatcccagttagtaaatcttttaggcttgctaagctagatggtctctgttgccaccacctgactctgcctttgcagtataaaactggatgcaaatgccatgaaaatgaacgggcttgagggtgttccagtaacattttatttacaaaaacactctgtttacgagctgtagtctggacttggcctactgtctgtaaacagtttgctgactcctattgtacttttatacattctctcctaaacatcctgtttttagctagacaagtaaaggcctttagatatctggcttttgagaggaaaggaggatattgggaaagtcaaattatgagtcagtatttgctcatgtacagttaaaaaaattatctccagctttattagaagagtatgttaaaggagcctgaagtataaactttttaccatgtaaatactttcaaaatgaattattagtatagcatttatttatagccacacatatgtaatgcatatacatgtatgtatttgatttggctccctggaatgcatgctttggagagggccattttctcgtaaagcattaattaggccaatagatcctatattcgtccccttttaggtgacttatagctgtgactttgaaagtatgacagtgtcagtagccaaatgagtataatgtagtttgaatcattggagattttcattccatatgaatggaagaccattgtctctgtatagtttgccatataaatgagtcatgatatgagtaatgaaaacaataatgagatgataaaaaataatagcacctaatatgcatttgtctgttcattagtgttaaccattctaaatgttttatccacagttctagagacaatattaattggtgttcacatttcccagatgagaaaactgagggttagaaaaagaggctgtaacctgagcctgggagtcttcttacttagttctgtttggctcttatgatgtaaacgttgatttattctaatatttctttccagcaagttactgccatcaatgaattacagcctagcaacttgtataggaaagtttcctagataggaaagttgaaggagtacttttattttcataatttacttttttcacattagaattaaggaatgctgttaatgcacttaattcactatagcatttatattaaagagcataccttgttcattaatgagacttgcctatggcatgaatttttattggggtcagggatgggtcggggaggcaattcattactcatatttggttgaggtataagttttatatgtagagttagacttttgtattttagaagatttagttgacatggtcatatctactatcctaattttattttaaattatgtgttcatttttcacatatgatttgcatttgaaaattagatgcttctatattctgtcatcttttattcacttcatctttatgagaattacacttatttaaaggagttttcctatatataattcattatatattcaatattattccaaaatatttctcaaatatg

SEQ ID NO: 129753 - DNA, 1220 bp, Homo sapiens
atgacaattgactgcgtgttactttgagaaaagtactaaacctttctgaatttgtttccttaagtgtaaaatttgtgaatctctatctccctgtgtaggagctggcacctacagaattgtctttgtttttctatgacaaagtcttccctaggctgagttggatattggactgaatgcgtcaggttagagccagaggttgactggagttggcagggctgcttggtctgctggagttcttggtctcgtctggaacctgccttcacattctctctgggtttggctcttgcagggtcagtccatctaccctcctacacccttgccaaaaattgtttccttggatttcacatctctgtgtgttacgtttataaatactttgtccttttttgggaatgaacaactttggctttatcctgtagtgaagggtgaatctttcgtctttcttcaagtaacatccacatgcaaaggattcatagatttctgcctccaaggtccggcagctgagctctggacactcttgatcttccaagctgcactccaatctgggttcttaaacatgtggtgcctgcatcctgtttcttctccagtgtacaaaagattccagaagtgaggcctgtccccaacaattcttttcctgccctcttccacacgtgacaaaaagtttaacaaattctcttctttctcctctgtttcctttcttagtgaagagtacttttttcttctaaattacataatgcagaaacttgagtaccagtctctcctctttaattttattttctggagtaggtaacataatcacagggctgaaaattcaaaagtatcaaaaggcatactttgaaatattttccttctcttcctctcctatattttacctcgttgcctccccactttgacgataactttatagagctctgaggacactgtgatttttgcaaatacataccgctttatagggatgatagttggcttggagtcagaagcaaatttaggaataaaaggaaaatgtttgttgaattttgacagatttctatcaagcagctaaaattaataagaaattaattttgaatggaatgtacttaataacatttacttctgtggtatgcatcattccctaccatcagataatatagatttaacataatttttggtcaggcactattttaaaaatcaagacatgaaaaatatttttatgctttgtggatatcatttgtttcagtcttcgt

SEQ ID NO: 129754 - DNA, 1014 bp, Homo sapiens
catttgagttactagtttttgaccaaatgcataatgccattatgagcatttaggtacaaatctttgtgtggatatacattttcatttctgttaggtagattcttaaagagtagaattgctgacctgtatggtaaatttatgtttttaagagaccaacaaagtgttttccagagtggctgcaccattttccattcccaccaacattatatgaggttctagtttattcacatcctcactaatacttgttacttcattttttaaaaagccgtgttagtggatataaagtagtatttcattgtggttttaatttgctcttccttaatgactaatgataatggaacagctattcatgtgcttatgggccattagtatatttttttggtgacatgactagtcaaatcttttcctgttttttaattgagttgttgattgttgagttgttagtattctttatatattttggatataagtctttatcacaaatataattttcaaatgttttttcatgctcttttaagtgcctcttaaagaatgttctttattagcttactttaggccaaaagattagggagatccagggtggtcagttcccccgtccctcaactctcattcttcttggtaagataaaacacattctgggccaggcgcggtggctcagtctgtagtccgagcactttgggaggccaaggcgggtggatcacaaggtcaggagattgagaccatcctggctaacacggtgaaaccccatctctactaataatacacacacatcaaaaaattagccaggcatggtggcaggcgcctgtagttgcagctactcgggaggctgagggcaggagaatggtgtgaacccgggaggcggagcttgcagtgagccatgccactgcactccagcctgggcgacagggcgagactctgtctcaaaaacaaaacaaaaaacacattctgcaggtatcaaggtttctgtataagatatactctgttttatgcatcaaacagaacctgagttttttc

SEQ ID NO: 129755 - DNA, 1079 bp, Homo sapiens
aagttaccttttgtggttactatatgaattaaataaaataatatagttaagaaggagtttaacactatgctggagcagaatatttccatgagaaatggtagttaattataatgacatacatttaataaacaagttattttgcttttgagcattaatttaaacctgtttatttttgttcttcccttccaggattaatttatttttggaaatcaagtgcaatattggaagccatttctactaattttatttcacttttaaatttatgatttgatttgaatactatcatgggaggagctgtgagtgctggggaagataatgatgacttaattgataatttaaaagaagctcagtatattcgtactgaaagagtggagcaagccttcagagcgattgatcgtggagattactatttggaaggctacagagacaatgcttacaaagacttagcctggaagcatggaaacatccacttgtcagcaccttgcatttattctgaagttatggaagcattgaaacttcaaccaggattgtcttttcttaacctgggaagtggaaccggatatttaagtacaatggtgggcttaattttaggtaattttatttttgtaaaattctattttaaaaaataagccattttgtattatggtttatgatttataggagttgtaactttgtgtacagtatgtttgaatgtgtatacacagtgtaggtatcttccttacttagatgtgaaaacacaaagtagtagtaatcttttttcattccgagtccttacctcaacctacagtagctctggaaactaactgttctctgttagtcattgtctgtacttaaagtcaagcgctggtgggcaggaaactcaggagtaatatttaatctatttcagatagagtgttctgtcttctggcatataaagtttgatggttatctaagagcattgtgccaggtttttgttaagagagacaggagaatgtgggatatataagatgtggcactgttagggtaaagcaagagattggagaaaaatagagaagaaagaagtatatgttcattaagctttcagcatatttaatgagtgt

SEQ ID NO: 129756 - DNA, 1027 bp, Homo sapiens
gtcctgaacaatatatacagtataataccagtcatatgtttaaaaaaacgaagtatatagttccttaaaagttaataatgacagtggttctttgaatgctagcattatgaaaattttaattttactttattttcatgttttctgcaaaggcacattatcatcaaatcagtgagtataataaaaaggtaatttataattcagtttccacattcagcaataatgtatgtggtaagagctgtatctgtgaaactctttggtgtggtttaagttattatttatgtaataatcttctctttctgtatctttatttttctgccctagactgtcttattaaatgtatttttattccttaggaaattttccatatggctttattatacttcatctgtgctctctctataacccctttaattttacctttacttgccaattttgttcaaataatacttgtaacacagtttgtaaagataccgcaaaccttgatgccaaagcatagcagtccctggcttcacctgttttcacccccagcctcacattccagaaggaacttaacacatatagccattttgtagggtatttaatgtacacattgctaactaagatgctgcttttcctttttattcattacttttggacagatttactttctgtcatcatagataaggttttagctcccatgcccctcttttcctcttctctctcactcagtgtggttaaacgagtattaaaactaaataaggaattatgtttatagtattttgactatgtaaactgtgtcattctcccacacccccccacaccaagtaatacagttctctttatagttttggtttttccttaaaatcctatttaatctttagcaaagaataattgtatatttatggggtgcgatgtgatgtttcaatatatgtttacagtgtggaatgattaaatcaggccagttaaaaaatttgcctctcaaagctatcattttgtatggtgaaaacatctacaatttacagtttcagcaataattgtttcagcaatc

SEQ ID NO: 129757 - DNA, 1049 bp, Homo sapiens
agagcacagtgctaggtatatagtaggcacataggaaattgctgctatatgttatcactacttaaacaaaatttaagatttgtattcatcattgaatatagagtaaagtagatgctctttgcagcttttggcaagtgagtagtgaaccttagtttagccatttattttctttaataattctttatttatatttcatcatatctctttatcagccccatcactgagaagaattttttcactgtatagttgcctctgcacttaaagcaggcttggtccatgaatcccatgacaagagctttgaggacatgaggagcattctttgttcaaacatactgtgttttcctttggatcactggtgagtaagcttccctctagagctgggtgagcttagtcctcagttttgcagagaaaggagcagcaaggagcagttgactgcttccctctgggtgctaggaggaaaggaaagtgagtcagcattcattttgttctcctcccaccttgcaacatctgtctgccattggtctgcttcctacctcctttaacttgtcagtgcttaatcctccagaaggcatccttaaactgcctaagagacaccataatattgtatggggcctttgacagttctttcctaaatagatttaagtcacaattctaaattttggaataatagcaagaaacgtttggaacactttgcagatagtttcaggtgtgtatatgtgagtgtaccctttattttctctgcagcccttacctaacacacagcagagagaaaaataccaaggaatgaaattgtgttttatgagtaaacatgatgacttccttctcaaacagacataactctgtaactgcttaagttgttgaaccttttattctgttcttacacttgatctttttctatatttacctttttcgtctttctctcaaattccttattttggttttattgttcagtgcaggacttgaacactcctaaaattgtttcttctttgtggaaaagaaaatggcaggagtgaggcagtaaaaattgtgactgaagtaacagaaatgcc

SEQ ID NO: 129758 - DNA, 1032 bp, Homo sapiens
gtttagctgttggttatgggagccacaggtgtgctggtggatggatcagtcggtgcttctctgtcactgctactgcgtaagtagtgcagaggttttgttctgattatgtatcattatatctttgtagtccatatttaaaatactgggccttgagtagaaggaactatttagaaatgtcatagctcaaaaagcaaatgcaaaacagtctttgttttagaaggatggtttatccctgttactcctgtaagtctcggtattctaaattttcatgttttcattgtagtgtcttggcggctagagcggattttaaattttctggtcagtcttcatactcaactggataagaacaaattttggaacatgcaaaggcagtcactctaattttagtttcaaggaaaagcctagcagtgatatatactgatttaccaggcattgtaaatcccattgtgaaagaattattttaaatacatctaaaccgtttttaataggcttgacttttccctgtaaatagagtaatttgaacctttattcttttatgaaccagagaaattagaaatagatgtaggcatttctacaatgatctatataaatatctgtgaatataaccattcatgcagttgatttggctttaaagaaaagggaggtaatcaccatggacttaaagtagtttaattacctcattatttatgacaaaaaggctttatataagcttttttttttttttttgttaaggacttgttcagttatcactgtttagttatcactggttttattgtatctaggcagcacaataaaattaattcacttcacactaatatatatttttgtgtgtacacacacacacacacacacacacacacgtatatccttacatatggccatttgtggtgcacagctcaggagacactattaacatagaatctaatataaatgacattccctttactgcttcaggaaaactgacactttatgtgggaatagtgcttcctggcattgtgtagtcagcatgagaccctgttaaatttgatactt

SEQ ID NO: 129759 - DNA, 1022 bp, Homo sapiens
ttagaatatggtaagattttttcagctgttgaagtggggaaggattgtgaatcaaacactatgtgtatgtgtattctcaaaaattaatgagaggtattgctgatgggaagacatagcatattttccagtttaacctgaaaatcctttttggaacattatgcacgggtagccagaaataactcaactttatgtcttgatacaagacatgcatcaggtatgatttctagagcttaaaatattcttggagtttaaaaactaatttgcataaaacactcttctgtgttttctactgagcactcttcagtaacttgcaggctcttaaaaacctttaatgataatcatgttatcaattgatgaagtcagttcagtttataatctaaagttataatgagcattgaaagagctgtagaatgtgaaatgctgtgaaggtctgtcttggtgactttcacaaactggcatctccaactctcccttcttggggcctttgtttgtttttctctctcacttcctgaagtatagatagatgttgcctgtaggtgttaccttaggtttagttcttttcctttttagagtttgttctcttctttggcaatcccacacagatccgtggtttcaactgctcattcccctcaccctctttgctcaggcttccacttgtgtatcatcagccttattttcattcccaagcttcagatttgccaatgttgttctccctgatcaacttagtagctgtcattttgtaatcttgaatcagtagattcagaattaaactttttttgcaagcctgattcttcttgcttgtttatattaatgacctttgcattttcttagtcatctagactcaaaatcaaaaggtcatccttggttcttctctctctccttttcttagaattttttttttttttgtcatcttactgcattgtggttcctgatttcttctatctttcttcagttcttccagcagccatatacacagcaagagacattaatctctaggtttgtcattcattgtgaatactgct

SEQ ID NO: 129760 - DNA, 1855 bp, Homo sapiens
gtaacgccgccgccagtgggggctcggggtcgtggggtgtgcgagtcccgcgtgctagggccgggcgggcgactgggatgcgcttggaggccagagggccagggggacggcagccgaagagtcgggggcagggggacttaagggcgggcaggtcgggggccaggaaactgaggcgctgcggggcaggttgggggaaggacgggccgggggcggaggacttgggaggtcggggagtcgaaaggggcccagcgaagcctggaggtcgggagccggggtccctggggccggggaggtcgggggcccgagggaggccggggcgccgcgtcctcggcccgtcctcggctcgtcctcggctctgacctgggcttggggaccagagtcccgaggctggcgtcttgagatgcccgcgggccccttagggccgttttggatccgcccagtgacttctgttttggttttggaggcagagaatccagtctacgtagactcggggaagtctcgggggctgggaggggactgagaggttatagcaggcgccaaggcctctttttgtgtttttgagcgtctactaccgttccggggaagtgcagtgcccgcgttttgcttggggaatttcagacaccggcatggggaggacccacgggcagaacccgagggagtaattttgcaaatccaagattttttggaacttctataattttgttttcgtgtgtcctctttttagaatcgagaaaccagagatatatttttaacattacaaatcagaagaatttgctacggaggaaaaaagtatgcttttagcagtgtttttcccctatttatttttttaattacaaaagtactgcttgctccttgagaaaaacatgaagcagccaaacaatgaggaaacctgccctctctcgcgcccttccccccatatttctccttcttactacccagggtagccagtctccaagtgtggtgggtagttattcaggattttttttttctgtgcatttaatgagtgtgctttagaaacaagattgggatcatatatagtacagtatatcgttttattagccaacaatgcatcatggatattcctccattttattacacacctcattattttaaaaaacattattactatgtattagagaatccaatctacgtaggcttggggaagccttttcttcattgttaaacatggtcgccaagttttcaataatcagtagctttgaaaagggctacaagccaatattttgaaacaatgtggcaaaactttcagaatgtctgcggccagacgacattactttcgtattaagcagattaatatgtttacgtattgcttaatggtagtttacatgaggctagatgactccataaaacataaagttgctgaattagtttactttttggttttttttatttcatttttttctaagtaaattttaattccatatggtcagttgaacacttgtaatttctttaacatgaagtagctaatatgtgaaggaaaggtaaggtaggaaagatagaaagctagtggccctagcctgagacaagaaaaaaaaagcaacagggattaaatattttggtaagtaagctatagggagtaaactggaagtggaggggtgatactacactgcctactattaagtaagacagaaagctaggaaattcccattgcatactgtatttctgtgtgcagaagagctggaggctttgttgatttaatcactagcttgtatttattaaaaatgtactgtgttcatcttggtgctagcttccagggaaagaacaactgaggaagataatcacgaacaacgtctggttctaaacatgcatagcctgaaattttaagccaaattgtgta

SEQ ID NO: 129761 - DNA, 1115 bp, Homo sapiens
aaaatttcaaaatctctgacagtaaatatatggacaataataagaaaataggatttgctttcaagagacttaaattggaaccaagaaagtagaacctttgccacagtatgttacattttcatttttaaaacatttcatgaatcataccccatcatctccatgtacaaatgtgccacagaaaagaatatttgcaagtgtattttctaagtcctagctgctaagtacatgtagataaatttaaataattattctcttgttccagaccaattttaacactgttttaacaagagagaaaatgagaaaagaaaacataataaatgatcttagtgataagttgaaaagtacaatgcagcaacaagaacgggataaaggtttgtactgttttgtactattttttttaattttttaaagtggaaaagatacattcatgcaaagtggtttttttaattacatgatacttttttaaatttgggtgtccttcagatttgatagagtcactttctgaagatcgagctcgtttgcttgaggaaaagaaaaagcttgaagaagaagtcagtaagttgcgtagtagcagttttgttccttcaccatatgtagctacagccccagaactttatggagcttgtgcacctgaactcccaggtgaatcagatagatccgctgtggaaacagcagatgaaggaagagtggattcagcaatggagacaagcatgatgtctgtacagtaagtatggctgttttcaactgtttttaaggctgttgcaattccatgagttataaagctctgaagagaggaaatatttttagcattactggttgtccacagcccatgtatctgaaagttgtgctattttaattctttaaactgtaagtgtgagaaaacattactgaatgaattattttggggtactctcatactatacaaagtatgtgcaccagaattatcccatactgccaagataaggatcatggcagtagtattgagccattcttatttacagggaatgttgacattttggggtccattacctataaaggggttattgtagtaatgaatatattcattttggtgaggaaaagcagggaagggttttttattattattattattattt

SEQ ID NO: 129762 - DNA, 4589 bp, Homo sapiens
ttttttttttttttttttttttcttgagacggagtctcgctctctcgcccaggctggagtgcaatggtgtgatactggctcactgcaaccttcacctcccatgttccagcagttctcctgcctcagcctcctgagtagctgggattacaggagcccaccaccatgccctgctaatttttgtatttttagtagagatgtggtttcaccatgttggccaggctggtctcgaactcctgacctcatgatccacccgcctaggcctcccaaagtgcttggattataggtgtgatccaccacgcccggccctaagtttttactttactgattatgacacaaacttcttaaaatacttctggtattaatttaaaaaggaatgataaggctcttgttatttttgacatattaaaatatttggtagcagttatctactagttcattaaaaaatcagaagtctaattgcattgcattctgtttcagggttcccttactttgtgactttgaacctctacaccagcatgtacttgctctacataatttggtaaaagcagcacaaagtttggatgaaatgtcacagaccattacagatctactgagtgaacaaaaggcaaattcaattctttcaaacagttttcgtcattagtgtaaaatgtttgtgttcctgcagctctttaagcctttctttctgttttccaggcatctgtgagtcagacatccccacagtctgcttcttcaccaaggatggaaagtacagcaggaattacaactactacctcaccgagaactcctccaccactgactgttcaggatcccttatgtcctgcagtttgtcccttagaagaattatctccagatagtattgatgcacatacgtttgattttgaaactattccccatccaaacatagaacagactattcaccaagtttctttagacttggattcattagcagaaagtcctgaatcagattttatgtctgctgtgaatgagtttgtaatagaagaaaatttgtcgtctcctaatcctataagtgatccacaaagcccagaaatgatggtggaatcactttattcatcagttatcaatgcgatagacagtagacgaatgcaggatacaaatgtatgtggtaaggaggattttggagatcatacttctctgaatgtccagttggaaagatgtagagttgttgcccaagactctcacttcagtatacaaaccattaaggaagacctttgccactttagaacatttgtacaaaaagaacagtgtgacttctcaaattcattaaaatgtacagcagtagaaataagaaacattattgaaaaagtaaaatgttctctggaaataacactaaaagaaaaacatcaaaaagaactactgtctttaaaaaatgaatatgaaggtaaacttgacggactaataaaggaaactgaagagaatgaaaacaaaattaaaaaattgaagggagagttagtatgccttgaggaggttttacaaaataaagataatgaatttgctttggttaaacatgaaaaagaagctgtaatctgcctgcagaatgaaaaggatcagaagttgttagagatggaaaatataatgcactctcaaaattgtgaaattaaagaactgaagcagtcacgagaaatagtgttagaagacttaaaaaagctccatgttgaaaatgatgagaagttacagttattgagggcagaacttcagtccttggagcaaagtcatctaaaggaattagaggacacacttcaggttaggcacatacaagagtttgagaaggttatgacagaccacagagtttctttggaggaattaaaaaaggaaaaccaacaaataattaatcaaatacaagaatctcatgctgaaattatccaggaaaaagaaaaacagttacaggaattaaaactcaaggtttctgatttgtcagacacgagatgcaagttagaggttgaacttgcgttgaaggaagcagaaactgatgaaataaaaattttgctggaagaaagcagagcccagcagaaggagaccttgaaatctcttcttgaacaagagacagaaaatttgagaacagaaattagtaaactcaaccaaaagattcaggataataatgaaaattatcaggtgggcttagcagagctaagaactttaatgacaattgaaaaagatcagtgtatttccgagttaattagtagacatgaagaagaatctaatatacttaaagctgaattaaacaaagtaacatctttgcataaccaagcatttgaaatagaaaaaaacctaaaagaacaaataattgaactgcagagtaaattggattcagaattgagtgctcttgaaagacaaaaagatgaaaaaattacccaacaagaagagaaatacgaagctattatccagaaccttgagaaagacagacaaaaattggtcagcagccaggagcaagacagagaacagttaattcagaagcttaattgtgaaaaagatgaagctattcagactgccctaaaagaatttaaattggagagagaagttgttgagaaagagttattagaaaaagttaaacatcttgagaatcaaatagcaaaaaggtaagaattaagtttagtctgtaattataaaattaaaatatcagtgattcgtttgtgtgtaatcacagtaccttgatttactcatttaccttgggtaaatgtagcaactagggtattttcatgaagtaaaaacttactttttagtcagtgtttcttgcaaacagaaataacagactaaatccatgagtggcttttaaaaaatgaatcagcagtttggattttcagagaaattttttgttgaaagtttgaaatgttttaaagagctctttgtttttccttttttaattcataagtttctctcttgatttatttgcagtttttttctaaactcttcagtagaaaattacttatattctctttaaatttagtatatatattaaagactaaaattttgttctgtatattgtttactaaaggctaaatcataggaacatgtagagtgttccttattgttattttcttaatacagtttcagttatttcctctgtgcttgaaagatgtttttaaactgcaggtttgatactgtggttgtggattggtggtgtttttacatgtttattattgttactgtctgatattactgccttttgatcacagaagatggtttttagtatttttacttttaatctgggtttaattgggttttgtgacccagtaaacagtttctagaacataattaatatgtcaattcattctatcatgaattctccaagtgaatacatatatatttcaacctgtgtcttgccttatcacttttatacaatctcttgtgattgtctgctctataatactcatatattggtatactgttaaacctccccttttggcttaaaattagaagctctttaggtattctgggggagggggcattagagggtttaatagaggaattagggtttgcatgtatgtttaaaagctggatgagagaaggttaacagagtcactgccaaaggccaggagagcttgtcaaagagaatcagagatggacagtacttaaagcagtaaaaacagattatattcagacactattgcagtatggaaaatagacctcattatagaactaggctcaattctgaatacagcatgaacaagttgagatttatagctaaggagggtaggggtcagtggatggaaaattactaagaggaaacataaggaataaggggaattttggttaaattgatctaacaggattcttactgaaggcaggccagggcaataaaataccaagggtggggacgataatttgttcagatattgatggagagatactctctaaactgagttagcaagacacttgatacagctggacagcgtaggcccaagaagaatagatgtcaaggtcgaagcctagaggagcctgattgaagtttagttcaggagagcccttttcaagctcaaagtgaaataagaggaaaacagaggctgaagcacccatgaaagctgatggttctccatggctcactgggaagctgctacaagattcaagaatctcttcaaagcaccagtctgactcaatctgcatcacaaaatggatagttctcagttacttgccaggaagctactgtgaaactgcatctggctacagccacctctggagaataaacctgtgctgcttttctgccttccaaaaccttgcacatcttcttttcattggcaaactggaagctatacctgggattttgggaaatgttggatctctgtattgcagtgcatatgagatcataaaagaggagcaagggcaaagcctatggaatactagacagtccagcactttataccccatttaaaactcagcatttagacagataaatgtcttttgcccatattgagcttccaaataaagacacttaaaataggaaacagcagttggattgaagacaccacctgaagaaattcattaaaatccattgtttgtctccatgtcttctggacaggacacatacttaatgttgaataagaacatggtagaaacctccctcccctgtgtcgtga

SEQ ID NO: 129763 - DNA, 1051 bp, Homo sapiens
atgtactgcttagctgttgttgaggttgtaagaagaaaaatgttcataaaacactacagggaggtatgcaagttgaattctattttaactgtatatgaactttaacgaattggtgtatgtttatgtttaacataagctttcctcttctagtgggctggtgctttagtcaaagatggaaagagattatatgaagcagaaaaatcaaaaagggaatcctttgggaaattatttagtaagtgttcattaataattttaattacttttgtaaaggataaaagtttttataagcttggattttctgtagcatacttcatgtatatgctgttaattgccattgatatctaggaaatattccttttaaagtgtatagaattgaatccattgttaaattttaaacttgaagtactgtcaacttttaatttaccttttcaaaaaccagagataattttttgccttaaataaagctctaaaataaccatattgttaatttctttatacagggaagtcttttttaagaaatcgtctgtttaggggactggactcctggcccccttccttttgtgtatgtatttattttctaaccatgactaaattccatatgttttaaaaccttttttccagaagtagagacatttatcagaaacttgcagaaattgttgtggtttaaaaaaaatcaaaataaaagtgtttttggctttaaaagccagttagcataaagctttaagattgatatttgtattcataattttttataaagaatcttcataacacaggaagataccttatactgcactgttaggattggtagaaatagattcacttggtttttttgttttcttgtctcttcctttttttctttccacccttccctcttctttcttccactgctcttctccctccctcctcctttacagcctccacctcctccttgcccttctatatttcttttcacaccacccccctttatattttgacaaatcagaataataaagcctcagttagacttcactggaattaaacgttagtttgatatgtttctaaaccattgtta

SEQ ID NO: 129764 - DNA, 1632 bp, Homo sapiens
ttaggaacaagcatagtaagtcaataatagaaggtttcatggttgctacccaaatgtagatgttagtaaacagtcagaaacacagtttgagaatctgtgagactgatcagtgattgaagtagacttgggagttatctccagaaaagttatacttaatgctgaaatcatattgagaacagtaaaaatgggctaaggacaaaatccttctgaatcatctgttttagaaagattagacagagcaaaaggagccagaaaaggatgctgtgaaggaaccagtagaagtaacttcccagagcctttaaggttgggaaaaggttatctgccatgctaactgttgaagagcctcaagtgaagcaaggtcattggtagtttttggctgagcagtttttatggaaaacgcagacagaaaggctgccaggtaaaatatttttttaagggaccaggagcattatcggaaaattttataggttccatgaatttcagcaaatgtgtagaattagagccagggaacaggagagatggaagagtgagaaagcataattgagcaagccgattcgttgaggagatagaaatagagaataaggaagttttatcttctatctccaggagggagataaatttgccgaagaagtttatatgttttaaagagaagttgcattgataagagaattaatgatattatgctgacattgaaaatacctttttctgagagatattgacaagtgattaaattgtagcactgattgaaatgtgtgattcttgaaaatgtattcctaattatgtattctagtgtaaattcagtgttgtcaaggatatttatcctgtacttgaccttcttatgaaagtataacttagagttcccatgcttttgcttttttatatcttttatcacttattttctctcaagctgtatgtcagaatagcatgaaatacattttaaactatttgctgaaaattgtattcgtatgtgtttccttgtcatttagcttgatccaaggattattcgaccatttatagcagaatgccgtcaaactattgccaaacttgataatcagaatatgaaagccattaaaggacttgaagatcggctctacgccctggaccagatgattgctagctgtggccgactggtgaatgaacagaaagagcttgctcaggtacctattttagacttttctcaggaaaaggaatttatagtttttttgtacacatgttttatatgcagtatcaatttggtgtgcaccatattttcactttttccttgaatatttttaatgtattaatattgtttccttgtaataaaacagaaaagcatgttcttaatgattgagtttcctatagataaaccatgaaactgctacttgaagctgggggcagaaatcaacattttttgatatgttgaaagcagatgatcatatcagttattgtgctaaaaatttcaatgcttcctactaccccccataggacgaaggataagaaatgaaattttttaagaataggagaatacgaaatcttgaagaatttactaatacttctaatagtaatacctaggttttagatctgatttaatgccataatcctagaactgttgaaaaagtggattttaaaccaaaggaaggtgatggaatggct

SEQ ID NO: 129765 - DNA, 1120 bp, Homo sapiens
accacactcggctaatttttgtacgtttagtagaactgggttttgccgtgttggccaggctggtctcaaactcctgacctcaaatgatttgctgccctccacctcccaaagtgctggcattacaggtgtgagccaccacgcccagccctagagtgatattttaatgggttaacgatagcctctctctgctaaactagacttttagtgaatagctagctcatagactagtttatgtatgtataatgttatggagaggtggtgagatttgtgtgtataataatatgtgatttcattcaaacatgctaattcctaattagagcagtctcatagttttactgacagatcttttgtattttaagtttaggaactgcagtttcagtaatggccaagattccactgttggagtgcctaaccagacatagttacagagaatgtttgggaagactggattctttacctgaacatgaagactcagaaaaagctgagatgaaaagatccactgaactggtgctctctcctgatatgcctagaacaactaacgaatctttgttaacctcatttcccaagtcagtggaacatgtgtccccagataccgcagatgctgaaagtggcaaagaaattagggaatcttgtcaaagtactgttcatcagcaagatgaaactacgattgacactaaagatggtgatctgcccttttttaatgtctctttgttagactggataaatgttcaagatagacctaatgatgtggaatctttggtcaggaagtgctttgattctatgagcagggtaagtaacgttaatttgatgtttgttttgtcattttactactttatattatttatcctaaatattttatgtactgagagaatgggtattaccttttagtagaaataaatgagtcttggagtgaaacttttaacataggttgaatcaatttaattcataattttatttatgaattgattgtaaatttgtgaaggttatttgagattaataggaaaaatttctagtgcaataagaataatttacatacagtaaactacacaggtcttgagtggttcatgcaagaaataaccaccacacaaattaagataatgaaaatttcattgcccagaaa

SEQ ID NO: 129766 - DNA, 1739 bp, Homo sapiens
taccccataaagaccatcttacttatttactttggtaactagataacttacagtagcttttttacagtttgcctggacaacttaaaaataatcattttacatccattctttcaggtgccttcccgttccaccttatgacattttctgtattatcagtcttcttaaagcttctatttgattacattcttcatgttaaagagttcttgaggaggtcttttctgagtaaagtccaattcctccttccttaccttagtatcttctgggtctttgatcatctggccctctttctctcgctttttcctccagaccatttgttcttaaccaatagtgcttcatatttcctgtctttgccacttcgtgttccactcttttgaagtacttctttccctatctttgttcatattcttttcatacctttatacttaagttaaatgccttcagttaactttgacttctcatttcctgtctcttttgtgacttttatatctgtctcataccagttaacaaaggtagaatgatctgtcttatttccttgccaactaaaatattttataacagtggacttctttatatatctccatatataaagcaatctacattgctgccttgtaatttatccttaataaatatttttgtacttcattgtttggaactgaatgtcagatgtctattttctgaaggtattttcactgcttaaatattttctagaatctcatttagggttactaaatctgttatagttatactaatctagaagtagatgacgtattttagctttgccttcaccaaaaattgtttttaacatgaatgtcttgagataataccagaggacagtgacatttgagatggcagatgttgatcattagtcaaataattgaaagccctactcctttgtttttcagaggtagcgtcttatggattcttcttttgactgtctcttaggatacctgctcggaaacacctcacttatgtttaggctgtcttttacagaagagaacagagataaactaaaacagtcctttgaaatactttgttaaatgtgctctacaacgcatccacacgtacatgtttgtaaacatatgcaaacttctgcaaacaaaccattgccttcttttactttcttttgtattctttttcaatataggaaatgtatgaagttgccaagaaactttgttctttttgtgaaggtcttgtacatgatgaacatcttcaacaccaaggctgggctgcaatcatggccaacctggaggactgttcaaattcataccaaaagctacttttcaagtttgaaagtatttattcaaattatctgcagtccatagaagacatcaagttaaaacttactcagtatgtttgccattaaaatggataatatttgtttaaaatgcctttgaaatttatcagtaggtttaattactgcaaatttgtttcttataggccatatatttattgtaactgaggtttattctttgagccttttctgatagtgatttgtaggttatagtttttaatttaaaaaatgataattctctttacatgtatgagtctcccacatttctttctcttgggttgttttacttgtaataaggctccaaatacttttgaaatcatttataaaaccaagaatctttgcttatgtcttgtccactaaacaaaaggcaagatgtgaaaaataacatctaacagaaataggcacattatcaaacactggacaatggaggaaaattttaagttctttg

SEQ ID NO: 129767 - DNA, 1036 bp, Homo sapiens
attggaattattataaatagtgtgtgaaataataatctttgttgtaaaaattgaattatggattttttttccagaattagttttcattaaacttgattttacacttacatgaatgattttttggaagatagggataggaaggaatcttcacatgtgttagacttaatgtagtttctaaaacgtgtggagattttaacaaaaattatgtagcctgaggattttaatagacctgataaccagtttgagcatattcttttgctgttatttacctaagatcagccagttgttatggaatcctgttcattaaataggaagcttatatttttattactgtttttggggaaggttttagagtgaaattcattaacctctaaggtgtttttacatagtactacttggaaaataaagtcattgggcaaatataaacaactgatttattttatttcattttttgaagtgtggcagaccttaagcatgccattcaaagcaaatacaagattgctattcaacaccaggtgctggtggtcaatggaggagaatgcatggctgcagatcgaagagtgtgtacctacagtgctgggacggtaggtattcaagagtcctttcacacaagaatgcaacatctttacatcacattgggaactcagtgttcaaaagtaaggtttatttgcttcatatattgaaggcaatgtgcacgctcagtatttataacattttattttggttatttctccttttttaaaaaatataggatacaaatccaatttttctttttaacaaagaaatgatcttatgtgatcgtccacctgctattcctaaaactaccttttcgacagaaaatgacatggaaataaaagttgaagaatctcttatgatgcctgcagtttttcatactgttgcttcaaggacacagcttgcattggtaagatataaacaattattttaactgattgtttctaaaagcattcggatctaaatagcacagtagtctaaattgcataggaagtatgcaaaaagtttgacaaataaactttaa

SEQ ID NO: 129768 - DNA, 1041 bp, Homo sapiens
cttgagggtggggatttcactggagtatgaatacagtaggtggatgtggtacagataattgctgctgtcttagaggctgtctgctgcaggtgccatttttattcctatttacaaaagaggaagccaaaacagttgtccaagatcatataattgcaagtaatggaccccaaaccaaacccaagctttctaactccactgcctggatacttctttaccataatattttaaggaatgaggaattgttgtggaaatggccgttttgaggaatttattggtgacttttgtttgatgccatggattgatgtgggttgaagtcatgtggttgttattatagtgaatgtgcaagtagaagggcctgagtagagattattcttagacggtagttttaaaaggaagaaaggaacaatagccatatgttgtttcgtactgaattgtttctctttataaccagaaatttttcttttccagttttctgagtttaaccagtaatgccattcagttgccaatctcaagcaaagcaaacataagccagttttaatctactttttaagaaaagtggtagtccttttcacagtgcctgacggtaagtcacagtttctacctgtatagcagagtttaatctattgcctttaaaataatgattctggaaatcttaattttaaaaccttatttgctttttccttctctaataattctctaaggcttatgtggaaagagcataagtaaaggtacctactactttctgggaatttatttatagttatcgttcaccagtttcattaatcttatggatcttttcctccatttgttgaaagtaaaatgctagaccatgaaatctgtcccctttttatgtcattattttaagttttttttctttctctttttcttttgagatagggcctttctctgttgcccaggctggagtgcagtggcacaatcgtagctcactgcagtcttgaactccttggctcaagccatcctcctgcctcagcctcccaagttgctaggaccacaggcatgcgccaccaagtgtgtctaatt

SEQ ID NO: 129769 - DNA, 1008 bp, Homo sapiens
tctgctcactataatattacccttcttttaatttttacaaaatcttggtttaaaaactaaatcattgttttaaatttgcattccgttaataatgaatgaggctgagcatcttttaatattattggctatttatattctttctataaattgcttattcatagcagttgtcaccttccaaattttaaaatttgatgtgtaggaactcttttctaggtgtcggtagttaataacagctaatgtctattgagagcttattctgtgtcaggcactgtcctaattactttaaatgtattccacatataattgtcccaggaactccatttagtggtcactaggacacgagaggttaagtaatttgccaaaatagctaggaagtggcagaccagggatttaaactcaggcaatatgatgcgtgcttttaaccatcatgctaatctgtctttgatgctgagaataataattgttaaaatttattaagtaatttttatgcattgccttatttaagcttcatgattacccagtaagttctattactatttttattgataaggaaaccaagactcggagataattccccagtaagtgaaaagattggaatttcactgagatctgccagctccaaagctgtcctcttaaccaccctgctatctcctttttttcttgtctcgatgcattttctcaggaaccttaagactggcattaaaaagggggaaacgtgaaaaggaaaaccaaagctaatatcaggggaagatttctttgcttaaaataccagctggatgtgttaagccctgtgtatttcctggctgcctggcaagggctgagtgagtgagggacggcatggaggagtggtgttcagtgtggattctgggagagtgtacagtgagatccaggtgtggcctgctgggtgtgataaacaccgaccagctattgaccaggtgttgggctgggcattagattttctttcgattatgtttatttatgaaagtaacagtctttttcatgtaaaaa

SEQ ID NO: 129770 - DNA, 1790 bp, Homo sapiens
tgcttagcattgaatttgtgtgtgtgtgtgtgtgtgtgtgtgtgtgtttctcacattgcaaataggaataatgtgaggagaaaaattttcaagtatagcccatttgaagagaggaagataactgaggtctttttttttcctttctgagacagagtctcacccaggctggagtgcagtggtgcaatctcagctcactgcaacctccgcctcctgggttcaaataattctgcctcagcctcctgagtagctaggattacaagtgtgcgtcactacccccagctaatttttgtatttttagtagagatggggtttcaccatgttggccaggctggtcttgaactcctgacctcgtaatccacctgcctcggcctcccaaagtgctgggattataggcatgagccaccttgcctggccgataactgaggtcttaaaaaaacccagcacattttaatctatatagtttgctgacttttttattgttgttaaaaagcctattatatacataatacaacactgtttatttgtatacctatgtaagatagaaaaatttacattatattgtgctatatattgttagcctcacaagaaagtctgaaggttaacattaacttcctaaatattggagctataagtgggcctttgctgggggtaattgcctctactgcccaaagtaatttatagatgcagtgctattcccattaaactaccattggcattcttttttattttaatataatttgatatgaagaattattaactaagtacacatttgccctttttgtatttttttgggaaattttttggtattgttatgtttttttgatagagatggggttttgccatgttgctcaggctagcctcaaattcctggctcaagagatccgcccaccctggcctcccaaaatgctaggattagcagcttgagccaccatgcccaaccactaattttgtttaaagtggaaaaaaaaaaatgactcttgagtgtcagaaaggtagtgagtgcagataccacccataaggtggggtgggtgatgtaaaataggtgggcaatggtaagagactggaatcattaaaatttgcatgcttggaggaggggctgagtacagctgaaatttagacatttgaggaggaggttttgcccagctgatattggtgtctctgaactccgaggaaaagcctcatggatttggaacccaggactctggggaggggagccagttggctagtgctgacatctttgaggaaatgtgatgaggcttgttctgctagagctggaaaaactgcaaactgaatttggctgctgctgtgggaaagaactgctgctgccgggttgaaggagtgttactggggtaatgctctcaggatcaggaagccaacaggaggaagtctgttcttccttccttgaagtcagcctctagctcctgttcttggcatagcctaacatggagccaactggtagaacagaaatgtggttttcagggtctcagccacagcatcacaaagccaagtgcagaaggcttggcttaataactggaacagacagcaaaggaaaccagggactagggtgtttacagtataaagtgacatgattttatagcagtttatgtactgatatcaatattaattaaaaagcaagttttacataacatccaaaaatagagaagacaaggcaaaagccatgcatgagaacattaaaaacaattagtgaactgaactatatacaaatcatacaaatgaagaaatgacacagataaaagcctttcagtaagttacagtaagtttagattgta

SEQ ID NO: 129771 - DNA, 1014 bp, Homo sapiens
agaacagctattcgcagaagtaacccattctaagaaattgcatacaaatactgactgaaaagacctagaatatttgggtcccttcacaggtatatcctacactggagatacagggtaagagtccaatgcttgctttaaatcctcacccaccaagcaacttactgttgataacctaaactcctctgtagattttctaacagagaaacaatgccttgctaaatgaaaagaatatttggtttaaaagcagttagatctctcatgaacaaataaattgattttctgatggtaaaacaagatttccattgttttggaggttttcaggtgcttgtctgtataagcctgaacaggcagctcctcaaagtttctatacctgcaaattaggatcccacaaagattgggctaaattatatggcattagaaagaaaggcttatattcactctttcctgggtaagaacttttcttgttgatttttgcctacattcatcatcaattattttctaaaattttttatattctgagtacctggaatctgtcttgttaagcattaggttcttaagaggccttaacctcttataaaagaacagatcaagcaaggaaaggggctcagtttgatagttactaacttctaaaaagcttagcatagtcaattgttaaacagatatgaaaaaaataaaatatttcttttagatgattacatatttctttgaaaatgtcaaggagagatgcttgtaaatgttattttacattaaaaggaaagggcactcaccaatttaccccatctgcttccacccaagcaaagcggtactcattgacccggagcatcagctgcaaacacccggccacgcactgcacatactgcgaactctgcacaagaagaagtgttgagtttttaaatgggaagcatttaaagtcatgcgatcagacacacatttctaaatgaaaagtcagattacctactggaattaccatctgagcatccaaaattccctaatctcttttcaaaagttaatcct

SEQ ID NO: 129772 - DNA, 1003 bp, Homo sapiens
tgtgttaagtagtcttgacttgtgtagatttaattcaggagacaaaatcttgttcatttctaagaggtagagattaaagcaaacatgaggattaacttttgaaaagagattagggaattttggatgctcagatggtaattccagtaggtaatctgacttttcatttagaaatgtgtgtctgatcgcatgactttaaatgcttcccatttaaaaactcaacacttcttcttgtgcagagttcgcagtatgtgcagtgcgtggccgggtgtttgcagctgatgctccgggtcaatgagtaccgctttgcttgggtggaagcagatggggtaaattggtgagtgccctttccttttaatgtaaaataacatttacaagcatctctccttgacattttcaaagaaatatgtaatcatctaaaagaaatattttatttttttcatatctgtttaacaattgactatgctaagctttttagaagttagtaactatcaaactgagcccctttccttgcttgatctgttcttttataagaggttaaggcctcttaagaacctaatgcttaacaagacagattccaggtactcagaatataaaaaattttagaaaataattgatgatgaatgtaggcaaaaatcaacaagaaaagttcttacccaggaaagagtgaatataagcctttctttctaatgccatataatttagcccaatctttgtgggatcctaatttgcaggtatagaaactttgaggagctgcctgttcaggcttatacagacaagcacctgaaaacctccaaaacaatggaaatcttgttttaccatcagaaaatcaatttatttgttcatgagagatctaactgcttttaaaccaaatattcttttcatttagcaaggcattgtttctctgttagaaaatctacagaggagtttaggttatcaacagtaagttgcttggtgggtgaggatttaaagcaagcattggactcttaccctgtatctccagtgt

SEQ ID NO: 129773 - DNA, 1172 bp, Homo sapiens
tatcttcatttagatattttatgactgttgactagaggatctcttttaatcagccaacttcaagagaattcttggggtatatatgtattttaattcctgaatattgataataatagtatattttacaattgtttagtgttttgtagaaattgatttcagtgtcatgacagtttttttttatttttcccagtggtagagatattatttttcttttcctttgctaacgagaaaacaattttcgagattaagtgatttgcccaacattatgtgacaaaacttctgattcttgttctagtttttactctgtccttctccctctctattcctcttttactttcttttctctatttcttttttaaaattatgtcataacttacataaaggaaaatgcacagatgttaaatgttcagcgagataaatgtatacctcataattcctcctactgccttcacctcaactcgcacaaaggttatcattattatgacatctattaccatagagtagtgttgtctgatcttgaactccatttaatggaatcatacagtataaattcttatgtgtctgagctctcttgcttaatattgtgtctatgaaattcattcattgcatttagcagtaattctttttcattgcaatgtagtatttcattatatgaatattactcattctcttattgatggatatttgggttgcttctagttttttgactcttgtgaataattttgctgtgaacattcttgtacatatcttttggcagatgtatacctttatgtctgcagcacctaattttagaatagaattgctgattaatgggatgtatgtaaatttagttttagtggatcttgcctgttttttcagtttgtgtgcccttcaacaaagcatgaaaattccatttgtttcagttctttactgacacttgatattgtcctgtgttttctaagtgtctatattgaagcaaaaatcacacatacacacatatacaatcaccttttagttttaaaagaaaaagaaaagtttaatagtcatgaaacatattaattacttttagaactttgatcagcatcttttcatttcacttaaaactgctttctgggacttattttagtcaattgtatgtttgaaaagttcatctttgtggttcactgataccaatgtgctgtgcattttcacca

SEQ ID NO: 129774 - DNA, 1680 bp, Homo sapiens
tttacagtacgcataggcaagagaacgattcatgagagagcccacatgtttccgtgtcctgttctctgtgatttgtgttgcagaagcagtctggaatgagtagttgctagatgaatgctgtgtcactagtagtgacttaagttgccaggtccttcttgcttgtttcatcttgcctcttgatttagtggagcaatccatgtccagtagaaatttctgtgatggtagaaatgctcacgatagctgtactgtccattgtggcagcccctaaccatatgtggttctggagcccttggaagtgttgccggtgtgagtgaggaagtaaattttcaattttatttagttttaaaaagagccttattgaaatatatttcacatgctataaaatgcatcattttgccattcagtgatttttaataaatttacagaattgtgcaaccattaccacagtctaacttcataacatttcaacatctcagaaaaacaaaccaaccaaccctgtacacattaacagtcttccccattcctgttcttgcctccaagccctggcaaccactaacctactttctgtcttgggatttgcctcttttggacattacatataactgaaatcatacatggtcttctgtgactggcttccttcacttagcataatgttttcaagattcatccgtgttttagtgtgcagtaacagtattttagattgagaggaaaaaggacttagttttttttttttctaagtagagatgggggtttcgccatgttggccaggctggtctcgaacgcctgacctcaggtaatctgcccacctcggcctcccaaagtgctgggattacagacgtgagccaccacacttggcctaggacttagtttttttttggcttttgaccagattccttaaattgttttctctggcagttctaatattcttgttaatgagagactagtttgtttttaatttaatgctgtgctgatgtaatacttgtcaccccttcagaagaggtggaagacttctttgctttagttctttactgctttgattataagtccatcaaaagtgctgattaagtagcagaaatcagtgggccacatcagttattcacatactgcaggcctgttattaaattgtagtctgctgtagctggtgagttgtgaagtttgtggggacctggagtaactcacaggcaattacagacagtccctgccctacgatggtccaacttatgatttttcaactttacagttgtgtgaaaagcatatacatttggtagaaatagtacatgaagtatccatatgaccattatgattttcactttcagcacagtattcagtaaattacacgagctgttcaacacttgattataaaatgggctttgtattgatttttggaaggattgcctggagatatattctgaaatgcaaaagaaaattaactggtaaagtatttaaatttaagactttcttttacatgtcattttcaaagtatagcactgataacaataataagctaacctaatactatgtatttatcagttatgttctcggaagttgcatacaaagcaataatttataaagaaaatcacttttttttagttatgctgacaattttttttctgtaataaagattcccactagtcatgtaattgaattactggattaagcacattagattgaaagcagtac

SEQ ID NO: 129775 - DNA, 1052 bp, Homo sapiens
agttatctgattaaactgtctaatatctgtctaatcaaaaggtgaacaaaagcgtcaaacatttgaaagaaattcagttacttttatttatttatttattttttgagacacagtctagctctatcccccaggctggagtgcagtggcacaatctcagctcactgcaacctctgcctcccaggttcaattaattctcctgcctcagcctcccgagtagctgggactacaagcgcccgccaccacacccagctaatttttgtatttttagtagagatgaggtttcaccaagttggccagaatggtgtcgatctcttgacctcgtgatccgcctgccttggcctcccaaagtgctgggattacaggcatgagccaccacgccaggccttctttccacatttttgtagagccaaaaggctctacataaatacataaataatctacataattaagattaattatggctccccaagttcctttcttggctaaagttacgttttccatttgggaatggctgaactttgctgtgctctaggaatagctcaggaactggaagtaagtttggacaagttaacgatgttcatgatgagagccagttgatagaaagttagggaaaacggagacagaaacagaagtgtgtctagcttcctttgttgaaagtatcactaggaaactaggaagtatctttagagggtagtttctgtaacctgcctgcaatagacccaagtgaagctctgtaggagccatttaatatccatattggttgctggtactcccataatctgaatgaatgtcacgggtatgtatgttccaagaccatagatggcagcaaaatccattttgaagctgggcttctcttggagcatgggttgaagtgtttgatgactcatatgttaggccagaaaatggctattagccttctgaagtggaatcagaacaaggtatagaactagatacgcgatcctggggccatggtgggctgaggaaatggtaggtaagaagcctcgtttctcaatcagaagcagatgtttacattgagaatctttattttgctt

SEQ ID NO: 129776 - DNA, 1794 bp, Homo sapiens
tagccgggcgtggtggtgcacacctgtagttccagctactcagcaggctgaggcagaaggatcacctgagcctgaggaggttgaggctgtagtgagctgtgatcgtgccactgcactccaccctgagtgacagtatgagactcttgtctcaaaaaacaaaaaaaaccccacaaaaacaaaacttcattctgggtaatgttagctttcaggtatagtggtaataaggctctgtagctgaattcataaaatgaaaattggtagggaagaatggatgccgtggcgtgctactagctttttgggcacttctaccttaaacttttcctcctaggaataacagatacattgtgcctctcaggtgactgtcacttctggaatgattgactatgcttgtaatgatgtgcaacaactgggaggaatatttctctcatcactagtggaagtaaatatttcaatgtctagaatagttttcattagaattgaactttttatagataaatgctcttcaagtattttctgcatctttttagtgcactcttttttatcacagagtgtttggctttaagttgtggactttaaattgtgcagtgcctctgctttgcgggtccttctgctgcaggggaactcttcagggtacccaggcttagcctggccttgcttcttagtctggctactgcttctgcttggctctcattgcactgtccctcttgctgtgggcaggcacttcttcatagccttctatcatgattaaaattcagactcttcgttttaaaaagtaacaattatttgtgatattacttgctactttgctcaattgtcatgcgatagtgctacatctagagtgtctcttttttctctgtcacaagtgtttttctctctcacaaaaagtaccacaatttcatgattctaatagaaataaactttcaaaagtccaagttagctgcaagtttagatgttttgttctttgaccttatagtggcctttgaagcctttttgggtagtttggagcgttgcacttgggttgtggggactcatgcctgtacttcatagatagtagttattgaatgatacaaagttaacatttcctttcagaaattcattattgcttttctcttgcactttcagcctctgactttctttaaattttctttggtcatttctatatgacatttgagattttgattgtcattataattcattagctttgctgtggataaccaagtcacatattgtaccttcctgacatcaggcacctatttttgaaagctttgctacagaatatagtgtggatagttcaatttaaggcagtcattttactggaaaaacaattcagtaagtaaatcttaagacttggaaatttgcactagctttacccatgaaatttacctggagcttagtagtcagtttattattgttccatttttagctacttactgattaatatattatctggaagaatgtaacgatatttagaacattttatgtcatccccttgctttttatttagtaggattaggaataaaattataggggaaaaattattacatagaattaggggaaaagtttgcttagctcccttttgtaagctgatacattaggataaaatcaaaacaaaactaaataatgagttatttatttcgtaatagaaactgcgtggtagcggtgttgctgttgaaacaggaacagtctcttcaagtgatgtaagtatattccttcactggcctaaacatccccaaaataaattattttgagtcatatacacttaaaattttgaaggtgtttactagttccccaact

SEQ ID NO: 129777 - DNA, 1008 bp, Homo sapiens
taataaacaaactggtcctgggtgccaccaggggcatttcaaactgcaaacagcatgttctagatcattattagctaacctgcttgtccttgtctggccaagtccctcccgtgcttccagctgcctctgggtgagcctggagctacctggtccagctgcgaaaggggtgagcctggagctacctggtccagctgtgaaaggacactgtcccacacggtggctcgttctcacaatttcacagtttcagggtgggattagttaggcctaacgaacctactggtcatgttggttgcttgcaggcctttctagctctatgtcttcgtggaggaagatagcctgcaggtgtaatgccttggaaaatgacaagttttctgttttgtcttcatgtttcctcagaacagggcaaaagataggacatgaatgatggctctgtggagtgttagtttcaggcttacagggttgaagtgtaggtatgaagaggtttggtgggattgatactcagaagaggagagaactgaaggtggacaggggaggaggattctggagatgaaaaggtagaagggaatgagattttgatgtgagggtgacctagaggaggaatgggaccaggagaaacaatattattaggttgttagattacaaatgaatgtctatttgaaattttttgaaagttgccatttagatttcaggtgactttattattttaatagattttagtttgaggcataagaaagacactgtattttgcttagatttactttttgtcttgttgcctgccttttttaggggagcctaattgccatttgtatttggatggagatattttagagtttcttgatcaaaatcttttttatgttaatagcatcaattttaactggtttggggctcggttttaaaaagcgtttttacaagagccaccattttattgagtttgtgagatatttcaaaaacaagctatttaaaacatgtaagaaacatgcttgtgaaagtgagatttaaaatttctaa
